United States Patent Application Publication US 2019/0348154 A1 - sequence listing, part 85

SEQ ID NO: 322617 - DNA, 840 bp, Pseudomonas aeruginosa
atgttcctgactgatcacaagctcccgctgggagagcagatcgccggtttcgtcgactggctgaccctgcatggcgcatcgttcttcgacaagatctccgacaccctggagttcctcatccatggcgtcaccaacggcttgctctggttcaacccgctggtgctgatcgccttgctggtagggctggtgcatttcatccagcgcagctgggggctgaccgtgttcgccctggcctcgttgctgctgatcctcaacctgggctactggcaggagaccatggaaaccctcgcccaggtgatattcgccaccctggtgtgcatcgccgtaggcgtgccgctgggcatcgtcgcagcgcacaagccgtggttctacaccgcgctgcggccgctgctggacctgatgcagacggtgccgaccttcgtctacctgatcccgaccctgaccctgttcggcctcggcgtggtgccgggcctgatctccacggtgatcttcgccgtcgccgcgccaatccgcctgacctgcctgggtatccaggacgttccggcggagctgctcgacgccggcaaggccttcggctgctcgcgctggcaactgctgacgcgcatcgagctgccgcacgcgatgccgagcattgccgccggcatcacccaatgcatcatgctctccctgtcgatggtggtgatcgccgcgctggtcggcgccgatggcctcggcaagccggtggtgaacgcgctgaacaccgccgacatctccctcggcttcgaagccggcctggccatcgtcctgctcgccatcctgctcgaccgggtgtgcaagcagcgcgccgtgaaggggaaataa

SEQ ID NO: 322618 - DNA, 939 bp, Pseudomonas aeruginosa
atgaaaggttgcaagtcttggctgctggccgtgtctctgtgcgcaccgctggcagcccaggccgcggagcccgaatcctgtgcgtcggtgcgtttcgccgacgtcggctggaccgacatcacagtgaccactgcggtcacccgccaggtcctcgagtccctcggctacaagaccaaggtcaatctgctctcggtgccggtgacctaccgctccctggccaacaacgacctcgacgtattcctgggcaactggatgcccaccatgaccaacgacatcaagcagtacgccgagaaaggtacggtcgagacactgcgcgccaacctggagggcgccaagtacaccctggcggttccccagtacgtctacgacggcggcctgcgcagcttcgccgatatcgcgaagttctccgacaagctgggcaacaagatctacggcatcgagccgggcaacgacggcaaccgcgtcgcccagagcatgatcgacaagaacgccttcgaactgggcaagttcaagttggtggaatccagcgaggcgggcatgctctcgcaggtgcagcgggccatccggcgcaaccagtgggtggtgttcctcggctgggagccgcaccccatgaatacccgcttccagatgaagtacctggaaggcggcgacgacttcttcggccccaattatggcggcgcgaccatctacaccaacgtgcgcaagggctacgcccaggagtgcgccaacgtcggccaactgctgaagaacttcagcttcaccctcgagatggagaacaagctgatggacgcggtactcaacgaaaacaagaaacccgaggaagccgctaaggcctggttgaaggatcacccggaacagctggatgcctggctggccggtgtcaccacccgcgacgggcagcctgccgcagccgcggccaagctggcgttcgccaagtag

SEQ ID NO: 322619 - DNA, 1377 bp, Pseudomonas aeruginosa
atggctatcagtgtgttcgaccttttcaagatcggtatcggcccgtccagttcgcataccgtcggccccatgcgcgccgccgcgctgttcaccgctgccctgcgccagcgccaggcgctgtcggcggtgcggcgtctcgaagtgcgcctgtatggctcgctgtccgccaccggcgtcggccacggcaccgatcgcgcggtgatcatgggcctgatgggcgaatggccggatcgtatcgacccgacccagatcgccccacgcatggccgcgctgctcgatagcggcctgctgcaactggacggccgcgtggcggtaccgttcgactgggtgcgcgacatgcgcctgctcgacgagaacctgccctaccaccccaacgccatgaccctggtcgcctacggcgagcaaggcgaactgcaccaggagacctactactcggtgggtggcggcttcgtggtcgatgcggcacaggccgcctcgggacagctcgaccaggaccacacggtgctgccctacgacttctccagcgccgaggaactgttgctgctgtgcaagcgccacaacctgcgggtatccgagctgatgctggccaacgaacgcatctggcgcagcgagaccgacatccgcgaaggcctgcggcgcatctggcaggcgatgcgcgattgcgtcgacaacgggttgcgcaacgaaggcatccttcccggcgggctcaacgtgcaacgccgcgccgcgcgcctgcaccgcaacctgcaggagatcggcaagcccaacgtgatcggctcgaccctcagcgccatggaatgggtcaacctgttcgccctggcggtgaacgaggagaacgccgccggcgggcgcatggtcaccgcgcccaccaacggcgcggcggggatcatcccggcggtgctgcactactatatgaagttcaatcccgacgcccaggaccgcgacgtcgtcgactacctgctggccgccgccgcggtgggcatcctgtgcaagaagaacgcctcgatctccggcgccgaggtcggctgccagggcgaggtcggctcggcctgcgcgatggccgccgccggactggcggaagtcctcggcgccaccccggcgcaggtcgagaacgccgccgagatcggcctggagcacaacctcgggctgacctgcgacccggtcggcgggctggtccaggtgccctgtatcgagcgcaacgcgatcgccgcggtgaaggccatcaacgcggcgcaaatggccttgcgcggcgacggccagcatttcatctcgctggacaaggtgatccgcaccatgcgcgacaccggtgccgacatgcacgacaagtacaaggaaacctcgcgcgggggcctggcggtgaacgccatcgagtgctga

SEQ ID NO: 322620 - DNA, 1104 bp, Pseudomonas aeruginosa
atgaccacgtacgcgcccggagtcccaccacagaaccgaaatccgcagtccatcggcttcctgctgctggacaacttcaccctgatctccctggcctcggcggtggaaccgttgcgcatggccaaccagctctcgggacgcgaactctaccgctggcatacgctgagcctggacggccgccaggtctgggccagcgacggcctgcagatcacccccgacgccggtaccgacaacgccccggcggtggattgcgtgatcgtctgcggcggcgtcggcatccagcgcagcgtcacccgcgagcacgtcactttcctccaggcccaggcccgccagggtcggcgcctcggcgcggtgtgcaccggcagttgggcgctggcccgcgccggcctgctcgacggctacgattgcagcgtgcactgggaatgcctggcggcgatgcaggaagccttcccccgggtggccatgagcacccgcctgttctccatcgaccgcaaccgcttcacctcttccggcggcaccgcgccgatggacatgatgctgcacctgatcggccgcgagcatggccgcgagctgtcggcggcgatctccgagatgttcatctacgagcgcatccgcaacgagcaggaccaccagcgcgtgccgctcaagcacatgctcggcaccaaccagccgaagttgcaggagatcgtcgcgctgatggaggccaacctggaggaaccgatcgacctcgacgaactggcggtctacgtcaacgtctcgcgtcgccagctcgagcggctgttccagaagtacctgcactgctcgccgtcgcgctactacctgaagctgcgcctgatccgcgcccgccagttgctcaagcagacgtccatgtcgatcatcgaggtggcctcggtctgcggcttcgtctccaccccgcacttctccaagtgctaccgcgagtacttcggcatcccgccgcgcgacgagcgccagggccagccgctgggccagccggtggtgctgatgccgatcccgcaggacctggcgttgatgcccaactcctcggcgctgtcggccctgagccaggcgcagggcgagtcgaccttcgccagcgtgcggatctga

SEQ ID NO: 322621 - DNA, 249 bp, Pseudomonas aeruginosa
atgatgcacgccgatctgatcgaccaggacgatttccgcgaacgcctgcaggcgctgggcttcagcgtgccgccggactcgactccggagcaggcctgcgaatacgccgtgcgcggcctcagcccggagcgcgcccaggcgctgcggcggctggtggaggacatgctcggcgggcacgccacgctgctcccggcggtgcgcgaggcgatttcccggcaattgctgccggcgctggtgccgcggggctga

SEQ ID NO: 322622 - DNA, 894 bp, Pseudomonas aeruginosa
atggccctcagtttccgtcagctccagatcttctgtgcggtggctcgctgcggcagtaccacggcggcggcggaatccatctcgctgtcgcagtcggccaccagcgccgcgctcaacgagctggaatcgcagctttccacgcgcctgttcgaccgggtcggcaagcgcctgcaactgaacgaggtcggccgccgcttcctgccccaggcattgcgcctgctcgacggggtggcgcaactggagcagcagttcgcggtttccgccgcgccccaggcgagcctgacggtggcggccagcagcaccatcggcaactacgtgctgccgcgcctgctggcctccttcgagcgggagcagccgggcgtgagggtcaacgccagcatcggcaacaccggttcggcggtgcaggacgtggtgaccttcgcggcggacatcggcctcatcgaaggcccctgccacgagccgggcctgcgggtggagccctggctcgaggacagcctgatcgtggtggcggcgcccggccacccgctggcctcgcgcacccaggtctcccgcgaggccctgcgccgcgcgcgctggctgctgcgcgagcccggctcgggcacgcgcgaggaggtcagccacgccctgctgggccacctgcattacctggaagacagcctggacctgggcagctccgaggcgatcaagcacagcgtcgccgccgggctgggcatcagttgcctgtcgcgctgggtggtcgaggaacagttggcctccggcgcgctggtcgaactgcgcagcagcctgccgccgttgcgccggcgcttctacatgctgcgccagcgcgacaagttcctctcgccgggcttcgagcgtttctgggaacactgtcgggcgggactcggcgccggctag

SEQ ID NO: 322623 - DNA, 1068 bp, Pseudomonas aeruginosa
atgcacaccctccccgtcaagaccggtaccagacccctggcccaggtccagaaactcatccccggcctgctgctcagcgccgccctggccggcgtggcgatcctcctgggtcgttcgcaatggttgcagcacaacggcatcagcgcgctgaccctggccatcgtgctcggcatcgtcgtcggcaacaccctgtaccctcggatcgccgccggcagcgccgccggcgtcggcttctccaagcagatcctgctgcgcgccgggatcatcctctacggcctgcgcctgaccttccaggacatcgccggcgtcggattgcacggcgtgctgctggacgccctgatgctcgccagcaccttcggcctggcgtgcctgctcggcacccggctgttcggcctggaccgcaccaccaccctgctgatcggcgccggcagttcgatctgcggcgccgccgcggtgatggccaccgagccggtcgtgcgtggccgcgccgaacaggtcgcggtggcggtttccaccgtggtggtgttcggcaccctgggcatcttcctctatccggcgctgttccagctcgaccaggactgggggctgctaccgcgcgaccctggcacctggggcgtgtacatcggtgccacggtgcacgaggtggcccaggtggtcgccgcgggtcgctcgatcggcatcgaggcagcggataccgcagtgatcgccaagatggtccgggtaatgatgttggcgcccttcctgatcctgctctcggcctggctggcacgcgacaaggcgcaccgccggcagcacagcggcgcgaccaagatcaccattccctggttcgccgtcggcttcgtactggtcgccgggctcaactcgctggtcagcctgccgccggcgctggtcagccacgtcaacgacctcgacaccttcctcctggccatggcaatggccggcctcggcctcggcacgcacctctcggcgatccgccgcgccggcctcaagccgctgctgctggccgccctgctattcgcctggctggtgctcggtggtggattcctcacctgcctggcgctcgcctga

SEQ ID NO: 322624 - DNA, 996 bp, Pseudomonas aeruginosa
atggctgcgaagtatccgctgtctccggcgatgtggcgcttcgtcgagcacagccgggcgttcgccagcgacagtccgcgcctggatgcgcaacgtgcggcctacgcgcggatgtgccaggcgttcgcgccgccgcgcccggccggtttgcgggtgctcgactcctgcttgccggccgcgccgccggtgcgcgtgcgccgctatcgccccgaccgcgcggcaccgcccggcggctggccggcgctgctctacctgcacggtggcggctggatgctcggcggcctcgattcacacgatttcatctgcgccgacctggcggcgcgcctgggcctgctggtgctggcggtggattaccgactggcgccggagcatccgttcccggcggcattgcaggattgcctgcgtgcctggcaggcgctgagcctgggcgagctggacgaagcgctggatgggcgacgcctgctggtggccggcgacagcgccggcggcaacctggcggcggcgctgtgcctggcactgcgcgatggcggcgcgccgtcgccggccgcgcagatattgctctatcccttgctgtccgctgcgccatcgccctcgcggatcgactgcgccgacgcgccgttgctcggcctcggcgatgtgcaggcgtgcctggacgcctacctgccgctggcggcgctgcaccgacagccgctggcgctacccctggaggccgctgatttcactggcctgccgccggccttcgtggcggttgccgaattcgatccgctgcgcgacgacggcgagcgctatggcgcagcgctacgcgcggcgggtggcgaggcagggttctatccgggaagcgggctggtccatggctgcctgcgcggccacggcatcgatgaggtggaagccctgcacgaggccttgcggcgggccgtgcagggcttcctggcggaggactcaggcgagcgccaggcaggtgaggaatccaccaccgagcaccagccaggcgaatag

SEQ ID NO: 322625 - DNA, 480 bp, Pseudomonas aeruginosa
atgagccaagccctgacgacctacgagacgccggtcctgcccgagtgggtggactacaacggccacttgcgcgatgccttctacctactggtattcagctacgccaccgatgcgctgatggcgcatatcggcctggacagccagaaccgcgacgccagcggacactcgctgttcaccctggaatgccacctgaacttcctccatgaggtgaaggagggcgccagggtcgaggtgcgcacgcaactgctcggtcacgatcgcaagcgcctgcatatccaccatgccctgtacctgcctggcagcgggcaggcgctggcgctgagcgagcagatgctgctccacgtcagcctcgacggcccgcgctcggcaccgttcgaaggcgaggtgctggcgcgggtcgaggcgctcgccgaggcacatcgcgcgctccccgtgccggaaggtgtcggtcgggtgatcggcctgccgccggtgcgctga

SEQ ID NO: 322626 - DNA, 966 bp, Pseudomonas aeruginosa
atgtccttcgtcaccgagatcaagaccttcgccgccctcggtagcggcgtcatcggcagcggctggatcgcccgcgccctggcccacggcctcgacgtcgtcgcctgggatccggcgccgggcgccgaagcggcgttgcgcgcgcgcgtcgccaatgcctggccggccttgcggaaacagggcctggcgcccggcgcggcgcaggagcgcctgcgcttcgtcgcgagcatcgaggaatgcgtgggcgacgccgatttcatccaggagagcgcccccgagcggctcgacctgaagctcgacctgcacgccaggatcagcgccgcggcgcggcccgacgtgctgatcggttcctccacctcgggcctgctgcccagcgagttctacgccgaggcgagccatcccgagcgctgcctggtcggccacccgttcaacccggtctacctgctgccgctggtggaggtggtcggcgacgaacgcaccgctgccgaggccgtgcgggcggcgatgcgggtctacgaatcgctgggcatgcgtccgctgcacgtacgcaaggaagtgcccggcttcatcgccgaccgcttgctcgaggcgctctggcgcgaggcgctgcacctggtcaacgacggcgtggccacgaccggcgagatcgacgatgcgatccgcttcggcgccggcctgcgctggtcgttcatgggcaccttcctgacctacaccctggccggtggcaacgccggcatgcgccacttcatggcgcagttcggcccggcgctgcaattgccctggacctacctgccggcgccggaactcaccgaagccctgatcgaccgggtggtggagggcaccgccgagcagcagggcgcgcgcagcatcgccgagctcgagcgctaccgcgacgactgcctgctggcggtgctcggggcgatcagggaaaccaaggcccggcacggcttcgccttcgccgagtga

SEQ ID NO: 322627 - DNA, 885 bp, Pseudomonas aeruginosa
gtgaaccatgaagtcatcgtcacctgcgcggtgaccggcgccggcgataccgtcggccggcatccggcgatcccggtcaccccgaaacagattgccgaggccgccatcgaggcggccagggccggcgccaccgtcgcccactgccatgtccgcgaccccgccaccggcaagcccagccgcgacgtggcgctgtaccgcgaagtggtcgagcgtatccgcgaaagcgacaccgacgtgatcatcaacctcaccgccggcatgggcggcgacctggagatcggcaagggcgagcagcccctggagttcggtgccggtaccgacctggtcggcccgctggagcggctcaggcatgtcgaggagctgctgccggaaatctgcaccctggactgcggcaccctcaatttcggcgacggcgactacatctacgtctccacccctgcgcaactgcgcgccggcgcccggcgcatcaccgagctgggggtcaaggccgagctggaaatcttcgataccggccacctctggttcgccaagcagatgctcaaggaagggctgctggaggatccgctgttccagatctgcctgggcattccctggggcgcgccggccgataccacgaccatgaaggcgatggccgacaacctgccgccgggggcgacctgggccggcttcggcatcggccgcacgcagatgccgatggtcgcccaggccatgttgctgggcggcaacgtgcgggtcggcctggaggacaacatctggctagacaagggcgtgccggcgagcaacggcagcctggtggagcgcgccatcgagatcatcgagcgcctcggcgggcgcgccctgagcccggcggaagggcgccgcaggatgaacctgaagccgcgctga

SEQ ID NO: 322628 - DNA, 939 bp, Pseudomonas aeruginosa
atgaagacgacgattcgccagctgggctgcgccctgctgatcctggccagtggcgccgccctggccgccgaacccgagcagtgccgcacggtgcgcctgggcacggtgaactggaccgacgtggtcgccagcagcgccgtggccgaagccttgctcgacggcctgggctaccaggtgaagcagaccagcgcctcgcaacagatcgtcctggccggcctggccgacaagcagctggacctgttcctcggctactggcaaccgaccatgcagccggtcgccaggccttacctggacaaaggccggatcgaagtgatcgagccgccgaccctggccgacgcgcagtccacctatgcggtgccgagctacgtcgccgagggcgggctgaagaccttcgccgacatcgcccgcttcaaggacaagcttggcggccgcatctacgccatcgagccgggcagcggctcgaaccgcatcacccggaagatgatcgacgacaaccgtttcggcctgaagggcttccagctggtggagtccagcgaggccgggatgctcacggcggtgaagcgggcgatcaagcgcaagcagtgggtggtgttcttcggctggaagccgcatccgatgaacctgcagatcgacatgacctacctcaccggcagcgaggatgtgttcggtcccgacgaaggcgcggccaccgtctccaccatgaccgccgccggctaccaggcgcagtgcggcaatgtcgcccggctgctgcacaacctgcgcttcagcagcgcccaggtcagccaggtgatggcgccgatcctcgatcgcacccagcccctcgacgccgcgcggcagtggctgaaggccaaccccgagccgctgaaggcctggctggatggcgtgagcaccttcgatggcaaggacggcctggccgcgctccaggcctcgctgaagtaa

SEQ ID NO: 322629 - DNA, 1011 bp, Pseudomonas aeruginosa
atgtcccaggacttctggtttctcctgctgcccggcttctcggtaatgggcttcgtttccgccgtggagccactgcgagtggccaaccgcttccacgccgacctctaccgctggcacgtgctcagcgccgacggcggtccggtgctggccagcaatggcatgtcggtgaacagcgacggcgcgctggagccgttgaagaaaggcgacctgctgttcgtggtggccggtttcgagccgctgcgggcggtcaccccggcactggtgcagtggctgcgcaagctcgatcgcaacggcgtgaccctcggtggcatcgataccggcagcgtggtgctggccgaggccggtctgctcgacgggcgccgcgcgaccctgcactgggaagccatcgacgccttccaggagtcctacccgcaactgagcgtgacccaggagctgttcgagatcgacggtccgcgcatcacctcggccggcggcaccgcctccatcgacctgatgctcgacctgatcgcccaggcccacggtccgcaactggcggtgcaggtttccgagcagttcgtgctcggccgcatccgcccgcgccaggaccaccagcgcctgcaggtggcgacccgctatggcgtgagcaaccgcaagctggtgcaggtgatcggcgagatggagcggcataccgagccgccactgaccaccctggagctggccgagcgcatccaggtcacccgccgccagctggaacggctgttccgcgtgcacctggacgacacgccctcgaacttctacctcggcctgcgcctggacaaggcccgccagttgctgcgccagaccgacctcagcgtgctacaggtgagcctggcctgcggcttcgagtcgccgtcgtacttctcccgcagctaccgcgcgcgcttcgccgccagtcccagccaggatcgcgcggtgctgccgctcaaggctcccgcagccacgccgccaggcgcgccagcagggcatcgcacgcctcgagctgagcgaggctga

SEQ ID NO: 322630 - DNA, 1155 bp, Pseudomonas aeruginosa
atgcccggcagccgcgacatcctcgccgacctggtggccttcgacaccgtcagccgcgagtccaacctggcgctgatcgactacgtccgcgactacctggcgggtttcggcgtcgacagcgaactgttcttcgacgccgacggccgcaaggccaatctctatgccaccatcggccccagcgaccgtggcggcgtctgcctttccgggcataccgacgtggtgccggcggacggccaggcctggagcgtgccgccgttccggctcagcgagcgcgatggccgcctctacgggcgtggcacggcggacatgaagggctacctggcctgcgtgctggcggccgtcccggcgttcctcgccgcgccgttgcgcctgccggtgcacctggcgttctcctacgacgaggaagtcggctgcctgggcgtccgttcgctgctcgcggcgctggagcggcgtccgcacaagccgttgctgtgcatcatcggcgagcccaccgagctgaagccggtgctcggccacaagggcaagctggccatgcgctgcgaggtgcacggcgcggcctgccattcggcctacgcgccgcagggggtgaatgccatcgaatacgccgcgcggctgatcggccgcctcggcgagatcggcgcgcgcctggcggtgccggagcgccacgaccggcgtttcgacccgccctactcgacggtgcagaccggactgatccagggcggccgggcgctgaacatcgtgcccgccgagtgccgcttcgacttcgaggtccgcgcgctgccggcggacgacccgcggcaggtcgccgaggaactccgcgactatgccgaaagcgaactgctgccgcggatgcgcgcggtggagcgaagtaccgatatccgcttcacgccgctatcggcctatcccggcctgctcaccgcagacgacagccaggcggcggagctgatcggcctgctcagcggttcgacggatttctccaccgtggccttcggcaccgagggcgggctgttccaccaggccggtatcccggcggtgatctgcggtcccggcagcatggaccagggccacaagccggacgagttcgtcagcctcgctcagctcgaggcgtgcgatgccctgctggcgcgcctggcggcgtggctgcgggagccttga

SEQ ID NO: 322631 - DNA, 675 bp, Pseudomonas aeruginosa
atgaccttttccatcgtcggccgctgcgccgaaaccggccagctgggcatcgccatcagctcgtcgagcatcgccgtcggcgcccgttgtccctggctgcgcgccggcaccggcgcggtggctacgcagaacatcaccctgccggcgctcggcccgcagatcctcgaccgcctcgaccagggcctggcccctggcgaagcgctggaccaggcgctgagcagcaacggctatggccagtatcgccaggtcacggtgatcgaccagcacggccgcaccgcgttgttcaccggccgcgaggcgctcggcgtccaccatgcgcgggccggcgaacaatgcgtggcggccggcaacctgctggccgcgccggaagtgatcgaggcgatggtggatgccttcgagaacgccgaaggcctgctcgccgagcgcctgctggcggcgatgcgtgccgcgctggccgctggtggcgaagccgggccggtgcattcggcggcgctgtcggtggtcggcgacctgctctggccggtggtcgacctgcgcgtcgactgggccgagcacgaccccatcggccagctcgagcgactgtggctcgcctacaagccgcagatgcaggactatgtgacccgcgccctcgacccgacccgtgcgccgagctacggcgtgcccggcgacgagtga

SEQ ID NO: 322632 - DNA, 423 bp, Pseudomonas aeruginosa
atgcctacccatacccgcattcgcatgttcaacaccaaggacacctaccccaaccagtccctggacaacgatctctgccaggccgtgcgcgccggcaacacggtgtacgtgcgcggccaggtcggcaccgacttcgacggcaacctggtcggcctcggcgacccgcgcgcccaggccgagcaggcgatgaagaacgtcaagcaactgctggaggaagccggcagcgacctctcgcacatcgtcaagaccaccacctacctgatcgatccgcgctaccgcgagccggtctatcgcgaggtcggcaagtggctcaaaggggtgttcccgatctccaccggactggtggtctcggccctcggccagccgcagtggctgatggagatcgacgtgatcgcggtgattcccgacgactggcagcaatga

SEQ ID NO: 322633 - DNA, 1353 bp, Pseudomonas aeruginosa
atgaccgacctgaatcgcaccgccttgccctcgcgcacggacgggaccgtggaaaagaccgacaccctcgtcgtcggcgccggccaggccggcgtggcgatgagcgagcacctgagccggctcggcgtgccgcacctggtcctggagcgcaaccgcatcgccgaggcctggcgcagcggacgctgggattcgctggtggccaacggcccggcctggcacgaccgcttcccgggaatggaattcgacatcgatcccgacggtttccccggcaaggaccaggtggcggcctatttcgaggcctacgcgaagaaattcgacgcgccgatccgtaccggcgtcgaggtgaggaaggtggtgcgcaatgtcggccgccccggcttcaccgtggacacctccgcagggaccatcgaggccaaccgcgtggtcgccgccactggcccgttccagcgtccggtgatcccgccgatcgcgccgcgcgacgagcgtatccggcagatccactcggcccactactacaacccgcagcagctgcccgaaggtgcggtactggtggtcggcgccggttcgtcgggggtacagatcgccgacgagctgcaacgtgccgggcgccaggtctacctctcggtgggcgcccatgaccgtccgccgcgttcctaccgcaaccgcgacttctgctggtggctgggcgtgctcggcgaatgggatgcggaagtcgccaagcccgggcgcgagcatgtgaccatcgccgtgagcggtgcccgcggcggacataccgtggacttccgcgccctggcgcatcagggcgtgaccctggtcggactgaccgaatccttcgtcgacggcgtcgcgaccttccggccggacctggcggagaacctggcgcgcggcgacgagaactacctggcgttgctcgacgccgccgacgcctatatcgcccgcaacggccttgacctgccggaagagcccgaggcgcgccgccggctgccggacccgcagtgcgtgaccgatccgatcctcgaactggacctggccgaggccggggtgggcagcatcatctgggccaccggctatgccgtcgacttcggctggctgcaggtcgatgccttcgaccgcgacggcaagccgcgccaccagcgtggcgtgtccagcgaacccggcgtgtatttcatcggcctgccctggctgtcgcggcgcggctcctcgttcatctggggcgtctggcacgacgcgcgccatgtcgccgaccacatcgccatccagcgcaagtacctcgcataccgcgacgctgcccagcgccaggaacaggaccgcgcctcgcaagctccgcaaaccagcctccaggaagtcagctga

SEQ ID NO: 322634 - DNA, 1476 bp, Pseudomonas aeruginosa
atgatggccgccaccggagtggacaaggatcgacctcgcgcaatgacctccaccacctacctcggcctgctgctggtcggtatccaggtactcggcttcgtcgccgccatccatgccgtgctcaccgtgcgcaccgcccagggcgcgatcgcctgggccacctcgttggtattcatgccgtacctgaccctgctgccgtacctggtgttcggtcgcagccgtttcgacgcctacatcgaggcgcggcgccaggccaaccgcgagatgcacctggcggccgccgagctggactggcgtccctgggtcgaggaggccctggcggcccgccaggtcagcggctacaaggggctcaaggcgctggtgcggatgacccgcacgccgaccctggcgaacaaccgggtgcgcctgctggtcaacggcgaggccagcttcgaggcgatgttcaaggcgatttccgccgcccgccaggtgatcctggtgcagttcttcatcgtccgcgacgacgccctcggccagcgcctccagcaactgctgctggaacgtgcggccaacggcgtcgaggtgttcttcctctatgacgccatcggcagccacgcgctgccgcaccgctatgtcgagcggctgcgccagggcggcgtgcagatgcatggcttcagcaccggcagcggcatgctcaaccgcttccaggtgaatttccgcaaccaccgcaaggtcgtggtggtggatggcgagtgcggtttcgtcggcgggcacaacgtcggcgtcgagtacctcggcgagaagccgccgctggcgccctggcgcgacacccacatggaactgcgcgggccggcggtggcgtgcctgcaggaaagcttcgccgaggactggtactgggcgacccacagcctgccgccgctgatcctgccgccgcagtacgacagcgagggcgcgctctgccaggtagtcgccagcggtccggcggatgcccaggaaacctgctcgctgttcttcgtcgagatgatcaacgccgcccacgagcgggtctggatcacctcgccgtatttcgttcccgacgaagcggtgatggccgccctgcgcctggcggtgctgcgcggcgtcgacgtgcgcctgctgataccctcgcgcccggaccaccgcacggtgtatgccgcgtccagcctctacgcgctggaggcgatccgtgccggggtcaaggtgttccgctaccagcccggcttcctccaccagaaggtggtgctggtggaccgcgacaccgccgccgtcggcagcgccaacctggacaaccgttcgttccggctgaatttcgaggtgatggtggtgaccgtcgacgagggcttcgccggcgaggtggaggcgatgctcgaggcggacttcgccgagtcgctcgaattcactccggaagaccgccgcagcgtgcgccgcctgcagcaactggggatgcgcgtggcgcggctggtctcgccgatcctctga

SEQ ID NO: 322635 - DNA, 471 bp, Pseudomonas aeruginosa
atgagcgacgtccgtcccccgcttccccccttcaccgccgaaaccgccgcgcagaaggtccgcgccgccgaggacggctggaacagccgcgacccgcagcgcgtctcgctggcctacagtcccgacagcgtctggcgcaatcgctcgaccttcgtccgcggccgcgagcggatcgtcgaattcctcagcggcaagtggcagcgcgagcaggagtaccggctgatcaaggaactctgggcgtttaccggcaaccgcatcgccgtgcgcttcgcctatgaatggcacgacgactcgggcaactggttccgctcctacggcaacgagaactgggcgttcgacgagcagggattgatgtacgaacgtcacgccagcatcaacgacctgccgatccgcgaggaccagcggctgttccgctggccgctggggcgccggccggacaaccatccgtcgctcggcgaactcggcctctga

SEQ ID NO: 322636 - DNA, 978 bp, Pseudomonas aeruginosa
atgagcccagccgaattgcacgccgacagcatcgtcatcgacggtctgatcatcgccaagtggaaccgcgaactgttcgaggacatgcgcaagggcggcctgaccgccgccaattgcaccgtatcggtatgggaaggcttccaggcgacggtgaacaatatcgtcgccagcaacaagctgatccgcgacaacagcgacctggtgatcccggtgcgcagcaccgcggacatccgcaaggccaaggagcagggcaagaccggcatcctctacggtttccagaatgcccacgcattcgaggaccagatcggctacgtcgaggtgttcaagcagctcggcgtgggcatcgtgcagatgtgctacaacacccagaacctggtcggcaccggctgctacgagcgtgacggcgggctctccggcttcggtcgggagatcgtcgcggagatgaaccgggtcggcatcatgtgcgacctctcccacgtcggcagcaagacttccgaagaggtcatcctcgaatcgaagaagccggtctgctactcccactgcctgccgtccggcctcaaggaacacccgcgcaacaagtccgacgaggagctgaagttcatcgccgatcatggcggcttcgtcggtgtgaccatgttcgcgccgttcctcaagaaaggcatcgactcgaccatcgacgactacgccgaggccatcgagtacgtgatgaacatcgtcggcgaggacgccatcggcatcggcaccgatttcacccagggccacggccacgacttcttcgagtggctgacccacgacaagggctacgcccggcgcctgaccaacttcggcaagatcgtcaacccgctgggcatccgcaccgtcggcgaattccccaacctcaccgagaccctgctcgagcgcggcatgcccgagcgcgtggtgcgcaaggtgatgggcgagaactgggtaagggtcctgcgcgacgtctggggcgagtaa

SEQ ID NO: 322637 - DNA, 531 bp, Pseudomonas aeruginosa
atggccaaacatgccccccaactgcccatcgaggtcgacagcgagaccggcgtctggaccactgacgccctgccgatgctctacgtaccgcgacatttcttcgtcaacaaccacatgggcatcgaggaagtgctgggcgccgacgcctacgccgagatcctctacaaggccggctacaagtccgcctggcactggtgcgagaaggaagccgaatgtcacggcctggagggcgtggcggtgttcgagcactacatgaagcgcctgtcccagcgcggctggggcctgttcgagatcgagcggatcaacctcgaggaaggcaccgccgaggtccgcctgcggcactccgccttcgtctacgtctacggcaaggtcaatcgcaaggtcgattacatgttcaccggctggttcgccggcgccatggaccagatcctcgccgcccgtggcagcagcctgcgcaccgtggccgaacaggtctacagcggcgccgaggacggtcacgaagacggcctgttcgtcgtcaaacccctgtaa

SEQ ID NO: 322638 - DNA, 2061 bp, Pseudomonas aeruginosa
atggccttcgaagcaatgttccagccgatccagatcggcaagctgaccatccgcaaccgcgtgctctccaccgcccacgccgaggtctacgccaccgacggcgggatgaccaccgagcgctacgtgaagtactacgaggaaaaggccaagggcggcatcggcctggccatctgtggcggctcctcggtggtcgccatcgacagcccgcagcagtggtggagttcggtgaacctgtccaccgaccggatcatcccgcacttccagaacctggcggacgccatgcacaagcacggcgccaagatcatgatccagattacccacatggggcgccgttcgcgctgggacggctaccactggccgaccctgatgtcgccgtcgggtatccgcgagccggtgcaccgcgccacctgcaagaccatcgaggtggaggagatctggcgggtcatcggcaactacgcgcaggccgcccgccgcgccaaggaaggcggcctggacggcgtcgagctgtccgccgtgcaccagcacatgatcgaccagttctggagcccacgggtcaacaagcgcaccgacgaatggggcggtagcttcgaggggcgcatgaagttcggcctcgaggtgctcaaggcggtgcgcgccgaggtcggcgaggacttctgcgtcggcatgcgcatctgcggcgacgagttccacccggacggcctgtcccacgaggacatgaagcagatcgccaagtactacagcgataccggcatgctcgacttcatcggcgtggtcggctccggctgcgacacccacaataccctggccaacgtcatccccaacatgaccttcccgccggagccgttcctgcacctggcggccggcatcaaggaagtggtcgacgtgccggtgctacacgcgcagaacatcaaggacccgaaccaggccacgcgcatcctcgaaggcggctacgtggacatggtcggcatgactcgcgcgcacatcgccgacccgcacctaatcgccaagatcaagatgggccaggtcgaccagatcaagcagtgcgtcggcgccaactactgcatcgaccgccagtaccagggcctggacgtgctgtgcatccagaacgccgcgacctcccgcgaatacatgggcgtgccgcacatcatcgagaagtccgccggaccgaagcgcaaggtggtggtggtcggcggcgggccggccgggatggaagcggcccgcgtggcggccgagcgtggccacgacgtgaccctgttcgagaagaaggagcagctcggcggccagatcaccaccgccgccaaggcgccgcaacgcgaccagatcgccggcatcacccgttggtaccagctggagctggcgcgcctgggcatcgacctgcgcctgggcaccgcggccgaccccgagaccatcctcgacctgcgcccggacgtggtggtgctggccaacggcggacatccgttcctcgagcagaacgaacactggggcgccgccgaaggcctggtggtgagcagctgggacgtgctcgacggcacggtcgagccaggcaagaacgtgctggtctacgacaccatctgcgagttcagcggcatgtcggtggcggacttcctcgccgacaagggcgcccaggtggagatcgtcaccgacgacatcaagccgggcgtggccatcggcggcaccaccttccccacctactaccgcagcatgtatcccaaggaagtgatcatgaccggcgacctcatgctggagaaggtctaccgcgagggcgacaagctggtggcggtgctggagaacgaatacaccggcgcgcgggaagagcgggtggtcgaccaggtggtggtggaaaacggcgtgcgccccgacgagagcctctactacgcgctcaagcagggctcgcggaacaagggccagatcgacgtcgaggcgctgttcgcgatccagccgcagccctgcctcagccagcccggagaaggctacctgctgttccgcatcggcgactgcgtggcccagcgcaacacccatgcggcgatctatgacgcgctgcgcttgtgcaaggatttctaa

SEQ ID NO: 322639 - DNA, 1962 bp, Pseudomonas aeruginosa
atgctcgacaccctcctccccgtcctgctcttcgccgccctggcacttgccgtgctcggcgccgcgaagcgcttcctcatgtggcgccgcggccgacccgccaaggtcgactggatcggcggcctcatgcagatgccgcgtcgctacctggtggacctgcaccatgtggtagagcgcgacaggtacatgtccaggacccacgtcgccaccgccggcggcttcgtcctggcggcgctgctggcgatcctggtacacggtttcgggctgcacggccggatcctcggcttcgccctgctggcggccacggcgctgatgttcgtcggcgcgctgttcgtcgcccgccgccgcctcgacccaccgtcgcggctgtcgaagggcccctggatgcgcctgccgaagagcctgctggcgttcgccgcgagcttcttcctcgccaccctgccggtggccgggatcctgccggaaggcttcggcggctggttcctcgccggcctcctcgccattggcgtggcctggggcgtgtccgagctgttcctcggcatgacctggggcgggccgatgaagcacgccttcgccggtgccctgcacctggcctggcaccgccgcgccgaacgcttcggcggcggccgctccaccggcctcaaggcgctcgacctggccgatccgcaggcgccgctgggcgtggaaaagcccagcgacttcacctggaaccagttgctcgggttcgacgcctgcgtgcagtgcggcaagtgcgaggcgatgtgcccggcgttcgccgccggccagccgctgaacccgaagaagctgatccaggacatggtcatcggcctggccggaggcaacgacgcgaagttcgccggcagcccctatccaggcaaaccgctgggcgagcacggcggcggcccgcaccagccgatcgtcgcgctggatggcaaggccctggtcgacgccgacaccctgtggtcctgcaccacctgccgggcctgcgtcgaggagtgcccgatgatgatcgagcacgtcgacgccatcgtcgacatgcgccgccacctgaccctggagaaaggcgccacgccgaacaagggcgccgaggtgctggacaacctgatcgccaccgacaaccccggcggcttcgcccccggcggccggttgaactgggcggccgacctgaacctgccgctgatgagcgagaagaagagcgccgacgtgctgttctgggtcggcgatggcgccttcgacatgcgcaaccagcgcaccctgcgcgccttcgtgaagatcctcaaggcggccgcggtggacttcgccgtgctcggcctggaggagcgcgacagcggcgacgtggcgcgccggctgggcgacgaggcgaccttccagaacctggccaggcgcaatatcgcgaccctggcgaaataccgcttcacccgcatcgtcagctgcgacccgcacagcttccatgtgctgaagaacgaatacggcgccctcggcggcgactaccaggtactgcaccacagcaccttcatcgacgaactgctgcgcgccggcacgctgcaaccgggccgcagcaaggccggcagcgtcacctaccacgacccctgctacctgggccgctacaacggcgagtacgaggcgccgcgcaacgtgctgcgcgcactcggcatcgaggtcaaggaaatgcaacgctccggcttccgctcgcgctgttgcggcggcggtggcggcgcgccgatcaccgacatccccggcaagcaacggattcccgacatgcgcatggccgacatccgcgagaccggcgccgagctggtggccgtcggctgcccgcagtgcaccgcgatgctcgaaggcgtagtggcgccgcggccggagatcaaggacatcgccgagctggtagcggaagcgctgatagaacaggcggaagcgccggcaaaaaagccgttgcggcgtgaagccgtggcggaggtgcattga

SEQ ID NO: 322640 - DNA, 1233 bp, Pseudomonas aeruginosa
atgaacgatatcgtccgtcgcgatccacgcgccgaatggatcgcccgcaaccgcctgcatccgctgcatgcggccatgcagtccgcccaaggcggcgaggtgcgctggatgggcccccacggcgtgatccgcaagaacccgcacgccgtcggcttcctcggccccaacggcatccgccgcatcgatcgctccggcggccagcagggcagcggcgtgcgccgcgccagcgtagcgcaggaagcgcagttgccgctgcatgtggtcgagcaaccggcattcctcgtcgcggtggttccggacatggtcggcggccgtctctccagccacgacaaggacctcctcggactggcccgcaagctcgccggcaacgacggcgcggtgctcgccgtagtgttcggcgaacacaaggaaagcgccttcgacagcgccggcgtcgaccgcctgctgcacctcgccggcggcgagtacgacggctacgcgcccgagcagcgaatactcgccctgcgcaacctggagaaccagctcgccccgcgccactggctgttcccggacagtcgcaacggcggcggcgaactgggccggcgcctggccgccgcgctcggcgagcggccggccggtcgcgtctggcaggtcgaggacggccgctgcatcggccgcgccggcgccggccgcgaggacatccagcgcgccctgccgcgcctgctgctggccgcggcggaatgcgccgagccggtcagcgagacccgccatgaggttcgcgaactgcacatggccgagcaggtggcgcgcaacctgccacgcatcgaggacctcggcccggtggccgtggacccggcgcggattcccatggccgaggccgaattcattctctccggcggcaacggcgtgcaggactggacgctgttccaccaggccgccgccgtcctcggcgccaccgagggcgcctcgcgggtggcggtggacgacgggcacatgccgcgcaaccgccaggtcggcgccaccggtacctgggtcaccgcgcgggtctacctggcggtgggcatctccggggcgatccagcacctgcagggcataggcgcctgcgacaaggtggtggcggtgaaccgcgacgccggctgcgacatgatcaagcgcgccgatctctcggtgatcggcgactcgacggaaatcctccgcgcgctgatccgcctggccgaggcacaccgcaacggcgccgcccgcgatgcggcctga

SEQ ID NO: 322641 - DNA, 774 bp, Pseudomonas aeruginosa
atgactgagctgaacatcgtcgcgctggtctccatcggcgcccatcccgcctccggacgcccgcgccgtgccgaacaggacgcccgcgcggtggaactcggcctgcgcctgagcggcccacgcctacaggtgctgcacgccggcgacccgcacgccgaggcgctgcgcggctatctcggcatgggcctggaacgcttgtccgtgctggaacagccggccggcgccgacgccctgcccgcactggccgagcacctgcgcgactcccgcgcgcaactggtgctcaccggcagccaggcggaaaccggggaaggctccgggatgctgcccttcctcctcgccgagcgcctgggctggccactggtggtcggcctggccgaggtcgagaaggtcgaagacggcagcgctcaggtcctccaggctctgcctcgcggccagcgacgccgactgcgggtacgcctgccgttcgtcgccagcgtcgacaatgccgcgccggtggcccggcagagcgccttcggcccggctaggcgtggcgagatcgaggcccatgaggtggaggtggtcgacgacccgctgctcgccgaagacagcctgcaaccggcccggccgcgaccgaagcggctcaaggtaatcaaggcgaagaccggcgccgagcgaatgaaagccgccaccgccaaggcctccggcggtaccgggcaggtactcaaggatctttcggcggaagccggcgccgaagccatcttcaagctcctgcgcgaggaaggcgtgatccgctga

SEQ ID NO: 322642 - DNA, 570 bp, Pseudomonas aeruginosa
atggcgctgtccacgcatctcagcaaccacaagctctatctgctcggcatgctctgcgccatcctggcctggggcatggcctgcatcgaactcggagcgaacacccatctctggttctccggcctcagcgagcagggctacctgcaggcctggagcgatgaaatgccgcgcctggccagcgacggcttcgtcctgtcctggagcagccgggcgctgctgatgctgctggactacctgccgaccctgctttccgcgttcggcctggcgctcaccggcctgttcttccgccgcctggccaagggcgaacgctggtcgcagcgcaacgccaggaccctggtgcacatcggcctgctgtccttcctggcactcttgctccagccatttatcaatacgctgcaaggtcttgtactatctctcgacctgcccgacggcgagcgtgtcctgagcgtttcgataggactcacttccgaagcggcctacgagtttctcaaggcgatctttctctgctcgttcggcctgatgatgagcgaagccaggaaactggacgaagaagtaagagccttcatatga

SEQ ID NO: 322643 - DNA, 207 bp, Pseudomonas aeruginosa
atgatcatcatccgactagacgtcatcctggcgaagaacaaggtccgctccaaggagctggcggaagccatcggtatcaccgaacagaacctgtccctgctgaagaacggcaaggtcaagggcatccgcctcgacaccctggagaagatctgcgccttcctggactgccagccgggcgacatcctggaatacgtcgcggacgactga

SEQ ID NO: 322644 - DNA, 405 bp, Pseudomonas aeruginosa
atgaacagacacctgaacctctcgggcgttgcgctcgcgctcgccctgatctcgggctgcggcccctccgtccgctaccagtacgtgatgccaccgagcgaagcgggacgcacctgcgtcgcccagtgccgcacgcaacagagccagtgcgaaagcctcgcgcgcctggaatggcagaacgaaaaccgcctgcgcgaagcggaacggcgcagctaccactattgcagccagggcaagagcaagaagcaggcgcgcaaggaatgcctggcgccaggctattcctcctcgttcggctacaacggcttcggcggctccggcaacttcaactgcagttccgactacgaccgctgcttcaccgacatctgcggcggcaccatccgccgcatcgtcgagcaacttcaatga

SEQ ID NO: 322645 - DNA, 234 bp, Pseudomonas aeruginosa
atgagccgacgcctcttccctctcctgccgttcctgttcctggtcggctgcgcccagggctatccctccttctccggcatccttccggacgtccgcgtcagcggcgacgaacgcagctacgccgagcgtgccgaagactgcctgaaacggcgcaactgcccgccggccaccgatcgcgatcccttcgtcgccgaccccgggcactactcgctgggcggcagctttcactggtga

SEQ ID NO: 322646 - DNA, 234 bp, Pseudomonas aeruginosa
atgctggagaacaccctggaacgcctggaaaccctggtagccgagctgctgcaacagaaccaggccctgcgcgacagccacgaccagcttcagcagcagctgcgccaggccaccgaggaaaacgaaaccctgcaactctccatgctcgagcaggaagaaaagcagagcggcacccaggcccgcctggaagccctggtcgagcgcctcagcgcgcagcaaccggttagcgcatga

SEQ ID NO: 322647 - DNA, 291 bp, Pseudomonas aeruginosa
atgagccgcgacggcgtccaggtcctgtcgatcctcggccgggactattcgatccgcgtgccggccggcgaggagagggccctagcggacgccgccgcgttgctgcaagcggaagtggacgccaacaagcgcaagtttccctacgtcaccagcaacgagctggtggtgctctccgcgctcaatctctgcgcccgccagctcggcgcgaacgacggcgagtcgccgcgcctgcgggcggtggagcagcgcctggaagcgctggtcgagcggatcgccggggcatccggctag

SEQ ID NO: 322648 - DNA, 177 bp, Pseudomonas aeruginosa
gtggcggcgaagccggcggaggaaacgcgctggtgcctgtggcgccaggacgacaacggcaatgccttcgtcatgcgccgcgacctgacgcgcgacgaggcctgcgcgctggtcaaggactaccaggcgcgcgggcatcggcagctgtattgggcgagtccgcaggcgcgcgactag

SEQ ID NO: 322649 - DNA, 561 bp, Pseudomonas aeruginosa
gtggaaaacaatcccctgtgggccgaactgggcaagcactggaaactggtggccctgcgcggcgtggcggcgctggtgttcggcgtcctgaccctgctctcgccggccctggcgctgaccgtgctggtgctgttctggggcgcctacgcgctggtggacggagcgttcgccctgatcgccgcgttcaacatgcgcagcgatgggcagttcaactggccgctggcgctggtcggggtgatcggcgtggcggccggcctggttgcgttcttctggccgcaactgaccgccatcggcctactcctgatcatcgccggctgggcgctggcgatgggcatcttccagatcgtcgcggcgatccgcctgcgcaagtcgatccagaacgaatggtggatgatcctctctggtgccatctcggtgctgttcggcgtgctgatgatcgccaaccccggcgccggggcgctggcggtggtctgggtgatcggcgcctacgcggtgttcttcggcgtgttgctggtcatgctcgcgctgcgcttgcgcaagacttcgaccctgaaggcctga

SEQ ID NO: 322650 - DNA, 1290 bp, Pseudomonas aeruginosa
atggacgtcacttccaccctgagtctcggcgatcccctggaaccggcccgcaaggccaccgccgacatgctgcgcagccgcgaccacagcttctcgctgccgcagcccttctactgcgaccagcgcctgttcgagatcgacatgcaggagatcttccacaaggaatggctgatcgccggcatgacctgcgagattcccgccaagggcaatttcctcaccctgcagatcggcaagaacccggtcctggtgatccgtggcgccgaaggccaggtgcatgccttccacaatgtctgccggcaccgcggctcgcgcctgtgcgtgagcgagaaaggcaaggtggccaagctggtctgcccctaccaccagtggacctacgagctggatggccgcctgctgttcgccggcaccgagatgggcgccgacttcgacatgaaggagtacggcctgaagccgatccaggtgaagaccgccggcggctacatcttcatcagcctggcggagaacccgccggccatcgacgacttcctggcgacgctcgagcactacatggagccgtacgacatggagaacgccaaggtggcggtgcagaccaccatccgcgaagccgccaactggaagctggtgatcgagaacaaccgcgagtgctaccactgcaacggctcccacccggaactgctgaagaccctgctggagtgggacgacgtcaccgacccgcgcgccagccaggcgttcaaggaccaggtggcggcctgcaccagcgcctgggacgccgagaagatcccgtacgcccatgccagcttcggcctgcgcaatcgcatcgtgcgcatgccgctgctggacggcacggtgtcgatgaccatggacggcaagcagggcagcaagaagctcatgggccggatcaagaatcccgacctcggctcgatgcgcatcctgcacctgccgcactcctggaaccactgcatgggcgaccacctgatcgtcttcaccgtgtggccgatcagcgcccaggaaaccctggtcaccaccaaatggctggtgcacaaggacgcggtggaaggcgtcgactacgacgtggcgcgcctgcgcgaggtatgggacgcgaccaacgaccaggatcgtcggctggccgaggagaaccagcgcgggatcaactccgacgcctaccagcctggtccatactcgaagacctacgagttcggtgtgatcaatttcctcgactggtacagcgagcgcatgctgaacaacctcggcgaggagtccgcccacgtgcgcaaggtggccggcagctga

SEQ ID NO: 322651 - DNA, 1101 bp, Pseudomonas aeruginosa
atgtcgagcaacttcctcaatccggtcaccacccagacctgggccaacggccggcacctcgtgcgctgcgtcaaggtcatccaggaaacctgggacgtgcgcaccttctgcttcatggccgaccagccgatcctgttcttcttcaagccgggccagttcgtcaccctggagctggagatcgacggcgagccggtgatgcgctcctacaccatctccagctcgccctcggtgccctacagcttctccatcaccatcaagcgggtgccgggcgggcgggtttccaactggctgcacgacaacctcaaggaaggccaggagctaccggtgcacggtccggtcggcctgttcaacgccatcgacttcccggccgacaaggtgctgttcctctccggcggggtcggcatcaccccggtgatgtccatggcgcgctggttcttcgacaccaacgccaacgtcgacatggtcttcgtccacagcgcccgttcgccgaaggacatcatctaccaccgcgagctggagcacatggcctcgcggatcgacaacttcagcctgcacatcatctgcgagcgccacggcctcggcgaagcctgggccggctaccgtggctacctgaacctgcgcatgctggaactgatcgccccggacttcctcgagcgggaaatcttctgctgcggcccgacgccctatatgagcgcggtgaagcacctgctgcagggccacggctacgacatgagccgctaccacgaggaagccttcgggccgactccgccggaggtccgcgccgacgtcagggaactggccgcggaagccgccgaggcgccggaggtaccggtcgccgaccagcaccaggtggaattcaccgccaccggcaagagcatccgcgtcagccccggggaaaccgtgcacgccgccgccgccaagctcggcctgcacattccgaaggcctgcgggatgggcatctgcggcacctgcaaggtaatgaagaccgccggcgaggtggagatggagcacaacggcgggatcaccgacgaggatgtcgccgaaggctacatcctctcctgctgcagcgtgcccaagggcgacgtggtcatcgactactga

SEQ ID NO: 322652 - DNA, 2442 bp, Pseudomonas aeruginosa
atggatgatcggatgtcagacaagccgctcggccgcttgttgctcgaaggcctcggcgagatcgcctggatcgccgtgctggtggcccttggcgtcctccttccgttgccgctggtagcgctgggttgggtgctgctgctgggcgccgagtgggccacggatcgttggcgcggcaaggtgccgtatcgcctgcaacaggcgctgttcttctgggttctgggtggcggcatcgccctgggccaggcactgccgggcttctggctgggactgggcggtggcttgctggcggtgatcggcggcgtgctgttgcagatccgcttcgagcgcggcctgcgcctggagcgccaggctccgcaagcgctggacgtaccgctgccggccggaggtagcgcatggggcggcgaagcgcccgagcggacccccgagggcgaggcgatccgcctgttcgacggcggcgagatcgccatgggcggcccgctggtatgccactacctgatgcccgacggctgtttcatccccgactgcaatccttcggcacgcttttccagcgatggccgccacttcgtttcgccgataccgagccgaggcgcgtggggcctggcgatcttcgaccggcaggagcggttgctctaccgctgtgccgtggacaacttctgggagctggacagcgtcaccgagcgcgaggtgatcgggcggcacagtccgctgacgtccaacgcaccgcagcgcctcgagctgcaggcgctcaaggccggcagcgaggccgaggccttcgttgccatcggcgacctctggctgcccgagagcgaatggcagcgctggagcagggatctgcgcgcgcaaccgctaccgtccccgcttggcgggcccgcgctggaaatccgcccctggctgccggccagcctgctggccctggacgatcctttcgcgccgctgcgcgccaaccgcggcgagctgtggataaacggcgaggccagcggcctctacctgtcccgtgaagcgccgccattggcttggagcgatgacggccgggcgctggcgctgcaggctgcaggcgagccgctggggcaggatgcctactggctttggcgagagggtggcggcctgcgtgcgctgggcgcgccgtggtcggcgttgcccgccgagccccatgccggcgggcccgaactgctcgggctggaggatggctggctgcgtttcggcctggacctggcgcaaccctgcctgacctacgaacgctacggcacgctgggttcgtacagccattccagcctctaccttctgcacgctcgcgatgcggacgaccggccgcgctggcgcgaggccgacatgccgcgcctggacctgttgctgcccctggatggcgcggccggcaggccgggatgcctgttgcagagcgcaccgctggccgatggcagccgggccgtctgggagtggttgcgcgacgatcaggaggcggagcgcggcgcctatgccttgcgcctgggcgactggcgcctggatggcgagtggacgctcgaccaccgcgtgtccgattgcggtcgctacctggccctggtggccttcgccgaggcgccgaccctgccgcagcgcctggccatactcgatagccgggagcggcgtctggagtggctcgctgagccgctggccgatctacacctgcaaggtttcatcgatggccaggtgcatctgctccacctgctcggccgcaacgcctaccagccgccgggcgggccgggcgaaggcgaccccggcctgttgcgccgcttcgacgaaggcttgcccgagcccggcgcctggcacgcattcggccgcttccacgacgactggcggcattactacgagcaggcgcgggtggcgttcgatggcacggcctggcggctgtgccccacgtcgcgctggctggacgcagcgccgcggccctggagcgacggcgacttcgtcttgccgtcggtgggcgcggaggacgccgcctggggcttcggtttccactacgagggcatgcaccgcgacgaggacgtgcgcgccgggttcagccgcgacggctacctgctgaccgcgtcgggcatcggcttgggcaacctggcggcgccaatgatctggtcggcggacggtcgctacctggcgctgacccggcacgtccagcgctacgaggaaagcgagctggagcgggaccagtggcgcctgctgctgctcgacgtgcaagagcggacgttgcgtcgctaccgcgacgacctcggcgagtacccgtgcttcgacagcttcgacgacgacctgtgcttccgctgcgcggggacggggcgctacgtgctggccctggactcgctgctgaaggctcccgccgagccgctgcaggcctgcgccggacgctggctgccggccgaggaactgccgcggcggcgctactgggagcgcctggcgtttccctcgcgccctcagtag

SEQ ID NO: 322653 - DNA, 1041 bp, Pseudomonas aeruginosa
atgaccgataacacccaacagttcgccagcgacaactattccggtatctgccccgaagcctgggcggcgatggccgaagccaaccgcggccacgagcgcgcctatggcgacgaccagtggaccgcgcgcgcttcggactacttccgccagttgttcgagaccgattgcgaagtgttcttcgccttcaacggcaccgccgccaactccctggccctggccgcgctgtgccagagctaccacagcgtgatctgctcggagaccgcccacgtcgagaccgacgagtgcggcgcgccggagttcttctccaatggctccaagctgctgctggcgcagaccgaggtcggcaagctgaccccggcgtcgatccgcgacatcgctctcaagcgccaggatatccactatccgaagccgcgcgtggtgactctcactcaggccaccgaggtcggtacggtgtaccgcccggacgagttgaaggcgatcagcgccacctgcaaggaactcggcctgcacctgcacatggacggcgcgcgcttctccaacgcctgcgccttcctcggctgctcgccggcggagctgagctggaaggccggggtcgacgtgctctgcttcggcggcaccaagaacggcatggcggtgggcgaggcgatcctgttcttcaaccgcgacctggccgaggacttcgactaccgctgcaagcaggccggccaactggcctcgaagatgcgcttcctcgccgcgccctgggtcggcgtactgcaggacgatgcctggctgcgctacgccaatcacgccaaccgctgcgcgcggctgttggccgaactggtggccgacgttcccggcgtcagcctgatgttcccggtagaagccaacggcgtgttcctgcagctttccgagccggcgatcgaagccttgcgcgcgcgcggctggcgcttctacaccttcatcggtgaaggtggcgcgcgtttcatgtgttcctgggataccgatatcgagcgggtccgcgaactggcgcgggacatccgcctggtgatgggcgcctga

SEQ ID NO: 322654 - DNA, 642 bp, Pseudomonas aeruginosa
atgaaacgcccgctgatcttcctttccgccgtgctgctcggcgcatccctgcaagggtgcgggggcggcgatgaaaagcaggccgccgcgcctgcgctgccggccgattcctgcaccggccatgaactcgaagtggccttgccgccggccggcaagccactgttcggctacgacttcctctcccgccagtgcggctacaacgatgccaccgtggtcttcggcgccgccgacggcagcaagcgcctggagatcgtcctcaccgacaccggcctgccggcgccgccgaccgagggcgacgcggtggcctatcgggcggcgcaggacaagctgcgcgagatgacccagaccaacctgaccctgctccacaagacccgcgagaccgccctgaagaacggcaccgccgagcgcttcggcggcgaggactacctgccgctgatcgataccacgcgaatgggcgacccgctgggggtgatggtcccggccaagggcgaggagggcgtctcgaccctcagcggagtgatcaagaaccgctacgtactgaccctcagcacccgcgacatgcccaatggcggcagcgccacggcgatgcgccaggtgctggtgccgttcgtcgagcagatgaagctgaccaagctaccctga

SEQ ID NO: 322655 - DNA, 1272 bp, Pseudomonas aeruginosa
atgacggtgctcgaagagctggacaagctgaagaccggaaagcacaccatcgccgccgagtgccgccaggccatccgcctgatcgaccaggtactcggcgaggccacgcccgagcaggtagagggaggggtaccgatccagcgtggcaagaacggccccagcggcagcctgtcgatcctcatgagcaagcgtgccgagcccatcacctggctgccggagcacctcaacgacaacaagatcatcaaccagttggtcgagctgaagagccgccacagcggcgtgcgcgtggtgctggtgaccaaggacatcaacatgcgcctgaaggcgcgcgcctgcggggtggacgcggaggactaccacaccgaccagttgatcgacgacgtggccctgctgtcgcgcggctaccattccctcgccggctctttctgggaccgcgtgagcaaggtcgagacccgccaggaccacggccgtacctggcatcgcgtgcagctcaccgacaacctgccggcggtgcacatcaacgagttcatcgtcgacgaacagggcttcgtcggctggatcaagggcatccagcaggacgagctgaccatcctcgacctgcaccaggagccgctcctgcaccaggaagcctggggcctgcggccacgcgacgtgtaccagtcgctggcgctgtacgcgctgctcgacccggacatccacctggtcaacctgtccggtgccgccggttccggcaagaccatcctggcgctcgccgcggccatcgagcagaccatggtcagcaagcgctaccggcgcatcatcgccacccgcagcgtgcagggcctggacgaggacatcggtttcctgcccggcaccgaggcggaaaagatggagccctggctcggcgccatcaccgacaacctcgaagcgctgcacatggacgacgaatgcacccatggcagcgtcgactacatcctcagcaaggtgccgttgcagttcaagtcgctgaactacatccgcgggcgcagcttccagcagagcctgatcctcatcgacgaatgccagaacctcacgccgcaccagatgaagaccatcatcacccgcgccggcagcggttcgaaggtgatctgcctgggcaacctggcgcagatcgacacgccctacctgtccgccaccagctccggcctgacctacctcaccgaacgcttcaaggacttcccccacggcgtgcacgtgaccctgcaaggggtgccgcgctcggtgctggcggagtacgccgaggcgcacatgtga

SEQ ID NO: 322656 - DNA, 483 bp, Pseudomonas aeruginosa
gtgctgacccatctcgattcccagggccgcgccaacatggtcgacgtcacggaaaaggccgtgacctcccgtgaagccacggccgaggccgtggtgcgcatgcgcccggaaaccctgcaactgatccaggacggcggccatcccaagggcgacgtcttcgccgtggcgcggatcgccggcatccaggcggccaagcgcacccacgaactgatcccgctgtgccatccgctgctgctcaccagcgtcaagctcgaactgcaggccgaggcgccggacgccgtgcgcatccgcgcgcgttgccggctggccgggcagaccggcgtggagatggaggcgctcaccgccgccagcgtcgcggccctgaccatctacgacatgtgcaaggcggtggaccgcgggatggtcatcgagcaggtccagttgctggagaagctcggcggcaagagcggccactatcgcaaagaggaggaagggcaggcatga

SEQ ID NO: 322657 - DNA, 252 bp, Pseudomonas aeruginosa
atgatccgcgtgcagtatttcgcccgttaccgcgaagctctgggcatcgacggcgagcagttgaactgggacgccaggctggcgaccctcggcgccttgcgccagctcctggtggagcgcggcggggcctgggagcgcaccctcggcgagcagaacctgatgtgcgcgcgcaatcaggaactgtgcggcctcgacgagccgttgcaggacggcgacgaagtcgccttcttccccaccgtcaccggaggttga

SEQ ID NO: 322658 - DNA, 453 bp, Pseudomonas aeruginosa
atggccatccgcgtccagcaggccgctttcgatccggggcaggagcttaacgccctgcatgcgcagaacgtcggcatcggcgcggtggtcggcttcgtcggctacgtgcgcgacttcaacgacggtcgcgaggtcggcgggatgttcctcgaacattatccgggcatgaccgagaaggccctcggcaagatcgccgccgaggccgggcagcgctggccgctgctgcgcctggagatcctccaccgcatcggccgcctggagccgggcgagccgatcgtcttcgtcggttgcgccagcgcccaccggcaggcggcgttcgacgcctgcaacttcgtcatggactacctgaagacccgcgcgccgttctggaagaaggaagacaccgccgaaggcccgcgctgggtcgaaggccgctgcagcgaccaggccgccgcgcagcgctgggaggagtga

SEQ ID NO: 322659 - DNA, 558 bp, Pseudomonas aeruginosa
atgagccacctggccacctccaccttccagccgctgaacatcgccatcctcaccgtcagcgacacccgtaccctggaaaccgatacttccggccagaccctcgccgacgcgctgctggccgccggtcatcgcctgcaccagcggagcctgaagaccgatgacatctaccagatccgcgcggtggtctcggcctggatcgccgaccccgaggtacaggtcggcctgatcaccggcggcaccggcttcaccgcgcgggacaacaccccgcaggcggtcgggccgctgttcgagcgcgatgtcgagggcttcggcgaactgttccgccaggtctcgcagcgcgagatcggcacttccaccatccagtcgcgggcgctggccgggctcagcaacggtaccctggtgtgctgcctgcccggctcgccgggcgcctgtcgcaccgcctggaacgagattctcctggcgcaactggacagccgcacccgcccgtgcaatttcgtcccgcacctgaagaccccgccagccgtggcgccggtggccggctgcgggtgccgctcgtga

SEQ ID NO: 322660 - DNA, 1224 bp, Pseudomonas aeruginosa
gtgagcgcttgcgcctgcgatggcggccaactgcgcccgctcgacgaggcgctggccgaactgctggcgcgcgcgccgcgcccgccagcctgcgagagcctggccctggagcgggcgctgggacgagtgctcggcgaggacctgctggcgccgatggacctgccgcattgggacaacagcgcgatggacggctacgccttgtgctccgccgacctgccgcgcagcggcggcagcctgacggtcggcgcgcggatcgccgccggcgacacccgcggcatgagcctgccgctgggccaggcggcgcggatcttcaccggcgcgccgctgccgaccggcgccgactgcgtggtgccgcaggaactctgcgtggtcgacggcgagcgcgtgcagttgccgccggtgagcgccggccagcatgtgcgccggcgcggcgaggagttgcgtcgtggcgcgccggtgctgcgtgccggacagcgcttgcgcccgcaggaactcggcctgctggcgagtctcggcgtcgccacggtctcggtgcgtcggcgcttgcgcatcggcctgctgagcagcggcgacgaattgcgcgagcccggccagacactgttggccgggcagatctacaacgccaaccgttactgcatcggcgccttgctgcgcggtctgggcttcgaggtgcacgacgaggaagtgctcgccgacgaactggtggccagccgcgatgcgctcagcctggcggcctccgaatgggacgcgctggtcaccagcggcggtgtctcggtaggcgaggaagaccacctcaagcgcgccatcgccgagcttggcgaggtcaacctgtggcgcctggcgatccagccgggcaagccgttcgccttcggctccgtggccggcaagccctggctggggctgcccggcaaccctgcggcggcgctggtcaccgcattgctggtggcgcgtccgttcctgcttcgccagcagggactgttcgacgtagtgccgcggccgctggcgctgccggcggccttcgactggccgcaaccgcgggcgcgtcgccagtacctgcgggcgcggctcgatgaacgggggcgggtggaaatccacccgcagcagggctcggcgatgctgcttgccgccagttgggcggacgggctggcggtgatcgagcgcggcgccaccctgggcgtgggtgatgcgatcgactttctgccgttctccgcactgatggcctga

SEQ ID NO: 322661 - DNA, 996 bp, Pseudomonas aeruginosa
atgcaactggtctgtccggcgggcagcctgcccgccttgaagtcggccctgcgacagggcgccgatgccatctacgtcggtttccgcgacgacaccaacgcccgccatttcgccggcctcaaccttgacgaacgccagttgcaggaaggcctgcggcgagtccacgaggccgggcggcagctctacgtagcggtcaacacctattccagcgcgcagggctgggagcgctggcagcgcgcggtggaccaggccgccgacctcggcgtcgatgcgttgatcgccgccgacgtggcggtgctcggctatgccgcgaagcgtcatccgcggctcaacctgcatctgtcggtgcagggctcggcaaccaatgccgcggccctggccctctatcacgaacgctacggcatccgtcgcgcggtcctgccccgcgtgctatcgctggcgcaggtacgccaggtggcggccggtagcccggtgccggtggaggtgttcgccttcggcagcctgtgcatcatggccgagggccgctgccacctgtcctcctacgtcaccggcgagtcgccgaacctctgcggcgtctgttcgccggccagggcggtgcgctggagcgaggaaccggaggggttgacctcgcgcctcaacgaagtgctcatcgaccgctacgccgctggcgaggcggccggctacccgaccctctgcaagggccgtttcctggtcaatggccagcgcttccatgcgctggaggaaccgaccagcctgaacaccctggacctggtcccgcaactggcggaaatcggcgtggcggcggtgaagatcgaaggccgccagcgcagcccggcctacgtcgagcaggtcacccgggtctggcgccaggcgctggacagctacgccagcgcgccgggcgcctatagcgtgcagccgcaatggcagcgcgcgctggccggactttccgaagggcaccagaccaccctgggcgcctatcaccgttcctggcagtga

SEQ ID NO: 322662 - DNA, 891 bp, Pseudomonas aeruginosa
atgaaactgagcctgggaccgctgctgttctactgggacaagcggcagatattcgatttctacgccgagatggccggccagccgctcgacgtcatctacctcggcgagaccgtctgcgccaagcgccgggcgctgtccctgaatgactggcaggcgctggcccgcgagctggcgcaggcgacccgtgccgagctggtgctctccgggctggcgctgatcgaggccgcttcggagctgtccagcctgcgccggctatgcgagaacggcgaactccgggtcgaggccaacgacatggccgccgtctattacctcagccagcgcggcgtgccctttgtcggcggtccggcgctgaacctctacaacggtcatgccctggccgaactgtattcctggggcatgcgccgctggattccgccggtggaagtctccggcaagctgctgcgcggggtgctcgaccaggctgcgcagctgggcctggagcaattgcagaccgaggtcttcgcctacggtcacctgccgctggcctactcggcgcgctgcttcaccgcgcgggcggagaaccggcccaaggacgactgccagttctgctgccagcagtatcccgaaggtatcccgctgctcagccaggagggcgaggcgctgttcaccctcaacggcatccagaccatgtccggcaaggtcagcaacctgctggccgactaccgctcgctggaacatagcggcgctgacctgctacgcctgagtcctcgggcgcagggcatggccgaggtgatcgcggccttcgaccgggtacgcaagggtgccgctccgccgctcgctgtggaaggctgcaacggctactggcacggccggccggggatgctgcgggcagaggaggcagggctatgctga

SEQ ID NO: 322663 - DNA, 516 bp, Pseudomonas aeruginosa
atgctgaaccgccaacgcctgctcctcggcgtcgccggacgcctgttgccgctggcggcgaaggttccgcgcgggctccagcacctggtcctgcaacgggtcgccaaccggctgttcgcccagccgctggaggagggcgccttcgacctgctggaaggtcgctggctgcgcctggaagtcagggacctcggcgtcggctggtgcgtcacccgggtgcccggcggcctgcgcctggtcgaacggccacgggccagcgtgaccatccgcggcgactggcgcgacttcctgctgctggccagccggcatgaggacccggataccctgttcttccgccgccgcctggtgatcgagggcgacaccgagctgggcctggcggtcaagaacctcctcgacagcctcgacccggagcacctgccgccctggttgtggaacgccgtggaacgggccgggcgggcagtgcaggaggagcgcggcgaggcgccccaggggccggtccagggcgcgcggggcggctga

SEQ ID NO: 322664 - DNA, 1563 bp, Pseudomonas aeruginosa
atgagtgggatggacctcaagcgccgccgcgtcgtgcaaggcctgggcgctggactgctgttgccggcgctgggcgcgccggcggtgatcgcctcgcccagggcgcggccgaagctgaccgatggcgtgcaatccggcgatgtgcagggcgaccgcgcgctggtctggagccgcaccgaccgcccggcgcggatgatcgtcgaatgggacacccgtagcgtcttcagcgagccgcgtcggctggtctcgccggtcaccgacgagcgcctcgactacaccgcgcgcatcgacctgggtggcctgccggccgaccagtcgatcttctaccgggtgcgcttcgaggatgcccgcgacggcagcctgagcaagccctggttcggccacctgcgcagtgcgccgagcgaggcgcgcaatatccgtttcgtctggagcggcgacacctgcgggcaaggtttcgggatcaatccggatatcggcggcatgcgtatctacgaagccatgcgccggcgccagccggatttcttcctgcacagcggcgacaccatctatgccgatgggccgatccccgaacgcatcgagaccgagagcgggcgcatctggcgcaaccgggtgaccgaggccaagagcaaggtcgccgagaccctcgacgagttccgcggcaactaccgctacaacctgctcgacgacaacctgcgccgcttcaacgccgaggtgccgcagatctggcaatgggacgaccacgagaccaccaacaactggtcctccagcaagcagctcgacgagcgctaccaggtgaaggacatcgacgtgctggcggcccgtgcacgccaggcgttcctcgaatacgcgccgctgcgcttccagcgccaggggcgcgacgggcggatctaccgcaaggtcgcctacggccctttgctcgacgtgttcgtcctcgacatgcgcagctaccgcggcggcaacagcgccaacctgcaggcgcggcgcagcgccgccaccgatttcctcggccgtgagcagttgcaatggctcaagcgcgagttgcgcggttcgcgtgcgcagtggaaggtgatcgccgccgacatgccgatcggcctctgcgtgcccgatggcaaggacgcccagggtcgcgaccgctgggaggccatcgccaacggcaacgacggcgccgccctcggccgcgagctggagatcgccgatctgctgcgcttcgtccagcgcgccggggtgcgcaacaccgtctggctgaccgccgacgtgcattactgcgctgcccaccactacagcccggagcgcgccgcgttcaaggacttcgcgccgttctgggagttcgtcgccgggcctctcaatgccggtagtttcggacccaacgcgctggatggcacgttcggcccgcaggtgatgttccagaaggccccgctggtccagaacagttcccccttcgccggctaccagttcttcggcgaggtggagatcgatgcgcaaagccgcgcgctcaccgtcaccctgcgcgacctcgacggcgagccggtgttttcccaggaactgcagcccgacggcgcctga

SEQ ID NO: 322665 - DNA, 2343 bp, Pseudomonas aeruginosa
atgcaccccttgcgtaacgccgccctgctgggcggcctggccctgctgggcctgccggtggccaacgccgccgagctgatcatctccgagtatgtcgaaggcagcggcaacaacaaggcgctggagttctacaacagcggcagccaggtcctcgacctctccgcctaccgcgtcgagttctatttcaacggcgccagcgcggcgggccgcagcatcgacctgagcggcagcctggcgccgggcaagaccttcgtcctcgccaacggcgtggccgacccggcgttgctggcgctggccagccagcgggtggaaggcagctggttcaatggcaacgatgcggtgctgctgcgccggcgcagcggcgagatcctcgacagcctcggccaggtcggcttcaaccccggcacgacctggggcagcggcgatgtgcagaccctcgaccggagcctggtgcgcaaggccgacatccgcgacggcgacagcgatcccagcgacgccttcgacccggcggcgcaatggctgggctacccgcgcgacaccttcgccaacctcggccagcatggcgctggcgagcccggcggcggcgaggaggccggcctgcgaccgatccacgaggtgcagggcgccggagccgaaagtccgctggtgaaccagcgggtcgccatcgagggcgtggtggtcggcgacttccagaacgccagcgagctgaagggcttctacgtgcagcaggaagatgccacggtggacggcgacccggcgacctccgaaggcatcttcgtctacgacggcggcaacggcagcgacgtcaagctcggcgaccgcgtccgggtgaccggccaggtccgcgagttcaacggcctcaccgagctggtcgggccgctgcaggtcagcgtcctggcgagcggcgtggccttgccgacgccggccggcatcagcctgccgctggccagcgccgatgcgctggagcgctacgaaggcatgcgcgtgcagctccgccagacgctgaccgtcaacgaggtctacaacctcggccgctacggcgaggtcctgctgtcctccggcggccgccagatgactccgaccaacgtggtggctcccggcgaacaggccaaggccatgcaggcgcgcaacgacctcgaccggattctcctcgacgacggccgcagcgggcagaaccccgacccgatccgctacccggcgccggaactgagcgcctacaacagcctgcgcgtcggcgatcgcaccagcgccatcgacggcgtgctcgactactcggccggcagctaccgtatccagccgttgcagacgccgaccttcgaggcggccaatccgcgtccggcccagccggcggtggaagggcgcctgcgggtggccagcttcaacgtgctcaactacttcaacggcgatggcaagggcggcggtttccccacctcgcgcggagccaacacggccgaggagttccaacggcagaaagcgaagatcgtcgcggcgatcctcgcctcgaaggcggacatcgtcggcctgatggagatcgagaacgacggctacggtgagttcagcgccatcgccgacctggtcaacggcctcaacgccagcctgccccagggccagcgctatgccttcgtcaacccgaaccgggcgaagctgggcagcgacgaaattgccgtggggctgatctatcgcggcgacaaggtccgcacctatcgatccgcggcggtgctcgacagttcggtgaacccggagttcgacgacacccgcaaccgtccgaccctggcccagaccttccaggagatcaatggcggcgaacgcctgaccatcgcggtgaaccacctgaagtcgaagggctcggcctgcgacggcgacccggacaccggcgacggccagggcaactgcaacctgacccgggcgcgcgccgcccaggccctggtggactggctggcgggcgatccgacgggcgccaaggagcctgatcgcctgatcatcggcgacctcaattcctatgccaaggaagacccggtgaacgtcatccgcagcgccggctacaccgacctggtggcgcgtcaggcgggcgcaggaaagggctattcctacgtgttctccgggcagtccggctaccttgaccacgccctcgccaacgccagcctggcgcgccaggtacgcggcgcggtggagtggcacatcaacgccgacgagccccgggtgctggactacaacgtcgagttcaagacccctcggcagcaggacagcctgtacaacgccgagccgtaccgggcctccgaccacgacccggtggtgatcggtatcgacctgcgccgggtggcgatgaagaagcaccgcaggtag

SEQ ID NO: 322666 - DNA, 720 bp, Pseudomonas aeruginosa
atgacggacgccaaggctttcaggcgctacatattcgagctgtacttcgatccggcacggctcctcgaactggacgacgaccagcacctgcaacggatagagcgcttcctcgatgccctcgcgcccctccatccggtgctggagaactggtacctgtgcggcgactccctgcgcgacgccctcagccacaacgtcaccgagcaccgccaggatctcgccaaggccctgtcgcgtgaccggcgcacccgggcggtggaactggtgctatggaacggcgaggaggatccgctcaagggcgggttgtcgctggactacgaggccagcggcagggccgtctcgaccaggctccagttggaagatgccggcagcctgctgcaggtgttcgacgcaccggcttcctccttcgtcgcgatcttcctcgcggcgctggaaatctggcccgaaacgacctggggcatgctcgctccgcatacgtatttcgtacaccagcggaccttcccggaccgccgcagcatcggctggatcggcttctgcccgcatccgctaagggccacggacttcccggcggctacggagctggtcgacattcccggccgtggcaccctgctgctgaacggccgcgaaccgatggacgaaacccgtcgcgaacatttcgagcgcgtcggcgaagcggacatcaagctgatggaactgggctacctgccgccgctgcgcggctga

SEQ ID NO: 322667 - DNA, 786 bp, Pseudomonas aeruginosa
atgagcggcataggcgcgcttttccgaccgctgccccgcatgggtccgcggctgcccttcgaactacccgcgccgccccggccgcacttgccgatgccggcgccgcgcccgctgccgcgaccggcccccggcgcgctgcccaggccggtaccgcgtccgatgccggtgccgcagaccctgcccaggaccgagaccggcacgctgagccgcgaccggacccgggaagccgagcgcgattgcagcaagagccagggccgcgacaaggactgcgtggagtgcccgccgtcccggggcgaaatggccatcgccaataacggcaagggccacagcatgtcggacctgtccgcgcgctaccagcagtgggtgaccaatttcccgtttccccacgaatggttctggagcggcacctggtgggacggcttcgacgagccgcgctgcaccctgctggaggcgaaggccaactacgccttcctgttcgtcccgctgctcggcgtgcccaggccctgggcgcgggccaaggtgaagtcggacctgctgcagaaggccgaggtccacagcgacaaggcccgaccgaccccgccggtgttcgtcgaatggcacttcctgcagcggatcgtctacgagtactgcgccgcggagtacctgcgcatgggactggccaacctgaaggcattctggaatccgatgccgggaacggacgagcacgacgactaccaggaaacccgcgcgaaggaacaggaagagatgaaaaggttttgcgaagagaacccggggtattgcgcatga

SEQ ID NO: 322668 - DNA, 384 bp, Pseudomonas aeruginosa
atgcttgaactggatgccggccaactggatcgcctgcagcgggtccgcgacgacgaagtcatcgagcgggtcctgctggaggtacgccgggaggctcccgcctggctcgaacgacgcggcctgctgcccgccatccggcaactcggcgagctgcgcgcgacggcgctggaactgggtatcgaagagcccgggacgatcgaacgctttcttctgcacggcctggccttccccgctttccaggacacgccggcgtttctcgcacacatgcgccggccgctggcggacagcccggaacaacgcttccaggactacgaacggatcgtcgagtttcgcctggccagccagaaatggcgcgcgtacgaaacctcggggagaccggcatga

SEQ ID NO: 322669 - DNA, 528 bp, Pseudomonas aeruginosa
gtgagccggctccagccggcgctcgcggcgcctacgccggacagccgcctgttcgccctggcggacggcgcccgctacctgaccctggacacccgcctggaaaaggccgcgggggaaatccgctcgcgctggctgctggccgggagcgagctggacgaaatcgcccatgcggggccggtcctgatcgaattcatggacagcgccccgctttcgtcatcgggcgagttcctcggctggctgcgcgactgggaccgccgctcgcccatggcctcctggctgtggagccgggcgtccttcgaaaacctcgcgaaacacttcgccgggctgctcttcacccgcatgcccgacggccgccgggcgctgttgcgctactacagcccggaagtgcgccgggcgctggaacaggtcatgaccgcgcggcaatggacgcaagtgatggcgccgctggagcgttggcaggtctggcagcccctgcagggcggctacctcgtctatgaccgggaaacggagcggaccgccgatgcttga

SEQ ID NO: 322670 - DNA, 396 bp, Pseudomonas aeruginosa
atgagcggcaaacccgctgcgcgcctgggcgatccgaccgcgtgtccgctaccgggccacggcagcaacccaatcgtcggcggctcgcccgacgtcttcttcgaccatcggtccgccgcccgccagggcgacgccaccgcctgcggcgccaccctcagcgccaacgtcatcaccaacgtactgatcaatggcaagcccgccaccgtggtaggtagcgtcggcacccacggcaacctggtggtcggcggggcgggcacggtgctgatcggcaacagcggcggcggcgcacccgctctcgccctcgccccaccgaagctgtgcctgcaatgcctgctgctggcggcacgccgcaaccaggccctggtgcccctggaaagcctcggcggcgcaccgtga

SEQ ID NO: 322671 - DNA, 1584 bp, Pseudomonas aeruginosa
atgaccactcaggccgccgaagtcgcgaagcgccgtaccttcgcgatcatttcccaccccgacgccggtaagaccaccatcaccgagaagctcctgctgatgggcaaggcgatcgccgtcgccggtaccgtgaagtcgcgcaagtccgaccgccacgccacgtccgactggatggagatggaaaagcagcgcggcatctccatcaccacctcggtgatgcagttcccctaccgcgagcacatgatcaacctgctcgacacccccggccacgaagacttctccgaagacacctaccgcaccctgaccgcggtggactcggcgctgatggtgctcgacggcggcaagggcgtcgaaccgcggaccatcgccctgatggaagtctgccggctgcgtgacacgcccatcgtcagcttcatcaacaagctcgaccgcgacatccgcgaccccatcgaactgctcgacgagatcgaggcggtgctgaagatcaaggccgcgccgatcacctggccgatcggctgctacaaggacttcaagggcgtctaccacctggccgacgacaggatcatcgtctacgtcccgggccacggccacgagcgcatcgagaccaaggtcatcgaaaagctcgactccgacgaagcccgtgcccacctcggcgatctctacgacaatttcgtcgaagagctggagctggtgcagggcgcctgccacgaattcgacaaggacgccttcctcaagggcgagatgaccccggtgttcttcggcaccgcgctgggcaacttcggcgtcgaccaggtcctcgactgcatcgtcgactgggcgccgcagccgctgtcgcgcgccacccacgaacgcagcgtggagccgaccgaggagaagttctccggcttcgtgttcaagatccaggcgaacatggatcccaagcaccgcgaccgcatcgccttcatgcgcatctgctcgggcaagtacgagaaaggcatgaagatgcgccacgtgcgcctgggcaaggacgtgaagatcgccgacgcgctgaccttcttctcctccgagcgcgagcaactggaagaggcctatgccggcgacatcatcggcctgcacaaccacggcaccatccagatcggcgacaccttcagcgaaggcgagaacttcggtttcaccggcatcccgcacttcgccccggaactgttccgccgcgtgcgcctgaaagacccgctgaaatccaagcagttgcgccagggcctgcaggaactggccgaggaaggtgcgacccaggtgttcttccccgagcgcaacaacgacatcatcctcggtgcggtgggcgtgctgcagttcgacgtggtcgccagccgcctgaaggaggaatacaaggtcgagtgcgcctacgaggcgatcaacgtctggtcggcacgctggatcgagtgcgacgacgagaagaagctcaaggagttcaaggacaaggccttcgagaacctctccgtggacggcggcgggcacctcacctacctggcaccgacccgcgtcaacctcagcctgatggaagaacgctggccggacatccgcttccgcgcgacgcgcgagcatcactga

SEQ ID NO: 322672 - DNA, 462 bp, Pseudomonas aeruginosa
atgaacggagtatccagactgctctccctggccttgctgggcgcggcgctgcactgggcgccggcgcaggccgaggagcagccgcggctgttcgaactgctcggccagcccggctacaaggccacctggcatgccatgttcaagggcgagagcgacgtgccgaaatgggtttccgacgccagcggcccgagttccccgtccaccagcctgagcctggagggccagccctacgtcctggccaacagttgcaaaccccacgattgcggcaacaaccgcctgctggtggcgttccgcggcgacaagagtgccgcctacgggctgcaggtgagcctgccggacgagcccgccgaagtcatgcagacgccgagcaagtacgccacctatcgctggtacggcgaaccctccaggcaggtccgcgagctgctgatgaaacagttggagagcgatccgaactggaagtga

SEQ ID NO: 322673 - DNA, 2355 bp, Pseudomonas aeruginosa
atgtccccgtcacgcgccctgtcgccgctcagccgcgccctgctcctcgcctgcctcggcggtcccgtcctggtttccgccggcagcgcctgcgccgccgagatccgcaccgatgcccgccagtactaccgcctgcctgccgagccgctggagcaggcgttgaaccacctaggccgccaggccggcgtgctgatcgccttcagcccggaacagaccgccgcgcgacgcagccaggcgctggacggcgagtacaccctggaggaagccctggccgccctgctcgccggctccggcctggaggcgcgcgcccgcggcgacggcgcctacaccctggaagcgctgccggtggaagacccggccaacctgcaggcgctcaccgtggtcggcgactggctggccgacgccagcgccgccgacgtcttcgagcatcccggtgcgcgcgacgtggtccgccgcgagcagttccaggcccaaggcgcggccagcacccgcgaagtgctggagcgcattcccggggtcagcgcgccgctcaacaacggcaccggcagccacgacctggcattgaacttcggcattcgcggcctcaacccgcgcctggcgtcgcgctcgacggtgctgatggacggcatcccggtgcccttcgccccctacggccagccacagttgtcgctggcgccggtgtccatcggcaacatggacgcggtggacgtggtccgcggcggcggcgcggtgcgctacgggccgcagaacgtcggcggcatcgtcaacttcgtgacccgggcgatccccgaggacttcgccaccaagctcgacgtgcacagcgaactcagccccagctccagccaggacggcctgaagaccacccacaacgtgctgatcggcggcaccggcgccaacggcctcggcggcgccctgctctactccggcacccgcggcggcgattggcgcgagcacagcgatacgcggatcgacgacctgatcctcaagggccgcttccagcccagcgacgaacacacgttttcggcgatgacccagtactacgacggcgaggccgacatgcccggcggcctcggcaccgcggcctaccgcgacgacccgtaccagtcgacccgtccctacgacaagttctggggccgccgtaccctggccagcgccagctacgaatacacccccaacgccagccagaagctcaacgtcaccggcttcttcaccaagaccctgcgcagcggctacctcgaccagggccgcaacctcaccctgtcgccgcgcgaatactgggtgcgaggcctggaaacccgcttcagccagggcttcgagctgggcgaaagtcgccacgaagtgggcatcggccaccgctacgtcaacgaagccagccacgagctgcgctactggacccgcgccgacagcggccagctacccagcaccggcagccgcaacgaccgcgacacccgcggcagcaccgaagccaacgcgttctacatcgacgatcgcatcgacatcggcaactggaccatcacccccggcatccgctacgagaagatcgattccgaacagaagaacctgctgaagaacagcaaggacagcggccgctacaacgcctcgctaccggcgctcaacgtgatctaccacctcacgccgagctggaacctctacgccaacaccgagggctcgttcggcaccgtgcagtacagccagatgggcaaggcggtgcgcagcggcgacatcgagccggagaaggcccgcacctgggaactcggcagccgctacgacgacggcatcctgcgcgccgaactgggcgccttcctgatcaacttcgacaaccagtacgagagcaaccagcagaccgacagcgtgaccgcccgcggcaagacccggcacaagggcatcgaggcggcgatcgcctacgacctggccgatctcgacccgctgctctccggcttcgacgtctatgccagctacgcctacgtcgacgcgagcattcgcgaggacgggccgaacaagggcaaccaggtgccgttctcctcgaagcacaagggcacccttggcgccaactatcgcaccggcgcctggagctacaacctcgacggcagcttccagaccagccagtacgccgacaacgccaacaccgagagcgaaagcgccgacggcagcaccgggcggatcgccggctggatggtctggagcgcgcgcggcacctacgacttcggcccgcaactgaacgacctcaagctcggcctgggggtgaagaacctgttcgatcgccgctactacacccgctcgttcgacgacaacaacaagggcctctacgtcggccagccgcgcaccctgtacgtacaggcctcggtcggtttctga

SEQ ID NO: 322674 - DNA, 954 bp, Pseudomonas aeruginosa
atgagcctgcccgccgcacccaaggtgccgccgcaggtggctgaacaggccgtgcgctggctggtcgagctgcagggcggcgccgacgacgaacgcctgcgccaggcctggcagcgctggcgccaggcggccccggaacacgagcaggcctggcgccacatcgaggcggtcaaccagcgcctggccgggataggcacgccactggccctggccgccatcaacgcaccgcattcgccgcaacgccggcgcgcgctgaagaccctgctgctggtcctggccgccggcggcagcgcctggggcctgcgcgagagcggcagcctgcagcgctggagcgccgactatgccaccggcgtcggcgaacgccggcgcctggccctggccgacggcagtcgcctcgagctgaacagcgacacggcggtggatgtccgcttcgatgccggcgaacggcgcctgctcctgctgcgcggggaaatccagctcagcaccggccacgacccgcgcccgctgcacgtgtacagcgcggaaggccggctgcgaccggtgggcacccggttcgacgtgcgccagttcgccggacgcacccgcgtcgccgtccacgaaggcgcggtacaggtggagaaccgcgccggccagggcctgctgttgcccagcggccggcaactggacttcgaccgcgagcgactcggcgctccgcagccgctgccggtcggcagcggcgcctggaccgacggcatgctggtggccgccggcatgcgcctggacgaattcctcgccgaagtcgcgcgctaccgccccggccggctgggctgcgacccgcgcatcggcggcctgcggatttccggcagctatccgctggacgatagcgagcggatcctcgccaccctgccggcggtgctgcccgtggaggtacggcgcgtcacccgctactgggtcggcgtgcacccgcgcgaatga

SEQ ID NO: 322675 - DNA, 510 bp, Pseudomonas aeruginosa
gtgtcgagcgccgacctcgcccatgcggccgcgttgcataccctctacagcgaccaccaccactggctcacgggctggctgcggcgccgcctcggctgcccgcagaacgccgccgacctggcccaggacaccttcgtcaaggtcctggtttcgcgccaggccgcgcgcatcgacgaaccgcgcgccttcctcaccaccatcgcccgccgcgtgctgtgcaaccactaccgccgccaggacgtcgagcgcgcctacctggaagccctggccagcctgcccgagcgggaagtccccagcgaagagacccgcgccatcgtcctggagaccctggtcgagctggaccgtctgctcgacggtctgccgccactggccaaggagaccttcctgctggcccaactcgacggcctgggctacgccgagatcgccacgcagctgggcatctccctgagcagcgtcaagcgctacatgctcaaggctgcgcaacgctgctacttcgccgagctgccatga

SEQ ID NO: 322676 - DNA, 891 bp, Pseudomonas aeruginosa
atggccggcatgcaccaacccagcgatttccaggtattccgcaccctcgaccggacctccaatgcgcgcctgctgcgcagcagcacgctcagcgacggcctggcgctcgcccattggtaccgcgacgaagcggagatcctcggctacagcgaccccggccatcacaccctgtcgctctacctgcagggcggctggcagaccttccgccgcgatcgtcccgggctctatggcggccccgaccgcttctgcgtgatgccggccgaacaccactccgactgggcggtgacacgcggcctgggcttcatgcacctgtacataagcccggaacgcctggccggcgcggcggtacgcaccctcgattgcgaaccacgcagcctgcaactggaggagcgcacctacatccaggacgagccgctggccgccctgtgccggaccctggaacgacaggactggaacgaacccggcgagcgcctgctatgcaccagcctcgcccaccaggcggtggaccacctgctgctcaccgggtgcggcaggcgtaccgacgtacgctggcagggcgggctggccgcgcacgtgcggcggcgcctggccgactacatcgaaagccacctggagcagccgctggaactggggtcgctggcggagctggcggcgctctccgagtaccacttcgcgcgtatgttccgcgtctccttcggcctgccgccgcaccgctacgtgctggaacgacgcctggcgcgggcccgcgacctgctggcgtactccgcgcagtcgctccaggaggtctcgctggcctgcggcttcgccagtccgagccatttcaaccggcgcttccgcgaagcccatggcgccaccccggggcagtaccgcgccgccctgaaaggctcctga

SEQ ID NO: 322677 - DNA, 903 bp, Pseudomonas aeruginosa
atgaatctttcgctgtacctgctcaccgtgctcatctggggcaccacctggatcgccatcaagctgcagatgggcccggtggcgatcaccctgtcgatcgcctaccgcttcgccctggcggcgctggtgctgttcgccgtgctgctgctcggccgccgcctgcaaaggctggacgcacggggccaacgcctgtgcatggcccagggcgtatgcctgttctgcctgaatttcatctgcttctataccgccagccagtggattcccagcggcctggtggccgtggtgttctccaccgccaccctgtggaatgcgctgaacgcccgcctgtggttcggccagcgcatcgcgtcgaacgtgatggccggtggcggtctcggcctgctcggcctggggctgctgttctggccggaattggtgggtcaccaggccaccccggaaaccttctacggcctcggcctggccctgctaggcacgctgtgcttctccaccggcaacatgctttccagcctgcaacagaaggccggcatccgcccgctcaccggcaatgcctggagcatgctctacggcaccctgatcctcctggcgctgtgcctgttccagggcgtgccgctgaatttcgactggagcgcgcgctacgtcggctcgctgctgtacctggcgatccccggctcggtgatcggcttcaccgcctacctgaccctggtcgggcgcatgggcccggatcgcgccgcctactgcaccgtgctgttcccggtggtggcgctgaacatctcggccttcgccgagggctaccgctggaccgcaccggcgctggccgggctggtcctggtgatgctcggcaacgtcttggtgttccgcaagccgaaggcgccggcgctggccgggccggcgcgctcgacctag

SEQ ID NO: 322678 - DNA, 978 bp, Pseudomonas aeruginosa
atgaaaaagaacgtcttcgtcttcagtcgcctcgcccccgagcatctcgaacgcctgcaatgccagttcaacgtccgcgtgctcgaaccgaaacagggcgacatcgacgcccagtacgccgccgccctgcccgatacccacggcatgatcggcgtcggccggccgctcggcgccaggcaactggaacaggcgatgcagctggaagtcatctccagcgtctcggtcggctacgacaactatgacctggactacctgaaccgccgcggcatcgctctcaccaacacgcccgacgtcctcaccgagaccaccgccgacctcggcttcgccctgctgatcagcgccgcgcgacgggtcgccgagctggacgcctgggtcaaggccgggaactggaagcgcaccgtcgacgccccgcagttcggcaccgacgtgcatggcaagaaactcggcatcctcggcctcggccggatcggcgcggccatcgcccggcgcggccgtttcggcttcggcatgcaggtgctctaccacggcaacaaccgcaagccggaactggaacaggaactcggcgcgcgcttcctcggcttcgacgaactgctcggcgaggccgatttcgtctgcgtggtggtgccgctgggggcgcagacccggcagttgatcggcgcgcgcgaactgggcctgatgaaaccctcggcgatcctggtcaacgtcgcccgcggccaagtggtcgacgaggccgcgctggtcgccgccctgcgggagaaacgcatcctcggcgccggcctggatgtctacgagaaggaaccgctggccgaatcgccgctgttcgccctggacaacgtggtgaccctgccgcacatcggctcggccacccacgagacccgccgggccatggccgagcgggcgctgcagaacttcgaggcggccttgcgcggcgagcggccgctggacctggtcaatccgcaggtgtggcgacgcggctga

SEQ ID NO: 322679 - DNA, 954 bp, Pseudomonas aeruginosa
atggacaccctgcaaaacatgcgagccttcgtctgcgtggcggaaaccggaagcttcaccgcggcgtcccagcagctcaacaccaccaccgcctatgtttcgcgggcggtggccaacctcgagacgcacctgcgcacccgcctgctcaaccgtaccactcgtcgcatcgccctcaccgaggccggccagcgctacctgctgcgctgcgagcagatcctcgcctacgtcgaggaagccgaggccgaagccagcgatgcccatgcccgtcccgccggcaagctgaagctgcattcgatgaccggcatcggccagcactacgtgatccgtgccatcgccggctaccgccagcagtaccgcgacgtgaccttcgacctgaccatggccaaccgcgtgccggacctgctcgacgagggcttcgacgtggccatcgtggtggcctccgagctacccgattccggcttcatttcccagcgcatcggcgagacctacagcattctttgcgcctcgccggagtacctgcgcctgaacggcacgccgagcgagccttcggagctggccagccacgactgcctacggctggtcagcccggtggtgccgctggatcgctggctgttcgacggccccaacggccaggaaatggtctccatcggcgcctcgccgttccaggtcaatgtcggcgacgccatgaccgaggcgatccgctccgggctgggcatcggcatcctgccggtgtattcggccatcgaggacctgggcaagggcaccctggtgcgggtcctgccgcaacaccgcctgcaacagctcaacgtctatgcgctgtacccttcgcggcagtatctcgacgcgaagatcaagacctgggtggaatacctcaaggaaagcctgcccggcctgctccagcgcgacgaagcggcgctggtggagctgggcctggaactcggaagaccctcctga

SEQ ID NO: 322680 - DNA, 1086 bp, Pseudomonas aeruginosa
gtgccgcgtgctctcaggaaggaactgaccttggtcggctccttcgtcggttttctcgtcgttttctccgcaatatccggttgtgtcagtacaggcgatatcgcccccgaggccgccacgctcgacgccaacgccctggccaccgaccatgcgatccaggctgccgcccgcgaggccggctggccgcaggcgcagtggtggaaggtgtatgccgatccgcagctggacgcctggatcgagaaggcgctggacggcaatccaggcctggcggtagcccatgcgcgggtacgccaggcgaagtccatggccgggctggtggagtccatcgagtcgccgcagatcgagggcaagggctcgctggtccgccaccgctggccggacgactatttctacggccccggcgacctggcgcggaccacttcctggaacaactccaccgagatcggcctgaactacaagctcgatctctgggggcgcgaccgcagcgacagcgagcgcgccgtcgacctggcccacatggccgccgccgaggcgcgccaggcgcagctcgagctggagggcaacatcgtccgcgcctacgtccagctctcgttgcagtacgccgagatggacatcgccaaggccatgctgcaacagcagcgcgacatcctcgccctggcccagcgtcgcctgcgcggcggcatcggcacgcatttcgaggtcagccaggcggaagtgccgctgcccgagaccgagcgccgcatcgaggtgatcgacgaagaaatccagctcacccgcaacctgctcgccgccctggccggcaagggcccgggcgaaggccgcacgatccgccggccaagcctgaacctggcggcgcagccgagcctgcccagcgccttgccggccgaactgctcggtcgccgcccggatgtggtcgcccgccgctggcaggtcgccgccctggccaagggcgtggacgtggcgcgcgccgacttctaccccaacgtcgacctgatggcctcggtcggcttcagtgccgtcggcggcggcatgctggagttcttccgcagcgccaagtacacctacagcgccggcccggcggtgtag

SEQ ID NO: 322681 - DNA, 375 bp, Pseudomonas aeruginosa
ttggcgctgcggaagcaatacaaccagaccctggtggatgcgctgaagaacatttccgaccagttgatccgcctgcattcggtggacatccagaaggacttcgccgcgcaatcggtggcttccgcgcagaagacctacgatatcgccaccctggcctaccagcgcggcctcaccgattacctcaacgtgctcaacgcgcagacccggctgttccagcagcaactggtccaggagcaggtgcaggccgcccggctggccgcccacgccagcctgctcaccgccctcggcggcggcgtcggggccggcgccgatacgccggcgcagcggaagctggcgccggagaacgtcccggtcagagcggtgtcttcgcgatga

SEQ ID NO: 322682 - DNA, 2196 bp, Pseudomonas aeruginosa
atgagtggccgctccgctggtttcgccctgcccagccgcgacgagtggcggcgcgcgctggccgagtgggcgcgcagcgacggggcgacctggatctacgtgttcaaggtgctctgcgcggccttcctgaccctctggctggcgatgcgtctggaattgccgcagccgagcacggcgaccatcaccgtgttcatcgtcatgcagccgcagagcggccaggtgttcgccaagagcttctaccgcatcctcggcaccctggtcggcctcagcgtgatggtcaccctgatcgccctgttcgcccaggagcgagtgctgttcctgctcagctcggcgatctggatcggcctctgcaccgccggggccgcccgctaccgtgacttccgctcctacgcctgcgtgctcgccggctacaccgcgacgctgatcggcattcccgccaccagccatccggaaggcgccttcatgcaggcgatctggcgggtcctggaaatcagcctggcgatcctctgctcgggggtggtcagcgcggtgatcatgccgcagaccaccagcgcggcgatgcgcaatgcgctgtacgtgcgcttcggcctgttcgccgcgttcgtcctcgacagcctgcgcggggtcggcgggcgcgagcgcttcgaaagcagcaacgtggccttcgccgcccaggcggtgggcctggagacgatgcgcgcggcgagcgccttcgaggatccgcacatgcgcctgcgcaatggccggctgattcgcctgagcagcgagttcatggccatgaatacccgtttccacgccctccaccaactgctcgaacgcctgcgcgcgcagggctccacccaggtgctggaagcgttcgaaccgtgcctggaggaaatcaccgggctgctcgaggagatccgtggccgcgccgtcaccgaccatgacgccgagcgcttcgcccagcgcctcgccgactgccgcgaacgcctgatggcgcgcatccgccaggcgcgcggagaactgctggcgcgggagccgggcgaagaggcgcggctggacttcaataccgccgccgagctgctctaccgtttcgccgaggagatgcacgactacgccctgacccatgcctcgctggccgcccaccgccacgagcgcgagcagtggaaggacgccttcaccgccaaggccaacgcggtggcggcggcagtggcggggatgcgcaccgggttgatgatcctgctgttcggctgtttctggatctacagcacctggcccagcggcggcaccttcgccctcaacgcggtggcggtctcggcgctggcctcggcggcgccgaacccgaagaaggtcgccatgcagatggccatcggcaccatggcggcggcgctgctcggcttcagcgagatgttcttcgtctacccgcatatcgacggtttcccgctgctatgcctggtactggcgccggtgttcgccctcggcgcgttcatctcctcgcggccgcagtgggccggctacggtctcggcctgctggtgttcttctgcttcggttcggtgccggcgaacctgaccgtctacgacccggcccacgtgatcaacgagtacatcgccctgatcctctcgatgctgctctcggccgcggccgccgcggtcattctgccgcccaacagcgcctggctgtggaagcgcctcgagcgcgacctgcggatgcgcgtggtgttcgccatcagcggcaggagcagggggcttggctcggccttcgaaagcggtacccgcgacctgctgaaccaggcctatggcgtcgccgccgggcgcccggacgtgcagcgcgggctgctgcgctggatgttcctggtgctcgaggtcggccacgcgatcatcgagctgcgtcgcgagcaggagcgcctgccggacgaaccctgctacgccgaggccatgccctggcgccaggcgatccgcgccatggggcgggccctgatccggctgttcgtgcgccccggtgcggagaacctggagcgcgccctggcggctgtcgaccaggccatccacgcggccaggcacaccgacgaaccctgcgcgccgcacttcgacagctcgccgctacggcgggtgcgcagctacctgcacttcatccgttcttccctgctcgcgccgacctcgccactgaccgaactggccggccggacgagcggccaaggtaccgtccatgcctcgtga

SEQ ID NO: 322683 - DNA, 201 bp, Pseudomonas aeruginosa
atgcctcgtgaaatcgccatccatggggtctacatgccgaccctgacgctgttgttcgtgatcgccgcggcgctcacctgggggctcgaccggatcttcgcctcggttggcctgtatcgcttcacctggcacccggcgctgttccgggtcagcctgttcgcctgcctgtacggcggcctgtccctgaccatctaccgctga

SEQ ID NO: 322684 - DNA, 909 bp, Pseudomonas aeruginosa
atgaccttgaaatccgtaatcagcctgctggcgaccctgctgatcctgctggtcgccgtattcatcgggcggaccctgtgggtcaactacatggacaccccctggacccgtgacggtcgcgtgcgcgccgacgtgatcaatgtcgccgccgacgtttccgggatcgtcgtcgacgtcccggtgcgcgacaaccagttggtgaagaaaggcgacctgctgatgcagatcgaccccgaccactaccgtattgcggtgaagcaggccgagtcgctggttgcctcgcgcaaggcgaccctggagatgcgccagttgaacgcccggcggcgcgcggaaatggatgagatggtggtctcccgcgaaagccgcgacgacgcccacaacaccgccgccgcggcgatggccgactacgagcaggccaaggcccagctcgacgccgcgcgcctgaacctggagcgcacccgggtggtggcgcaggtcgacggctacgtcaccaacctcaacgtgcaccgtggcgactacgcgcgggtcggcgaggcgaagatggcggtgatcgacaagaactcctactgggtctacggctacttcgaggaaaccaagctgccgtacatccgcgaaggcgacccggtggacatgcagctgatgagcggcgaacacctcaagggccacgtggaaagcatcgcccgcggcatctacgaccgcgacaacccggaaagccgcgagctgaccgccgacgtcaaccccactttcaactgggtgcgcctggcccagcgcgtgccggtgcgggtacacatcgacgaagtgccggacggcgtgctgctctcggcggggatcacctgcacggtgatcgtcaagccgcaagggcgcgacgaccaggcctcggcggcgcaggcgccggggcgggccggttga

SEQ ID NO: 322685 - DNA, 1164 bp, Pseudomonas aeruginosa
atgatcgaactggacaagctcagcaagaccttcacccagaagaacggcaaggagttccgcgccgtcgattccgtcagcctgaccgtggagaaaggcgagatctgcatcttcctcggcccctccggctgcggcaagaccaccaccctgaagatgatcaaccggatcatcccgccgacctccggccgcgtgctgatcgacggccaggacaccgcggacctcgacgaagtcaccctgcgccgccacatcggctacgtgatccagcagatcggcctgttcccgaacatgaccatcgaggaaaacatcatggtcgtgccgcgcctgctcggctgggacaaggcgcgctgcaaggagaaggcccgcgagctgatgagcatggtcaagctggagcccaagcagtacctgcaacgctacccgcgcgaactctccggcggccagcagcagcgcgtcggggtaatccgcgcgctggcggcggacgcgccgctgctgctgatggacgagccgttcggcgcggtcgatccgatcaaccgcgagtcgatccagaacgagttcttcgaaatgcagcgcaagctcggcatgaccgtgatcatggtcagccacgacatcgacgaagccatcaagctgggtgacaaggtggcggtgttcaagagcggccggctgctccagtacgaccacccggacaccctgctggcgcacccggcggacgagttcgtcagcgccttcaccggccaggacagcacgctcaagcgcctgctcctggtgcgcgccgaagacgccgccgacagcagcctggtcaccgcccggccgcagaccccggtggccgaggcgctggaactgatggacgagaacgaccggcgctacctgatcgtggtggatgaccagggcaagggcctgggctacgtgcgacgcaaggacctgcgccgccaggagggcacctgcgcgccgttcgtcaccccgttccgggtcaccgccagccacgacgagcacctgcgcatcctgttgtcgcggatgtacgagttcaacagctcctggctgccggtgctcgaccccgaccagcagttcctcggcgaggtcacccaggaatccatcgccgactacctcagctccggccgctcgcgcggcggcaagggcctgatcgtgtcgccggccgaacaggtcggggcctag

SEQ ID NO: 322686 - DNA, 663 bp, Pseudomonas aeruginosa
atggacttcttcagcgtgctttcccatctcgactggtcccaggtcggccagctcaccctccagcacctgctgctggtactggtcgccgtaggcctggcgatcctcgtcggcgtgccgctgggcgtgctgatgacccgcttcacgtggctggccggcccgttgcagggcgccgccacggtgatgctgaccatcccctcgatcgccctgttcggcctgctgatgccggtctactcggtattcggccagggcctcgggccgctgccggcgatcaccgcggtgttcctctattcgctgctgccgatcctgcgcaacacctacctcgccctgaccggcgtcgaagcgggcatccgcgaggccggcaagggcatcggcatgaccttctggcaacgcctgcggatggtcgacattcccctcgcggtgccggtgatcctcgccggcgtacgcaccgccgtggtgatgaacatcggcgtgatgaccatcgccgcggtgatcggcgccggcggcctgggcgtgctgatcctcacttccatcagccagagcaacatgccgatgctggtggtcggcgcggtactggtcagcctcctggccatcgccgccgacctgctgctgcaatggctgcaacgcatcctcacccccaagggactgcgcgccagcgcgcactga

SEQ ID NO: 322687 - DNA, 936 bp, Pseudomonas aeruginosa
atgaaccgactgatccgctcactctgcctggcctgcgccggcctgttcgccgccggcctggcgcaggcggaaaccctgcgcatcggcggcaagaccttcaccgagcagcgcatcctcaccgccatcaccgcgcagttcctgcagaagcgcggctacgacgtgacggtcaccaccggcctgggcagcaccctggcccgcgccgcccaggaaagcggccaactggatatcgtctgggagtacaccggctcgtcgctgatcgtctacaaccacatcgacgagaagctcgacgccgcggcttcctaccgccgggtcaagcaactcgacgaagcccagggcctggtctggctgaagccgacccgcttcaacaacacctatgccctggccatgcccgaggaacaggccgagcacctgggcatccagagcgtcagcgatctcgcgcgggtgctcgccgaacagcaggaggccgagcccgggagcacccacctgttcgccatggacccggagttcgccggccgccccgacggcctcggtcccatgagcgagctgtacggcctgcacttcacccgcaacgacatccgccagatggacgccgggctggtctacaccgcgctgaagaaccgccaggtgttcctcggcctcgtctacaccaccgacggccgcctgaaggatttcaagctgcgcgtgctgaaggacgacaagcagtacttccccttctacaacgccgccccggtggtgcgtaaggaggtcatgcagcgccatccggagttcgccacgctgttcgatccgatcatcgagcggctcgacgacgccaccatgcaggcgctcaacgcgcgggtcgatatcgagcagcagacgccacagaaggtcgccgccgacttcctccgcgaacaccacctgctcgacgacggccaggccggccagggaggtagccagtaa

SEQ ID NO: 322688 - DNA, 723 bp, Pseudomonas aeruginosa
atggtgaaaacctgtggcaaggccctgctcggcctctgcgccgcagccgccgtactggccttgctgatccactggatcacccccgcgaccatcctccactaccgcgaggacctgctgttctacttgcaggcccacctggtgctggtcttcagttcgatggcggccgccctgctggtcggcgtgccggccggcatcctgctcagccgtcccggcatgcaagcccaggccgaacgcctgatgcaggtgttcaacgtcggcaacaccatcccgccgctggcggtgctggccatcgccctggcgatcatcggcatcggcaacggcccggcaatcctcgccctgttcctcgcctcgctgctgccgatcgtgcgcaacacctacgagggcctgcgcaatgtctcgccggcgctgaaggaagccgccaccggcatcggcatgacgcccaaccaggtgctgctgcgggtggaactgccgaacgcggtgccgatcatcgtcggcggcgtgcgcgtggccctggcactgaacgtcggctccgcgccgctggcgttcctgatcggcgccaacagcctgggcagcctgatcttccccggcatctacctgaacaaccaccagcaactgctgctcggcgccgcctgcacggcgctcctcgccctgctgctggacgccctggtggtgctgttcagccgcatgttcctggaacgcggcctgaccgccaaggaggcctga

SEQ ID NO: 322689 - DNA, 1275 bp, Pseudomonas aeruginosa
atgctcgatctcgtcgcggcattcattgccttgaccaccttgctcacctacgtgaactaccgcttcatccgcctgccgccgaccatcggcgtgatggccacggcgctggtgttctcgctgatcgtccaggggctgtcggaactgggctatccgatcctcgaggtggagatgcaggaaatcatccgccgcatcgacttctccgaagtgctgatgacctggttcctgcccgcgctgctgttcgccggcgcactgcacgtcgacctctccgacctgcgcagctacaagtggccgatcggcctgctggccaccgccggggtgctgatcgccaccttcgtcatcggtggcctggcctactacaccttcccgctgttcggctggcaggtggatttcatctactgcctgctgttcggcgcgctgatctcgccgaccgaccccattgccgtgctcggcatcctcaagtccgccggcgcgccgaaaccgctggcgaccaccatcgtcggcgagtcgctgttcaacgacggcaccgcggtggtggtgttcgccatcatcctcggcatcctccagctcggcgaggcgcccacggtcagcgccacggcgatcctcttcgtccaggaagccatcggcggcgtggtcttcggtgcggtgctcggctacggcgtgttcgtgatgatgcgcggcatcgaccagtaccaggtggaggtcatgctgaccctcgccctggtcatcggcggtgccgcgctggccgcgcgcctgcacgtatcggcgccgatcgcgatggtggtggccgggctgatcatcggcaaccacggacgccactacgcgatgtcggacgagacccggcgctacgtggacaagttctgggaactgatcgacgagatcctcaacgccctgctgttcgccctgatcggcctggagctgctgctgttgccgttctcctggctgcacgtggcggcggccttcgccctaggcggcgcggtgctggtctcgcgcctgctcacggtgggcccggcgatcctggtcctgcgccgtttccgtggcgccaaccggcaggtaccggcgggcaccatccgcatcctggtctggggtgggctgcgcggcggcgtctcggtggcgctggcgctgtccctgccgttggggccggagcgcgacctgatcctcagcctgacctacatcgtggtgctggtatcgatcctgctccaggggctttccatcggcccgctggtgcgtcgtatctacgccggccagccgctggagaaaagcgagggggcgcactga

SEQ ID NO: 322690 - DNA, 246 bp, Pseudomonas aeruginosa
atgcactggctggactacctgcaatggcccgccatgctggtcacggtggtggccgcctggctggtggcgtcggcgcatcggcgaagacgcaaggtcggcttctgggtgttcctcgccagcaacctgctgtggatcgcctggggcctttacgcccaggcctatgcgctgatcctgctgcaggtctgcctggcggcgatgaacctgcgcggcacccatcgcaacgaagcgccacaggacagcgcctga

SEQ ID NO: 322691 - DNA, 900 bp, Pseudomonas aeruginosa
atgagcgatgccccgacctccccgcgcttcagcgccgccaccagcacccgcctgctcgaccatgcgcaactggaggcgctctgcgccgactatgacggcttccttctcgatctctggggcgtagtgatggacggcgccgaggcgttccccggcgcccttgcctggctcgcccggcggcacgccgaaggccgcccggtctggttcctcagcaactcgtccagcagcgtggtggaaatgagcgccgggctcgagcgcctgggcatccggcgcgactggttcgccggcatcaccacgtccggccagttgaccatcgacgccctgctgcaaaccgccgaataccggcgtggcggtatctacctggccggcgtcggcctggcccagcagagctggccggcggaaatccgcgagcgcttcgtcgaggacatcgcccaggcggcgctgatcgtcggcgtcggcagctttccccaggatgaactggaacagcgcttcgcgcccctgcgcggcgccaccgacctaccgttcctctgcgccaacccggaccgcgtggtggtttccggcggccgcacggtatacggcgcgggcatgctcgccgagctgttcagcgaggaaggcggccaggtcagctggtacggcaagcccgacccggcggccttccgcatcgcccagcggcaactggaagcgcgcggcgcgcggcacatcctgttcgtcggcgactcgctggtgaccgacgtccccggcgccctcgccgcgcgcatcgatacgctctggctgggcgccaccggcatccaccgcgaagccctgggcgccgagttcaacggagcactcgacgaggagcgggtcaggtcgctgctgcacggctatccgatccgaccgcactttgccgcgccagggctggtctga

SEQ ID NO: 322692 - DNA, 657 bp, Pseudomonas aeruginosa
atgcaccgttcaccgctcgcctggctccgcctgctcctcgccgccgtgctcggcgccttcctgctcggcggcccgctgcatgccgccgagactgccgccacgcgttcgccagcctgggcgcaagcggtcgacccgtcgatcaacctctaccgcatgagccccaccctctatcgcagcgcgctgcccaacgcacagagcgtcgcgctgctgcaacgcctgcaggtgaagacggtggtcagcttcatcaaggacgacgaccgcgcctggctgggccaggctccggtgcgggtgctcagcctgccgacccacgccgaccgggtcgacgacgccgaggtgctcagcgtcctccgccagttgcaggccgccgagcgcgaaggcccggtactgatgcactgcaagcacggcaacaaccgcaccggactgttcgccgccatgtaccgcatcgtcgtgcagggctgggacaagcaggccgcgctggaggaaatgcagcacggcggtttcggcgacgaggacgacatgcgcgacgccagcgcctatgtgcgcggcgccgacgtcgacggcctgcgcctggcgatggccaacggcgaatgcagcccgtcgcgcttcgccgtctgccatgtgcgcgagtggatggcccaggcgctcgaccggccgtaa

SEQ ID NO: 322693 - DNA, 387 bp, Pseudomonas aeruginosa
atgggcgaccgccttgccgtacccatccgctactacgccctggccgggatcgccgcggcgatcctgctcaacgtgctgctgcgcggggtggtccgcttcggcggcctgccggccagcctgctgatcgccgcgctggtcgccggcggcctggcctggtggttcgcccgcgcgcagcggcgctggccgacctggggcgagcgcttgcgcctggtcgccctgtatggcggagtgctcggggtcctttacctgctgctggtcggcctcgcctcgctgaaaggcgatcccagcccggcggcactgctcatcgtggtgctgcactacctgtgctatccggcgctgttgctggtgttcttctccggcagggtctatggattcttcctgcgctga

SEQ ID NO: 322694 - DNA, 831 bp, Pseudomonas aeruginosa
atgagccaacccgtcgccttcgtcaccggctgctccagcggcatcggccgcgccctcgccgacgccttccagcgcgccggctaccgggtctgggccagcgcgcgcaaggaggacgacgtgcgtgccctggccgaggccggcttccaggcggtgcaactggacgtcaacgacgccgccgcgctggcccgtctggccgaggaactgggagtcgaagccgccggcctcgacgtgctggtcaacaacgccggctacggcgccatgggtccgctgctggacggcggcgtcgaagccatgcgccggcagttcgagaccaacgtgttcgccgtggtcggcgtgacccgcgcgctgttcccgctactgaggcgcaagtccggcctggtggtgaacgtcggcagcgtctccggcgtgctggtcacgcccttcgccggcgcctactgcgcctccaaggccgcggtgcatgcgctgagcgatgccctgcgcctggagctggcaccgttcggcgtcgaggtgctggaagtgcagccgggcgccatcgcctcgaacttcggcgccagcgccagccgcgagatggacagcgtggtcgacgaacgctcgccctggtggccgttgcgccggcagatccaggcgcgcgccgcggcatcccaggacaatcccacgtccgccgaagacttcgcccgccagttgctagccgccgtgcagcgccgtccgcgcccgccgctggtgcgcatcggcaatggcagccgggccctgccggcgctggcccgctggctaccgcgcggcctgctggagcggctgctgaagaagcgcttcggcctcgacacgcgcctctga

SEQ ID NO: 322695 - DNA, 750 bp, Pseudomonas aeruginosa
atggaaacccgccgtctgttcgaccagggctccgctgcctacgccagcgcccgcccgcgttatcccgatgcgctctaccgccatctcgccgggctctgcggccagcgccggcgcgcctgggactgcgccaccggtaccggccaggccgcgctcggcctggcgcagtacttcggcgaagtcctcgccagcgacaccagcgcgcagcagatcgaacacgccgttgtccatccgggtatccgctacagcgtgcaggacgccgaagccaccgactatcccgacgccgccttcgacctggtctgcgtagcccaggcctggcactggttcgaccattcgcgcttcaaccgcgagctgctgcgcgtgctgcgtcccggcggcgtgttcgccgcctggggctacggctggttcagcatcgacgcgcagatcgatgccgccatcgacgaggaatacctgcgcccgatcggcccgtactgggcgcaacagaaccgcctgctgtggaacgcctaccgggatgtcgagctgccgctgggcgaactccccgcgccggccttcgtcatcgagcaacaatggagcctggcccggttgttcgactacatggccacctggtcggccagccgcctgtgccgcgaggcgcagggcaacgctttcgtgcgccaggccctgcaacgggtcgccgcgctctggggcgagccgacctcgacacgcagggttcgcatgccgctggcgctacggatcgcgcgcaaggacgcctga

SEQ ID NO: 322696 - DNA, 396 bp, Pseudomonas aeruginosa
atgatgttcgaacgcagccccgacgatccccttcccctggtctacgcctgctccggctgctccaacgtggcgcaactggccaacgatctcgcgctgcgcctggatcgcgcccggctggcggagatgtcctgcatcgccggagtcggcggcgacgtcccgctgctggtccgccgggcccgctccgggcgaccgatcctggccctcgacggttgcccgctgcattgcgtgaaaggctgcctggcgcgccacgaggtagtcccgaccctgcacctgaccctcagcgaacacggcctgaagaagcgctacggcgaggactgcgaggcgcaggacgccgagcgcctgttcgtcgaactggagcgtctgctgacgccgggcggcaagcgccgctgcgaatga

SEQ ID NO: 322697 - DNA, 660 bp, Pseudomonas aeruginosa
atgacggacatgccagccaccgccgacgaaccggttcgcctgctgctggtggacgaccatccgatgatgcgcaagggcgtcgcccagttgctcgaactggaagacgacctcagcgtggtcggcgaggccggcagcggcgaggaagccctgcgcctggccgccgagctggacccggacatgatcctgctggacctgaacatgaagggcatgaacggcctggacaccctgcgcgcgttgcgcgaggccggagtcgacgcgcgcatcgtggtgttcaccgtgtccgacgacaagggcgacgtggtcaacgtcctgcgcgccggcgccgacggctacctgctcaaggacatggagccggagcgcctgctcgagcacatccgccaggccgccaccggacagatgaccctcagcccgcagttgacccagatcctcgcccaggccctgcggggcgacgaccgctcgaagagcctcgacgagctgaccgagcgcgaacggcagatcctccgccagatcgcccacggctacagcaacaagatgatcgcgcgaaagctggacatcaccgaaggcacggtgaaggtccatgtcaagcgggtgctgcacaagctcggcatgcgttcgcgggtcgaggctgcggtgtgggcggtggagaacgacctggtgtga

SEQ ID NO: 322698 - DNA, 1869 bp, Pseudomonas aeruginosa
atgaacaaggcgaccgcgccggacgctgaccagcgggacagattctttggaggtagtgacagggccggaaagccgatcctgcgccgctccctggtagtccgcttcggctgctacctcaccctgctggtatcgctggcgctgatcgggatgttcagcgccctgctcttcgccgactacacgcaccaggacgccgcggtgatcaaccacgccggctcgttgcgcatgctcacctaccgggtcgccctggagcccagcctggaaggccgccaggcgctgctcgggaccctcggcgaacgcctcgacagcggcgacatccgccgcctgctgcaacgccaggacgccgacgacccgatccgccagttgcaccaggagctgcgcgagggcctcgcgcgcctggacccgcgcgcgctgcccggacgcgccgtgctggacgcctacgtcggcgacatcgaccgtttcgtcggcatcctccaggccaaggccgagcgccgctcgcaactgctcagcacggtgcagggcctgtgcctgttcctcagcctgctggtggtgttcgtcaccctctacgacctcagctatcacgtcatcggcccgctgcgcgaactcaccagcaccgcccgccgcctgggccgcggcgagctggacgcgcgggtcacctacagcggcgaggacgaactggcgcaactgggcgagcgcttcaaccagatggccggcgagctgaagagcatctacggcgacctggaagagcgcgtggaggacaagacccgcgccctctcgcagagccaccagcgcctcgaactgctctacgccagcgcccgccggctgggcgagaacccctacgacagccgcaccctgcaaccgctgctgaaccagttggagaaagtgctcgacgccggccgcgtgaccctctgcctgaacaaggacggggtcgagcgcgcctacagttcgctgaccaccaccgagcgcccggcggacttctgcctgcagggcgactgcggtagctgccgcgagcaggccagcgcctgcgaccaaccctcgtccctggcccagccattgctgatgcagcccctgtccatcgccggccaccgtttcggcgaactgttcatcgaaagccgcagcggccgcctggagaactggcagcagcaactgatcgagaccttctgcgacaacatcgcccgcaccttcgccctgtccctgcaacaggaacaggaaagccgcctggccctgttcgccgagcgcggcaccatcgcccgcgaactgcacgactcgctggcacagtcgctgtcctacctgaagatccaggtcagccgcctgggcaccctgctcaagcgcgaggcgccggcggagaagatcgaggacaccctcgacgaactgcgcgaaggcctcaacggcgcctaccggcaactgcgcgaactgctcaccaccttccgcctcagcctcgacgagccgagcctggaagccgcgctggggaacgccgtggccgagttcggcgagcgcggcgaggtgacgatcgaactggacaaccgcctgcaacacgtgccgctgagccccaacgaggaaatccacgtcctgcagatcgtccgcgaggcgctctccaacgtggttcgccattcgcaggcgcaacgggcctgggtgcgcctgagcagccaggccgacggccaggtgagcatcgccgtcgaggacgatggcgtcggctttgatccgcagcagaaccgcagcggccattatgggcttaccatcatgcaggagcgcggccagaccctcggcagccagttgcgcttcgaagcgcgcgcacctcacggcacgcgagtgctcttcagcttcgtgccgaccgccctgcaaccctccgccgccaaggagccgaccccatga

SEQ ID NO: 322699 - DNA, 435 bp, Pseudomonas aeruginosa
atgaacatgtttgcaacccaaggcggcgtcgtcgaactgtgggtcaccaagaccgacacctatacctcgaccaagaccggggaaatctacgcctcggtccaatccatcgccccgatcccggaaggcgcccgtggcaacgccaagggattcgagatcagcgaatacaacatcgagccgaccctgctggacgccatcgtcttcgaaggtcagccggtgctctgcaagttcgccagcgtggtccgcccgacccaagaccgtttcggccggatcaccaatacccaagtccttgtggatctgctggccgtgggcggcaagccgatggcgccgaccgcccaagccccggcccgcccgcaagcacaggcccaagccccgcgcccggcccagcagccgcagggccaggacaaacaagacaagtctccggacgccaaggcgtaa

SEQ ID NO: 322700 - DNA, 252 bp, Pseudomonas aeruginosa
atgtcaggcgttgtcgctgtgcaggtgtgtaccgcgtggacctcgacccccgagggcttcatggcgtgtcgcgaactcgcatggcaacaggcctacctgattccgcccgaggccgctggatacgtggacatcctggtcaacggtggtttctccccggaagccttcggcatcggtgccgctggcgtcctgggatcgttcgtgacggggcttttgattggctgggtcgcgtcacttcttcgtaaagccaagtag

SEQ ID NO: 322701 - DNA, 249 bp, Pseudomonas aeruginosa
atgaaagcaatgaagcaacgcatcgccaagttcagcccggtcgcctcgttccgcaacctgtgcatcgccggttccgtcactgccgcgacttcgctgccggccttcgccggggtgatcgacaccagcgcggtggaatcggcgatcaccgatgggcagggcgatatgaaggccattggcggttacatcgtcggcgccctggtgatcctggccgtcgccggcctgatctacagcatgttgcgcaaggcgtaa

SEQ ID NO: 322702 - DNA, 1299 bp, Pseudomonas aeruginosa
atgggtgactggatgagtaacaacgcacgttccggccttggccgacttcttccgctgctgggcctgctggtctcgttgctgtggcattccttggcgagcgcggacttctaccaatggcacatttccatccccggaaagcccacggccttctttccatcctatatggcggcgtgccagtactacttcgataacacgtcggccaactggataaaggaaatcaacaaactgagctacaaggaagttcagtgcaatgtttcgggtactggcggaatcacctggcagacgaagactgccatcttgactggcgatagctgccctccggaacaagaactcgatcccgccgatggcgcctgcaagccgccgcccgaagagtgcaaggaaggcgaactgtttccggccaagggcccggactcgcctgttgtcacctcgggcgggcggaactatgtcggcgacggcggcgcaccgagcgcctgttatcaaagctgcgagtacggcggcaaccccagcccggccagttgctatctggtcaaaggctccaccaccaccggcttctgcaattacatcctcaagggcaccggacagaattgcggtgccgattcctacaccttcgcgcagaccggcgattcgctgaacccacccgacaccccgaacaccgatccctccgacccgaacgatcccggctgcccgcccggctggtcgtggtcggggactacctgcgtcaagaccccgaccgatcccacggatccaaccgacccaaccacgccgggcggtgatggcgacggcggcggcgatggcaatggcaatggcggtggagacaacaacggcggcggcaacgacggcggcaccggcaatggcggcgacggcagcgggggaggggacggcaacggcgggggcgatggtagcggcgacggtgacggcagcggcacgggcggcgatggcaacggcacctgcgacccggcgaaagagaactgctccaccggccccgaaggccccggcggcgaactcaaggaacccacgcccggcacctgggatgacgccatcgccacctgggaaaagaaggtcgaggaagccaagaaagaactcaagaccaaggtgaaggccaacgtcgaccagatgaagggcgccttcgacctcaacctggcggaaggcggcgggcaactgccctgcgagcccatgaccatttggggcaagtcctactccctctgtatctccgactacgccggccaactctccagcctgcgcgtggcgctgctgctgatggccgcgctgatcgccgccctcattctgctgaaggactga

SEQ ID NO: 322703 - DNA, 357 bp, Pseudomonas aeruginosa
atggaatggctctccggttttctcgatcagatcatcgccttcttccagtggatctgggatttcttcgcccaaggcatctatgacttcgtgcgcgacggcctggtggtcgccaccaaggcgtcgatgtacgccgcgctccagaccctgatcctgctgatcgatgtcagctacaccgccgcccgcgaactgatcgacagcctcggcgtgccgcagatgatccgcagcatgtatgccgcgctgccggggccgattgcgtcggggctggccttcttcggcgtgccgcaggcgctgaacatcatcatggtcgcggcggcgacgcgcttctgcatgcgcttcgtgccgttcattgggaggtga

SEQ ID NO: 322704 - DNA, 1275 bp, Pseudomonas aeruginosa
gtgtcgatcaagatccaccacggccccaatggatcctacaagacctccggcgcgatccaggatgacgccgtgcccgcgctgaaagacgggcgggtgatcatcaccaacgtgcgcggcttcaccctggagcgggcctatcaggtcttcccggacctgcccaacacggcggaaatcatcaacctcgatctggagtcgctggaagacctcgaaaagatgcgcacgtggtttcagtgggcgccccgcggggccttcctgatcttcgacgaaacccaactgctgtttcccaagtcctggcgggaaaaagacctcgaacgcttcgactaccccggtggaccggaagcggcccacgcggccgaccgccccatgagctggctcgacgcctggacccggcaccggcatttcaactgggacattgtcctcactacgccgaacatctcctacatccgcgacgatatccgcatgacctgcgagatggcctacaagcattccaacctcgcggtgatcggcatccctggccgctacaaggaggcccagcatgacgcccaactcaaccgtccgcccgccgatggcaccatcatcgagtacaagcggatccgaaagcagaccttcgccctctaccagtccacggccaccggcaagacccaggacaccaaggcgggcaagagcctcttccggtcgcctaagctggttcttctactggcattgctggccggcactattggctttgtctggtatatggggcctctgcgcacgattggcggtccggctgctgcgacacctgccgacgctcctggcgaccctgctcaagcccctgctgcgcccgctgctgtggctgctccagcgggtcctgctgcgaatagctttcttcctcctgggcttgtacctgatgggcctgctgctgcgcctgttgatctgaacgcccatcccttcgccgatcggcggatctccatccttgcccacgcctaccgcaagtcgcggggcgatatctacctgttcgccctggaggatcccacgggccggcgcctggaactcaccagctggcaactgatcggctccggctaccgggtgacgcccaagggcgagtgcgtcgtagagcttcgctatgaggactggaaacagaccgtcacctgtgccgggaggcaggccggcgcggtggccagcatcgctccggcagcgcctgtcgccgcgtccgcagacgcaccggccaggggccagtcgccgctgaccatcgtccccgattccgaatacgcctcgcggccctggaggcacaaatga

SEQ ID NO: 322705 - DNA, 1293 bp, Pseudomonas aeruginosa
atgaagactccgatccatccaacccgactggtcctcgaagaaaacggggatttccacaagtccccgaaggggatgcttttcatggacccgctcaatggacagttcaccgacttgtcaggcgtgcggatcctgcggtgcggcgtggacaccgtgcggcagttgtacaacggcaagttgcgcccggaagtcatggcgctgtttgacctgtcggtggatgtggtcgagttcgccggctacgaatggtccaagggccgtatcggtcgcgactctggctatcagtaccgcctgcagaacgccgaaatgggcctgatcctgctgatcaagaaccacaacatcaaggtcgacaccattggctcgcacctcaagatcgaagtgtcgcctcacgccattgacggcgccgacccgcgtatccttcagggagtgctggatgacctggccgcagcggtgctgagtcactgtgagaccaaccaagcagccgtgcatatcgcgctggatgtgcagggctggacgcctccggctgatctcgttgatcgcatgcactgccgctcgcgtcgggtacggcaaatcagtgggatcgagcggatcgagttcgacggcaacgcctcggtctacgggcgtggcgagacgtacatgttcggctcggccaacggcctgcaactgtcgatctataacaagaccctccaggctcgggccaccgacaagctcgactattgggaaagcgtgtgggcgaccctgaacggggatccgttcggtgatggcgacccggcctataaccccctggaaacggtgtggcggatcgagtttcgctatcaccactccatcgtccagcagttctccgaaggctcgcgtatggcctcgggggaggtcatcggctgccgcacctacgagggcctttgcccgcatctacaggggctgtggaactatgcctgcgaggcattccgtgtgctctcccgggagggcatgtatgacgccttctggagcctgatcagccaggacgcccgcgtccaggtcgagtgcgatccgctgatcgagcgcaccgagtatcggcgctattacaagaccgccaagggctttagcgggcgcaactgcgagatgttccttggccagttcgtgagcctgatcgcgcgggagcgtgtcccggcaaaaaaggctattgagtccgcccgtaaactggagttctggcacgttatcgaagaccactatctcgccaagggttggactcgtcgcgatctggaaaggcatatccacaagctcatgtgtgatcgctatctgcgcaagggatatgcgatatga

SEQ ID NO: 322706 - DNA, 1008 bp, Pseudomonas aeruginosa
atgacggtacgcaaggacggcaagacgtggacggctgacttctatgagaatggtcgttccgggcgcaggattcgcaagaaaggcttcgccaccaagtctgccgcgattcgctatgagcaggattttttcgccgtgaagggcgagacgggccgaccgctggatgaccgtctctccgatctggtgaaggtttggtatgacctccacggctgcaccttgaaggatggcaagcaacgcttggcgcgctgcgaggcgctggcgaagcggctagggaaccccttggcgttcgagttcgattcgttggcgtgggcacgctaccggcaacgtcgcttgaccgaggtgaagcctgagacggtcaatcacgagcaacgctacttgtcggcggtcttctctgaactgattcgcctgggctcctggcacaaggaaaacccgctgggcaaggtccggcaaatcaagacggatcaggtcgaactgacgtttctgtccctggatcaggtcgctcgactgctggaagagtgcaaggccagtacgaacaaccatacctatccggtcgcgctgttgtgtctcgccacgggagcccgctgggaagaggcggaaagcctgacgcggggcgctgtgcatggcggcaaggtgcactatcaccggaccaagaatcggcagagccgatcagtgccgatcccggacgagttggagaggttgatattcaaggtgggcatgcctggatctggccgcctgttcatgtcttgccgcgccgcgttccgctgcgcctatcagcgttgcgggttccagacgccgggccagatgacccacattctccgccataccttcgccagccactacatgatgggaggtggggacatcctggccctacagcggatcctcggtcactcctcgatcaccatgactatgcggtatgcgcatctgtcgccggaacatttggagtcggcacttcgactctctccccttacacagtgcgggtatctttcagaccatgatcaaccgctttcttga

SEQ ID NO: 322707 - DNA, 438 bp, Pseudomonas aeruginosa
atggaaaacaaaatcccgcttcccacggatagcctgtacaagtttgtcgcgctcttctctatgaccattcttatcggggctttttatctaaccttctatgctggtgagagttcaaatgcggtggtttacgagaactggagcgagcttgcttcactgcaaagcttagaaaagccaaatgctgaacaggccgctagaaaggagatgttggaaagaaagattgaaatcgcagtagaaaaccgaaagacgctcgttaagcttgctgcctttctggcaggggtaggtaccttaggggtctacgttggctttgcgttctggatacgcaagcaacagaaagtcgctgatcaaatcgctgagaaccagcttgagctttctaggcttcagctactggcgttgcgccatgaactcaagagtaaaggtgtagaggtagacacgctgtag

SEQ ID NO: 322708 - DNA, 1101 bp, Pseudomonas aeruginosa
atgggattcaactgcggcatcgtcggcctgcccaacgtcggcaagtccaccctgttcaacgccctgaccaaatccggtatcgcggcggaaaacttcccgttctgcaccatcgagccgaacagcggcatcgtgccgatgcccgacgcgcgcctgaacgccctggccgagatcgtcaagcccgagcgcgtactgcccaccacaatggaattcgtcgacatcgccggcctggtggcgggcgcctccaagggtgagggcctgggcaacaagttcctcgccaacatccgcgagaccgacgccatcgcccacgtggtgcgctgcttcgaagacgacaacgtgatccacgtgtccaacagtgtcgaccccaagcgcgacatcgagatcatcgacctcgaactgatcttcgccgacctcgacagctgcgagaagcaactgcagaaagtcgcccgcaacgccaagggcggcgacaaggaagccctggcccagaaggccctgctggaaaagctcatcccccacttcaccgagggcaagccggcgcgttcgctgctgaagaacctcggtgacgaggagaagcgcctggtgcgcagcttccacctgctgaccagcaagccggtgatgtacatcgccaacgtcgccgaggacggcttcgagaacaacccgcacctggatgtggtgaaggccatcgccgaggaagaaggcgcggtggtggtgccggtgtgcaacaagatcgaagccgagatcgccgagctggaagacggcgaagagaaggacatgttcctcgagtccctcggtctcgaggaacccggcctgaaccgtgtgatccgtgccggctacggcctgctcaacctgcagacctacttcaccgccggggtgaaggaagtccgcgcctggaccgtccgcgtcggcgccaccgccccgcaggccgccggcgtgatccacaccgacttcgagaaaggcttcatccgcgccgaagtggtcgcctacgacgacttcatccagttcaagggcgaacagggcgccaaggaagccggcaaatggcgcctggaaggcaaggactacatcgtcaaggacggcgacgtgatgcatttccgcttcaacgtgtaa

SEQ ID NO: 322709 - DNA, 585 bp, Pseudomonas aeruginosa
gtgactgccgtacaactgatcgttggcctgggaaacccgggtcctgaatacgaccagacccggcataacgcgggggcccttttcgttgagcgcctggcgcatgcccagggcgtcagcctcgtggctgaccgcaagtatttcggcctggtcggcaagttcagccaccagggcaaggacgttcgtctgttgatcccgaccacctacatgaaccgcagcggccagtccgtggcggcgctggtgggattcttccggatcgccccggacgccatcctggtggcccacgacgaactcgacatgccccctggcgtcgccaagctcaagaccggcggcggacacggcgggcacaacgggttgcgcgacatcatcgcccagctcggcaatcagaattctttccatcgcctgcggcttggcatcggccatccggggcacagcagcctggtttccggttacgtgctcggccgcgccccgcgcagcgagcaggaactgctcgacaccagcatcgacttcgccctcggcgtgctgccggaaatgctcgccggggactggacccgggcgatgcagaagctgcacagccagaaggcctga

SEQ ID NO: 322710 - DNA, 615 bp, Pseudomonas aeruginosa
atggtcgactttattctgaatgcccaagtgcgttccgatctggggaaaggtgcgagccgccgcctgcgtcgtaacgccggtctggttcctgctgtcgtttacggcggcgacaaagagccccagtccgtaaccctggaactgcgcgaaatcgccaagctcctggaaaacgaggctgccttcagccacgtgatcgccctgaacgttggcggcgccaaggaaaccgtactgatcaaggccctgcagcgccatccggcgaaaggcttcgtgatgcacgccgacttcctgcgcgtggtcgccgaccacaagctgaccgcccacgtaccgctgcacttcatcaacgaagaagtagccgttggcgtcaagcaagccggtggcgagatctcccacaccatctccgaagtcgaagtttcctgcctgccgaaagacctgccggaattcatcgaagtcgacatggccaaggtcgagctgggccagatcgttcacctgtcggacctcaaggctccgaaaggcgtcgagctggtacaactggcccacggcaacgacctggccgttgccaacatccacgcttcccgcgtggtgaaggaagaaggtagcgaagaaggcgccgccgagtaa

SEQ ID NO: 322711 - DNA, 942 bp, Pseudomonas aeruginosa
gtgtccaagatgatggtcttcacggggaacgctaaccccgatcttgcacgacgcgtcgtgcgtcagctgcacattcctcttggcgatgtttcagttggcaaattctccgatggcgaaatcagcgtcgaaatcaacgaaaacgtccgcggcaaggacgtattcctgattcagccgacctgcgcgccgaccaacgacaacctgatggaactggtggtgatggccgatgccttccgccgctcctcggccactcgtatcaccgctgtcatcccctacttcggctatgcccgccaggatcgccgtccgcgttccgcccgcgtggccatcagcgccaaggtagtggccgacatgctgaccgtcgtcggggtcaaccgtgtcctcacggtcgacctgcacgcggatcagatccagggcttcttcgatatcccggtagacaacatctacggttcgcccgtgctggtggacgatatcgaagaccagcgcttcgagaacctgatgatcgtctccccggacatcggcggcgtggtgcgcgcgcgcgccgtggccaaatccctgggcgtggatcttgcgatcatcgacaagcgtcgtcccaaggccaaccagtccgaagtgatgcacatcatcggtgacgtcgaaggccgtacctgcgtactggtagacgacatggtcgataccgccggcaccctcggtcacgccgccaaggccctgaaagagcacggcgccgccaaggtcatcgcctactgcacccacccggtgctgtccggccgtgccatcgagaacatcgagaaatccgtactggacgagctggtggtgaccaacaccatcccgctgtccgccgctgcccaggcctgtggccgcatccgccagctggacatcgctccggtcgttgcggaagccatgcgccggatcagcaacgaagaatcgatcagcgcgatgttccgctga

SEQ ID NO: 322712 - DNA, 849 bp, Pseudomonas aeruginosa
atgagcgtgcgcctcagcctgccagccccggccaagctcaatctgttcctgcatatcctcggccgccgcgacgatggctatcacgagttgcagaccctgttccaattcctcgaccacggcgacgagctgcatttcgaagcccgccaggacggccaggtacgcctgcacacggaaatcgccggggtgccgcacgacagcaacctgatcgtgcgcgccgcgcgcgggctgcaggaagcctccggcagcccgcaaggcgtcgacatctggctggacaagcgcttgcccatggggggcggcatcggcggcggcagctccgacgccgccacgacgctcctggccttgaaccatctctggcaactcggctgggacgaggaccgcatcgccgccctgggcctgcgcctgggcgccgacgtgccggtcttcacccgcggacgcgcagctttcgccgagggcgtgggcgaaaagctcaccccggtggacatcccggagccctggtatctcgtcgtggttccgcaagtacttgtcagcacagcagaaattttttcagatccactgttgacacgcgattctcccgccattaaagtgcgcaccgttctcgagggggacagccgaaacgactgtcagccggtagtggagaggcgttacccagaagttcgtaacgctttgatcttgctaaacaaatttgtttcagctagattaaccggcactggaggttgtgtgtttgggagcttcccaaacaaagctgaagctgataaagtctcggcccttcttccagaccaccttcagaggttcgtcgccaaaggaagcaacatctcgatgttgcaccggaagctggaaactctggtctga

SEQ ID NO: 322713 - DNA, 618 bp, Pseudomonas aeruginosa
atgcgtctacgtcttttcctcgccgcctccgcgctggccctgctcagcggctgcgccggcctgacctcccacgaagccctggaaggccagggcgatgcgcagacctggaaaacccacaagcagcaactcagcgagctggatgcctggcagatcgacggcaaggtcggcatccgcgccccgcgcgactccggcagcggcaccctgttctggctgcagcgccagggctactacgacatccgcctgtccggcccgctcggccgcggcgcagcacgcctgaccgggcgtgaaggcgcggtgagcctggaagtcgccggtcagggccgctaccaggcggagtccccggaagcactgctggaagaacaactaggctggcgcctgccggtctcgcacctgctctggtgggtacgcggcctcccggcgccggacagcaagagccgcctgaccctcgacgccgacagtcgcctggcgcgcctggaacaggacggctggcagatcgaatacacccgctacgccgaacagaacggctactggctacccgagcgcctgaagctgcacggccaggacctcgacgtcaccctggtgatcaaggactggcagccgcgccagctcggccgctga

SEQ ID NO: 322714 - DNA, 1728 bp, Pseudomonas aeruginosa
atgaacaaatcccttgcgctgctgaccgtcacgctgctgctcggcggctgccagtcacttatccacaagactcccgatggcaccccgccggtggaagacaccgcggtcgagaccaaggccaagccggaaaagtacggctccttcagcgaggacagcctgtattcgctgctggtggccgaactggccgggcagcgcaaccgcttcgacatcgccctgagcaactatgtggtgcaggcgcagaaaacccgagaccccggagtttccgagcgcgccttccgcatcgccgaatacctcggcgccgaccaggaagccctcgacacctccctgctctgggcgcgcagcgcgccggacaacctcgatgcccaacgcgccgccgcgatccagttggcccgcgccgggcgctacgaggagtccatggtgtacatggagaaggtcctcaacggccagggcgacacgcacttcgacttcctcgccctgtctgccgcggagaccgacccggatacccgcaccggcctgctgcagagcttcgaccacctgttgaagaaatacccgaacaacggccagttgctgttcggcaaggccctgctgctgcaacaggacggccgcccggacgaagccctgaccctgctcgaggacaactccgcaagccgccacgaagtcgccccgctgctgctccgctcgcgcctgttgcagagcatgaagcgcagcgacgaggccctgccgctgctcaaggccgggatcaaggaacacccggacgacaagcgcgtgcgcctcgcctacgcgcgcctgctggtggagcagaaccgcctggacgacgccaaggccgagttcgccggactggtccagcaattccccgacgacgacgacctgcgtttctccctggcgctggtctgcctggaagcccaggcctgggacgaagccaggatctacctggaagaactggtcgagcgcgacagccacgtcgacgccgcccacttcaatctcggccgcctcgccgaggaacagaaggacaccgcgcgcgccctcgacgagtacgcccaggtcggcccgggcaatgacttcctcccggcgcaactgcgccagaccgacgtcctgctcaaggccggtcgcgtcgacgaagccgcccagcgcctggacaaggcgcgcagcgagcaacccgactacgccatccagctgtacctgatcgaagccgaggcgctgtccaacaacgaccagcaggaaaaggcctggcaggccatccaggagggtctgaagcagtacccggaggacctcaacctgctctacacccgctcgatgctggcggagaagcgtaacgacctggcgcagatggaaaaggacctgcgcttcgtcatcgcccgcgagccggacaacgccatggccctcaacgccctcggctacaccctggccgaccgcactacccgctacaccgaggcgcgcgagctgatcctcaaggcgcacaagttgaacccggacgacccggcgatcctcgacagcatgggctggatcaactatcgccagggcaagctggcggacgccgagcgctacctgcgccaggcgctgcagcgctaccccgaccacgaggtcgccgcgcacctgggcgaagtcctctgggcccaggggcgccaggacgacgcccgagccatctggcgcgaatacctcgacaagcagcccgacagcgacgtgctgcgccgcaccatcaagcgcctgaccggcgccgagactccttga

SEQ ID NO: 322715 - DNA, 1269 bp, Pseudomonas aeruginosa
atggccttcattgccctcggcatcaatcacaagaccgcctcggtggctgtccgcgagcgcgtggctttcactccggaacagatggtcgaggcgctgcagcagctctgccgcctgaccaccagccgcgaggcggccatcctgtcgacctgcaaccggagcgaactctacctggagatcgaccatccgaccgcggacgacgtgctcgcctggctggcggactaccatcgcctgactctcgacgagttgcgcgcctgtgcctatgtgcaccaggacgaagacgcggtgcgccacatgatgcgcgtggcctccggcctcgactcgatggtcctcggcgagccgcagatcctcggccagatgaagtcggcctacgccgtcgcgcgcgaggccggcaccgtcggtccgctgctcggccgcctgttccaggccaccttcagtacggcgaagaccgtccgcaccgataccgccatcggcgagaacccggtgtccgtggcgttcgccgcggtgagcctggccaagcagatcttcagcgacctgcaccgcagccaggcgctgctgatcggcgccggcgagaccatcaccctggtcgcgcgccacctgttcgagcaaggcgtgaagcgcatcgtggtggccaaccgcaccctggagcgcgccagcctgctcgccgagcagtttggcgcccatgcggtgctgctttcggagatacccgaggagttggccaacagcgatatcgtcatcagctccactgccagccagttgccgatcctcggcaagggcgccgtggagcgcgcgctgaagcagcgcaagcacaagccgatgttcatggtcgacatcgccgtgccgcgggacatcgagccggaagtcggcgaactggacgacgtctacctctatagcgtcgacgacctccacgaagtagtggcggagaatctcaagagccgccagggcgctgcccaggccgccgaggaactggtcggcagtggcgtcgccgagttcatgcagcgcctgcgcgaactggccgcggtggacgtgctgcgcgcctatcggcagcaggccgagcgcctgcgcgatgaggagctgggcaaggcccagcggcaactggccaacggtgccgaccccgccgaggtgatggcccagctggcccgcggcctgaccaacaaactgctgcacgcgcccagcgtgcagatgaagaaaatgtccgccgagggccgcatcgacgcgctggccctggcccaggagctgtttgccctcgacgagggcgcgccgcgccactga

SEQ ID NO: 322716 - DNA, 1083 bp, Pseudomonas aeruginosa
atgaaagcttctctgctgaaaaagctggatgtcctcagcgatcgctacgaagaactgacggcgctgctcggcgacgccgaggtgatcagtgaccagacccgcttccgcgcctattcccgcgagtacgccgaggtcgaaccggtgatcctggcgttccgcgactaccgcaaggtgcaggccgacctcgagggcgcccaggcgttgctcaaggacagcgacccggagttgcgcgacctcgccgaggaggaggtcgccgaagcgcgcggccgcctcgccgccctcggcgacagcctgcagcgcatgctgctgccgaaggatcccaacgacagccgcaacgtgttcctggagatccgtgccggcaccggtggcgacgaggcggcgatcttctccggcgacctgttccgcatgtattcgcgctacgccgagcgccagggctggcggatcgagacgctgtcggagaacgagggcgagcacggtggctacaaggaagtgattgcccgggtcgagggcgacaacgtctacgccaagctcaagttcgagtccggcgcgcaccgcgtgcagcgggtgccggaaaccgaatcccagggccggatccacacttccgcctgcaccgtcgcggtgctgccggagccggacgagcaggcagcgatcgagatcaacccggccgacctgcgggtggacacctaccgttcctccggcgccggcggccagcacgtcaacaagaccgactcggcggtgcgcatcacccacattcccagcggcatcgtggtcgagtgccaggaagagcgctcgcagcacaagaaccgcgccaaggccatggcctggctggcggccaagctcaacgaccagcagcaggccgcggcgcagcaggcgatcgccagcacgcgcaagctgctggtgggctcgggcgaccgctcggagcgcatccgtacctacaacttcccgcaagggcgggtcaccgaccatcgcatcaacctcaccctgtactccctgggcgaggtgatggagggcgcggtggaacaggtgatcgagccgctgctgcaggaataccaggccgatcaactggcggccctgggcgactga

SEQ ID NO: 322717 - DNA, 831 bp, Pseudomonas aeruginosa
atgaccactatctgtacccttctcaaggattcccaactgcccgattcgcccagcgcccggctcgacaccgagttgctgctggcggcggcgatgggcaagccgcgcagcttcctgcgtacctggccggagcgcatcgtgccgcgcgaggccaacgagctgttcgacgactggatcgcccgtcggcgcaacggcgagccggtggcctacatacttggccaccagggcttctggagcctggacctggaggtcgcgccacacaccctgatcccgcgcccggacaccgaactgctggtggaaaccgcgctggcgaccctcgcggcggacaccgctaccgtgctcgacctgggcaccggcaccggcgccatcgccctggccctggccagcgaacggccgctgtggacggtgactgcggtggaccgcgtggaagaggccgtggcgctggccgagcgcaatcgccagcggctgctcctggagaacgtcgaggtgcgccgcagccactggttctccgctctcgatggccgacgcttccggatgatcgtcggcaatccgccgtatatccctgccagcgatccgcacctgagcgagggcgacgtgcgtttcgagccgaagagcgcgctggtcgcgggtagcgatggcctcgacgatatccgccagatcgtcgcccaggcgccgcagcatttgctggacgagggctggttgctgctcgagcacggctatgatcaaggggcggctgtgcgcgaactgctcggcgcccgcggcttcgccggggtacatacgttgcgcgacctcggcggcaacgagcggatcactctcggacaatgggcatgctga

SEQ ID NO: 322718 - DNA, 759 bp, Pseudomonas aeruginosa
atgctgagcgacgaggaactgctgcgctacagtcgccagatcctgctggcgcaggtcgacgtcgagggccagctgcgcctgaagcgcagccgcgcactgatcgtcggtcttggcggcctgggttcgccggtggcgctgtacctggccgcggccggggtcggcgagctgcacctggcggatttcgatacggtcgacctgaccaacctgcaacggcaggtcatccacgatggcaccagcgtcggtgtcggcaaggtggagtcggcgatgcgccggctgggcgcgctgaatccgcagatccgcctggtcagccatagcgccgcgctggacaaggactccctcgatgccgccgtggcggcggtcgacctggtgctcgactgcaccgacaacttcgccacccgcgaggcggtcaacgtcgcctgcgtgcgcgccggcaagcccctggtcagcggcgcggcgatccgtctcgagggccagctttcggtattcgatacccgccgcgacgaaagcccctgctaccactgcctctacgggcacggcagcgaggccgagctgacctgcagcgaggccggcgtgatcggtccgctggtggggctggtcggtagcctgcaggcgctggaggcgctcaagctgctggccggtttcggcgaaccgctggtgggccgcctgctgctggtggacgccctcggcacgcgcttccgcgaattgcgggtgcgtcgcgatccttcctgtgccgtctgcgggcaacgccatggcggttga

SEQ ID NO: 322719 - DNA, 798 bp, Pseudomonas aeruginosa
atggcggttgagtcggccgcggtcggcgttttcgattccggggtcggcgggctcagcgtattgcgtgagattcgcgcgcgcctgccatccgaatcgttgctctacgtcgccgacaacgcccatgtgccctacggcgagaagagcgcggagtacatccgcgaacgctgcgagcggatcggtgatttccttctggagcagggcgccaaggctctggtactggcctgcaataccgcgacggctgcggctgcggcggaattgcgcgaacgttatccgcaggtgccgctggtggccatggagccggcggtgaagccggccgcggcggccacccgcaacggtcgggtcggcgtcctggccaccaccggaactctgaagagcgcgcgtttcgccgccttgctcgaccgcttcgccagcgacgtacaggtcttcacccagccctgcccggggctggtcgagcgcatcgaagccggcgatctctatgggccgcaaacccgggcactgctggaacgcctgctggcgcccatcctcgaacagggctgcgatacgctgatcctcggctgtactcattatcccttcgtcaaacccctgctggccgagctgatcccggcggagatggcggtgatcgatacgggagcggctgtcgcccggcagttggagcgcgtattgtcggcgcgggcgctactggcctctggccaggccgcgacgccacgtttctggaccagcgcgctgccggaggagatggaaaggatcctgccgatcctctggggaagcccggaaagcgtaggaaaattagtcgtttag

SEQ ID NO: 322720 - DNA, 522 bp, Pseudomonas aeruginosa
atgaagaaactacttccgctggccgttctggccgcactttcctccgtccacgtggcgtccgcccaggcggcggacgtctcggccgccgtcggtgcgaccggccagtcgggcatgacctatcgcctgggcctgagctgggattgggacaagagctggtggcagacctccaccgggcgcctgaccggctactgggatgcgggctacacctattgggaaggtggcgatgaaggcgccggcaagcattcgctgtcgttcgctccggtattcgtctacgagttcgccggcgactcgatcaagccattcatcgaggccggtatcggcgtggcggcgttctccggcacccgtgtcggcgaccagaacctgggttcctccctgaacttcgaagaccgcatcggcgccggcctgaagttcgccaacggccagtcggtcggcgttcgggcgatccactattccaacgccggcctgaaacagccgaacgacggtatcgagtcctacagcctgttctacaagatcccgatctag

SEQ ID NO: 322721 - DNA, 1431 bp, Pseudomonas aeruginosa
atgaacctgatctggtttcgctgcgacctgcgaaccaccgataacagcgcgctcctcgccgccgccgatgggcgcccttgcgtggctctctacctgctcagcccggcgcagtggcgggaacacgacgatgcgccctgcaaggtcgacttctggctgcgcaacctgggcgagctgcaacgccagctcgccgcgctgaacatcccgctgctggtgcgcgactgcggccactggcggcaagccccggaagtcatcggccggctctgtcgggagctgggagtcggcgcggtacacgtcaaccaggaatacggggtgaacgaggaacgccgcgaccaggccgtcggccaacgcctgcgtgaacagggcgtggccttccacagccacctcgaccagctgttcttcgcccccggctcggtgctgacccgaactggcggctatttccaagtgttcagccagttccgcaaggtctgccacgaacggctgtaccaggccctgccgggtgtccgcccgcgtccgcagccccagccaccgcacgcgctggccagcgacccgctgccggatgccgtgcccgccttcccgcggccggccgatagcttgcgccgcctctggccggcaggcgaagaggtagcgcaggaacgcctgcgcgacttcgccgaccagcacctggccgactaccatgaacggcgcgacttcccggcgcttcccggcaccagccaactgtcgccctacctggccgccggcgtactctcgcccaggcaatgcctggacgccgcgctggttgccaaccgcggcgagttcagcggcggccagcaaggcgccgcgacctggatcaacgagctgctctggcgcgagttctacaagcacatcctggtcggctacccccgggtctcccggcaccgccccttccgcgaggagaccgaagccctgcgctggcgccaggccccggcggaactcgaagcctggcaacaggggcgcaccggcataccgatcatcgacgcggcaatgcgccagttgctcgccaccggctggatgcacaatcgcctgcggatggtggtagcgatgttcctcagcaagaacctgctgatcgactggcgcgaaggcgaacgctggttcatgcgccacctcatcgacggtgacctggcggcgaacaacggcggctggcagtggagcgcatccaccggcaccgacgcggtcccctacttccgcctgttcaatccgctctcgcagtccgaacgcttcgatccacgcggcgagttcatccgccactggctgccggaactggccggcctggagcgcaaggcgatccacgatccgtccagcctggggctgttcgccggggtcgactatccacggccgatggtcgacctgaaggccagccgcgaacgggcgctggcggctttccgcaacctgccgccgcgcgatggtcgcgcgtag

SEQ ID NO: 322722 - DNA, 900 bp, Pseudomonas aeruginosa
atgaactcgccccacctcgaacgcggcggcctgccgatccgcgaagtcactcgtctgaccggcgtccatccggtcaccctgcgcgcctgggagcgccgctatggcctggtggtgccacaacgcaccggcaaggggcaccggctctacagcgaagagcaggtcgagcgcatccgccggatactcgtctggctcgagcgtggcgtcgccatcagccaggtgcgcgcgctgctggagcgtccggaggaaaccccggcggcggatgtcgaatctccctgggaacgcctgcacgaacagctgctggacgccatcgccgcgctggccgagcgacgcctcgacgatctgttcaaccaggccgcgtcgctctatccggtagcgaccctctgcgaaaagcttctgcaacccttgctgcagcacctcgaacgacgctggcagggacagttcggcgcgcgcatggagcgggccttcttcttctcctggttgcgcagcaagctgggcgcccgcctttatcaccagcaacggctgcaacagggcacaccgctgctgctggtcaaccagtccgagctgtcgctggaaccgaacctctggctgtgcagttggttgctcggcagcggcgaggtgccgctgcaggtcttcgactggccgctgccaccggccgaactggccctggcctgcgaacgcctggaagctcgcggcgtgttgctgtacgccagtcatcgcctcaatccagagcacctgccgcgcctgctggcaggggtgagctgcccggtggtgctggtcggaccggccgtggagatccagcgcgaagccttcgaaaccttggcgctaactggcctgctgctggcgagcacgcccctagaagcccgccgcctgctcggcgaacgaggcctgttgaacccatga

SEQ ID NO: 322723 - DNA, 957 bp, Pseudomonas aeruginosa
atgcacgaatctcacccttccctgacgccccgactcggcatcagcgcctgcctgctcggcgaaccggtgcgcttcaacggcggccacaagcgatccgcgctttgcgaggaactggcgcggcacgtcgagttcgtctccttctgcccggaacaggccatcggcctgggcacgccgcgcccggcgattcgcctggaaggcactccggaagccgccgaggcgcggagccgcgacggcctggcggtcggcggagcgctcgccgaatatgcgcggcgggtggcgcaacgggcggatacgctggacggtttcatcttcatgcaacgctcgccgtcctgcgggctgcaacgggtcaaggtctatccagaaggcggcggcgcgccgcgcgccgaaggccgtggacgcttcgccgcagccctttgcgaagccttgccggagctaccggtggaagaagaaggccggctgcacgatccggtcctgcgggagaacttcctcacccgcgtgtatgcccatgcccactggcaggccctgcgccagcgcggcctcagccattcggccatcgtcgccttccatagccgctacaagtaccagttgctggcccattcgccggagcactaccgcagcctcggccgcctgctcggcgaagccggccactaccagccggaagccctcggcactcgctacttcggcgagctgatgcagggcttgcgccgctgcgcgacccgcggcagccatggcaacgtgttgctgcacctgagcggctacctgaaacgcgacctcgcaaccgaagacaggcgtgaattgcgcgagctgatcgagcaataccggcatggcagcgtgccgctggtggtaccgctgaccctgctaaagcaccacttccgtcgccacccgcatgcatacatcgcccagcaggcctacctgcaaccgcacccgaccgaactcggcctgcgcaacgcgctctag

SEQ ID NO: 322724 - DNA, 984 bp, Pseudomonas aeruginosa
atgagcgtccccatcgccatcatcggtactggcatcgccgggctttccgccgcccacgcattgagatccgccggccagaccgtacaactgttcgacaagggccacggcagcggcggccgcatggccagcaagcgcagcgaggccggcacgctggacctcggcgcgcaatacttcaccgcccgcgaccggcgcttcctcgacgccttgcaacactggcgcgaggaaggctgggtggacgagtggaaacccgctctctaccaataccgcgacggccagctgagcccctccccggacgagcagccacgctgggtcggcatcccacggatgagtgcgatcacccgcgccctgctcaccgatctgcaagtggtcttctcctgccgcatcaccgaggtcttccgcggcaagcagcactggcacctgcaggacgccgagggacagaaccacggtccgttcaaccaggtcctgatcgccatccccgctccccaggccacgccgctgctggccagcgtgccgaaactggcggccaccgccgcgagcgtggtcatggagccgacctgggcggtggcgctgggcttccgcgaggtactcgacaccccggtgcagggctgcttcgtgcacgacagtccgatcgcctggctggcctgcaatcgcagcaagccggggcgcgacaccaccctcgacacctgggtgctgcacgccaccagccagtggagccggcagcacatcgacatggccaaggaggacgtggtcgagcacctgcgctgcgccttcgccgaagtgatcggctgcgccgtaccggaagccgccttcagcatcgcccaccgctggctctatgcacgcccggcggaggcccaccagtggggcgccctcggcgatcccgacctgggcatctacgcctgcggcgactggtgctccagcggccgcgtcgaaggcgcctggctcagcggccaggaagccgcgcggcgcctgctggaacatctctga

SEQ ID NO: 322725 - DNA, 918 bp, Pseudomonas aeruginosa
atgcacattctcttgaccggcggtaccggcctgatgggtcgccgcctgtgcgcccgctggcgacaggccgggcaccggctgaccgtgttcagccggcggccgcagcaggtggaatcgctgtgcggcgtcggcgtgcgcggcatcgatcgtttcgacgagtacggcgaccagccgctcgacgcggtggtcaacctggccggcgagccgatcgcggacaaaccctggagtcacaagcgcaaggcgctgctgtgggaaagccgggtacgccttaccgagcgcctggtggaatggctggacgctcgcgagcagcgcccggaccttctgttatcgggttctgcggtgggttggtatggcgacagcggcgagcgcccggtgaccgaggagggggcggcggccggcgaggatttcgccagcgagctatgcctcgcctgggagcagatcgcccgcgaggcggagaagctcggcacccgtgtcgtgctgttgcgcaccggcctggtgctggcccccgagggcggcttcctcgggcgcctgttgccgctctaccggctcggcctgggcggaccgctgggtgacggccggcaatggatgccgtggattcatatcgaggatcaaatcgagctgatcgattttcttttgcggcggcccgatgccagcggtccctataatgcgtgcgctcccaacccggtgcgcaaccgcgatttcgccaaggccctgggtcgggcgctgcacaagccggcgcggataccgacccccgggttcgtcctgcgcctcgggctgggagaaatgtccggattgctgctcggcggccagcgagccttgccgcaacgcttgcaggacgccggctaccgttttcaattcaccgacctggacgtggcgctggccgatgtcctggacgcccgacgaaaggatcaggcatga

SEQ ID NO: 322726 - DNA, 1023 bp, Pseudomonas aeruginosa
atgaccgagaatgccctgctgttgctcaacctgggctccccggattcgacccgggtggaggatgtccgccgctatctcgaccagttcctcatggatccctgcgtggtcgacctgccctggccgctgcggcgcctgctggtgtcgctgatcctgatcaagcgtccggccgaatcggcgcacgcctacagctcgatctggtgggacgaagggtcgccactgatcgtcctcagtcgtcgcctgcaggaggcgatgaagccgcactggccgcatgggccggtggaactggcgatgcgctacggccagccggccatcgagaaggtcctgctcgacctggcgcgccgcggtatccggcgggtgaccctggcgccgctgtatccgcagttcgccgacagcaccacgaccaccgccgaacaggaggtgcgccgggtgatcgccgcccatcgcctgggcctggaggtcagcacgctgccgccgttctacgaccagccggtctacctcgatgccctggtggaaagcgtgcgtccgtacctgcagcagccccacgaccatctgttgctgagcttccatggcttgcccgagcggcacatccgcaagctggtgaaggatcctgcccacgacctgctggccgagaacagccgcaacgtcagccccgaagccctcgccctctgctaccgcagccagtgcctgcgcaccgccgaggccttcgccgagcgcgccggcctggagcaggggcgctggtcggtgtcgttccagtcgcgcctggggcgcgccaagtggatcgagccctataccgacgccaagctcgacgaactggtgcagcgcggggtgaagcgcctgctggtgatgtgtccggcgttcgttgccgactgcatcgagaccctggaggaaatcggcatgcgcggccgcgagcagttcatcagtgccggcggcgaggacctggtgctgattccctgcctcaacgaccaccccgcctgggtcggcgccctggccgagatgagcgggcgcttggccaggccgctctga

SEQ ID NO: 322727 - DNA, 1374 bp, Pseudomonas aeruginosa
atgcataacaacaataacggctatccctccaaccttgcggcctggaccacggtggcgatcctcatggtcgcctatgtgctgtccttcatcgaccggcagatcctcaacctgctggtcggcccgatccgccgcgacctggccatcagcgatacggaaatgagcctgctgatgggcttgtccttcgccctgttctacaccctttgcggtatcccgctcggacgcatggccgacaaccgcagccggcgcggcctgatcctgttcggcgtgctggtgtggagcgcgatgaccgcggcctgcggtctggcgcgcagctattggcaattcctcaccttccgggtcggcgtcggggtcggcgaggcggcgctgtcgccagcggcctattcgctgatcgccgacagcttcccgcgcgagcgtcgggcgacggcgatcagcgtctactcgatgggcatctacctgggctcggggctggccttcctgctcggcgggctggtgatcaagttcgcctcggcccagggcgacgtgcatctgccgctgttcggcgaggtgcgcccgtggcaactgatcttcctcatcctcggcgccgccggcgtgctcttctgcctgttgctgctggcgatccgcgagccggcccggcgcggagtcggcgcaggcgtggcggtgccgctgggcgaggtcggcgcctacctgcgggccaaccgcaagaccgtgctctgtcacaacttcggtttcgcctgcctgtccttcgccggctacggcagcggcgcctgggtgccgaccttcttcgtccgcacccacggctgggacgccggtcatgtcggggtggtctacggcagcatcgtcgcggtgttcggctgtctcggcatcgtcttcggcgggcgcctggccgactactgggcgaagcgcgggcgtagcgacgcgaacatgcgcgtcgggctgctcgccgcctgggcggtgattcccttcactctggtctatccgctgctggacaacgccaattgggcggcggcgctgatggcgccgacggtgttcttcctgagcatgccgttcggcgtggccccggcggcgatccaggagatcatgcccaactcgatgcgcggccaggcctcggcgatctacctgttcgtggtcaccctgttcggtctcggcgtgggcccgacggcggtggcgctggtcaccgatttcgtcttcgccgacgacatggcgctgcgctactcgctgctgctggtgaccctggccgcggtgctcggtgcggtggtcctgctggggatcggcctcaagccctatcgcgccagcctggagcacctgaaggactggagcctgcgacgggaaggcgagggcggcgaggattggaaggcgtcccggcagccggcctga

SEQ ID NO: 322728 - DNA, 948 bp, Pseudomonas aeruginosa
atgagccgccactccacgtccgcctgcctgctcggcttcgctacgctctgcgccagcccgttgctgctcgccgcctgcaccaccagctccggcaccggcaatttcggcagcctgagctcgttcaccgtggccagcaccgcccagaccatcaccggcaccaccggcttcaagtgcaccggcagcctgttgtcgatcctcagcaccaacaccatcgacgcgaccatcgccagcaccgccaatccgctgggcaccacgccgcggctgtacaacgccgccagcggcacctacctgccctacagcatctgcaaggacaacggctgcggcaccgtctacaacgtcggctcgacggtacgctggagcagcaccaccttcctcggcatcctcggcctgttcaacgccaccgacggcagcctgccgctgtacctgcgcaccgccaccggggtgaccctgccggccggcacctataccgataccatcggcctgaactgggcctggcacctctgcgccgccggtgccctgggactctgcgtgtacgacgacggcaccgccagcagcagcgtcaacgttaccctgacggtgctcaaggactgcttcatcgacagcgctccggacctcagcttcggcagcgccgcgctggtctcggccttcaccgcggtgaaccagaacattggcgtgcgctgcaccctgaacgccacctataccatcggcttcgacaacggcaacaacttcagcggcggctggcggcgaatgctcagcggcgccaacgcgatccagtacaacctctacaaaccgggagactcgacggtctggaccaccagcaacacccaggcaggcaccggtagcggcgccgcgcagaacgtgccgtaccgggccatcgtcaacccggcccagggcaacgtccccgccggtacctacagcgataccgtgcgggtgatcctcacctactga

SEQ ID NO: 322729 - DNA, 2373 bp, Pseudomonas aeruginosa
gtgcctcgcccgtgtcagcggcgctctcgccgccaccgctcgctactgatcggcctggcgctgctctcccctgtccatgcggcggactacctggccggactgccgccgccgcaacccgctccgtccggcggcggcaacgtcctctactacctggaactggtgatcaacggccgcgacagcggccaggtggtgccggtcaacgccgccgatggccattacctgctcgacgccgcggccctgcgcgaagccggcgtgcgcctgcctggcaaccccgccggacaggtcgcggtggacgccctgcccgaggtccgggcggactatgacagcgccagccagcaactgcacctgcaagtgccgccggactggctgccggagcagcgcttcgacgatcccggactggtcgcccgcgccccggcgcgcagcagcctcggcgcgctgttcaactacgacctgtactactcggaccccgccgacggcgccacgccctggctttccgcgctgctcgagcaacgcctgttcgacggcttcggggtgatctccaacaccggcgtctacacccgctatttcggcgacgccgacaacctcgacagccgctacctgcgctacgacacctactggctgtacaacgacgaacgcaacatgcacagctaccaactgggcgactacgtcaacggcgcgctgaactggaccaccccggtacgcatgggcggctttcgcttcgcccgcaacttcggcgtacgtccggacctggtcacctatccgctgctgcgcttcgacggccaggccgccgtacccagcaccgtcgacctgttcatcaacggctacaaggccagcagcgccgacctgcaacccggtcccttcgccatcagcaacgtgccgtacatcaacggagccggcgaagccacggtggtgaccaccgacgcccagggccgacaagtggtgaccagcctgccgttctacgtatccaacaccctgctggcgcgcggcctgagcgatttcgacctgtccgtcgggcgcctgcgcgacgactacggcctgcgcaacttctcctatgccgacaacgccgccagcggcatctaccgctacggcgtcagcgaccgcctgaccctctccacccacgccgaggccgccagcgacctgcgcctgctcggcatcggcggcgacatcgccgtggccaccttcggcaccctcagcctggcggccagcggcagcgacggccagggcgacagcggccagcaatacctgctcggctactcctactattcgcgacggctcggcctcagcctgcaacacatcgagcgcagcgccggctatggcgacctcggcaccctggacggcgagtaccagttgagccggcgcaccgaccaggctaccgccagcctgaccttcgacgagcagggcaccatcggtaccggctacttcgacatccgcacccgcgacggcagccgcacgcgcctggccaacctctcctatagccgcccgatcggcagccgcagcagcttctacctggcgctgaacaaggatctcgacggcgacggctacagcgcgctgatgcaactggtgattcccttcgacatcaacggcctgctgaacatcggcgtcacccgcgacagcgaccggcgctacagcgagcgggtgatctggagccgctccacaccgagccagggcggcctcggctggaacctcggctatggcggcggcgccagccgctaccagcaggccgacctgacctggcgcatgcagaacgtgcaactgcagggcggcctctatggcgagaccggcaactacacgcgctgggccgatctcagcggctcgctggtatggatggacaacgccgtgttcgccagcaatcggatcaacgacgccttcgtcctggtcagcaccaagggttatccacaggtgccgatccgctacgagaaccaactgatgggcagcaccgacgacaacggccacctgctggtgccctgggtcgcggcctactacccggcgaagttccagatcgagccgctggaccttccggccaacgtcagcgcgcccgaagtcgagcagcgcgtggcggtacgccagggcagcggcctgctgctggatttcccgatccgtgccgtagtcgccgccagcatcagcctggtggacgagcgcggcgaaccgctgccgctgggcagccaggccgaagaaaccggcagcggccagcgcgccagcgtcggctgggacggccaggtctatttcgaaggattgcaaagcgacaaccagctacgcgtggtccgccccgacggccgggcctgccaggcacgcttccgcctggacacgcgcaaacccaccgtcagccaggtcggcccgctgacctgctcggccccgatcggagatacgccatga

SEQ ID NO: 322730 - DNA, 789 bp, Pseudomonas aeruginosa
atgcccagtccacacctacctctccgccccggccgctggcttgcggcgctgctggcgctgctcctgggcggcccggcacaggccgccagtgcggtgctgatctggccgatcaacccggccatcgaagccgaccagccggccaccgcgctgtggctggagaatcgcggcaagcaaccggtgaccctgcaggtgcgcgtgctcggctggtcccaggcggatttccaggacgtctatcgcaaccagcaggcagtgattcccagcccgcccttcgtcaaggtcgagccgggccgccggcaactggtccggctgatccgccagggcggccagcccagcacgccggaggacgcctaccgggtgctgatcgacgaagtgcccgacggcgacgcggggcagacgcaacgaagccccggtctcgccctgcagttccagatgcgctattcggtaccgctgttcgtcagcgccgacggcgtctggacccagccgcgtagcgatgtcgagcgcgacccggccgacgcgacccggccgaagctggcctggcggctggtcgaggaacagggcaagcgttacctgcaggtgcgcaacgagggtagcgtgcacgcccgcctcagccatgtccgctgggagggcaacggccgcagcctggcgctgctggacggcctgctcggctacgtgctgcccggccggcagatgcgctggccgctgccgccggggctgctgccggactccggcatgaccctgaaactgcaactggcggacaacgacgcgccgatcagcgttcccgggtactga

SEQ ID NO: 322731 - DNA, 543 bp, Pseudomonas aeruginosa
atgccgatgtcccgccggcgtctattcctgccgcttctcctgctcccgctgccgagcctggtcgcgcatgccgatccatcgccgatcagccgcgccttccaggtccaggcggtggtcgccaacggctgcgccttcggcaccgccatcagcgacaacgcctatgacctcggcaccctgagcttcggcaccctcggcaacctggccagtccggttaacgtcgccagcagctccggggccggctccatcgtcctgacctgcactccgggaatgaccgtctccgtcgccctcgactacggggtcaatggcggcagcagcagccagcgctacctgaagcgggtgagcggcaacgagaccctcgcctaccagctctaccaggatgccgcctactcccaggtctggggcaacggggcactcgcgcggaccatcgccaactttcccgccagcacccagacctacacggtatacgcgcgcctgttcgcggtcggcagcctgccgtccgccggcaactaccgcgataccgtcaccgtcaccctttcgttctga

SEQ ID NO: 322732 - DNA, 534 bp, Pseudomonas aeruginosa
atggtcctggggggaccgatgagcctgaaccgctacctcgccggaggactgctctgcctgctcggctgcaacccggcaaacgcgcagaccgccaccatcgtcctgagcgccacgctgctcccggcctgcgaagcgggtagcgtcggcagcggtggcgcgatcaccttcggcaccctcgacttcggccagtacgcctccctgaacaacgccatcagcgccaccagccagcaaggcgcaggctccatccgggtcaagtgcgtcagcggccagacctatgcgatcacgctcgacggcgggctctacggcagcgtcgccacgcggcgcatggcgaacatcgccaacaccgccctcaccctgacctacaacctgtacagcgaccgccccggcggcatcgtctgggacaacaccaccggcgttgccgccaccggcaacggcaacgaccagtggtatcccatctacggcctggtgccggcacagaccacgccggtcgccgggacctaccgcgacaccgtcaacgtgaccatcagttggtga

SEQ ID NO: 322733 - DNA, 549 bp, Pseudomonas aeruginosa
atgaataaacgcattccggcagtcttgttgttctgtgcctgcgccagcctgctgggcaccgcccaggccgccggtacgctgatcggccaggtcggcgtgcagatggtcatcggtgccggctgcaccatcatcaacggcagcgtcagcggcggtatcaaccagtggggaaccctggacttcggcagccattccgacctcaccaacgtggtcgacgcgcagaccgtcggcaccagcggcaatatccagatccagtgcagcaccggcctgaccccgagcctgacggtgaacgcaggcctgcacgccagcggcggccagcgctacatgcagaacaccaccaccaccagcagcaccatcgcctacaacatctattcggacgccgcgcgcagcgcgctgatccaggccaacacaccggtggacatctcctcggtctccaccggcaccgcggtcaacatccccctctatggccgcgtggtgcccaccggacaaagcacacccacgccgacggcggggacctacaccgacaccctgctggtcaccatcgcctggtaa

SEQ ID NO: 322734 - DNA, 1284 bp, Pseudomonas aeruginosa
atgggcgatgccttccaggagccgctctggcgccaggtgctgtcaggcgcacagatgctgttcgtcgccttcggcgcgctggtgctgatgccgctgatcaccggtctggatcccaacgtcgcgctgttcaccgccggcctcgggaccctgctgttccaattggtgaccgggcgccaggtaccggtgttcctcgcctccagcttcgccttcatcaccccgatcatcctcgccaagggccagttcggcctggccgcgaccatgggcggggtagtcgccgccggcttcgtctacaccttcatgggcctggcggtgaagatcaagggcaccggcttcatcgataaactgctgccgccggtggtgatcggcccggtgatcatctcgatcggcctggcgatggcgccgatcgcggcgaacatggcgatgggcaaggccggcgacggcagcgagttgctgccgtaccgcaccgcgatgatgatctcgatgccggcgctgctcaccaccctggtggtggcggtattcggcaagggtatattccgcctggtgccgatcatcgccggcgtgctggtcggcttcgccctgtcgttcgtcttcggcgtggtcgacaccgccgcgatcgtcgccgcaccctggctggaactgccgaaattcaccgcgccggaattcaactggcaggcgatcctgttcatcgtcccggtggccctggccccggccatcgagcatatcggcggggtcatcgcggtgggcggcgtcaccggccaggactacctgaagaagcccggcctgcaccgcactctcctcggcgacggcctggccacctcggctgccggcctgttcggcggaccgcccaacaccacctacgcggaagtcaccggcgcagtgatgctgaccaagaactacaacccgaagatcatgacctgggcggcggtgatcgccatcaccctggccttcgtcggcaagttcggcgcgatcctgcaaagcatcccggtaccggtgatgggcggcatcctctgcctgctgttcggcaccatcgcctcggtcggcatgaacaccctgatccggcacaaggtcgatctctcggaagcgcgcaacctggtgatcgtctcggtgaccctggtgttcggcatcggcggcgtgctgatcggcagcggtaccggccccgacgacatcggcctgaagggcatcgccctgtgcgccatcgtcgccatcgtcctcaacctgttgctgccgggcaacgacggctggcagaacaaggcgctcgacgaacaacacaaggattcacactga

SEQ ID NO: 322735 - DNA, 639 bp, Pseudomonas aeruginosa
atgcccgtacatgagatccgccaccccctcatccgccacaaactgggcctgatgcgccgcgccgatatcagcaccaagaacttccgcgaactggcccaggaagtcggcgccctgctgacctacgaggcgaccaaggacctgcccctggaacagtacgaaatccccggatgggccggcccggtgacggtggagaagatctccgggaagaagatcaccgtggtgccgatcctgcgcgccggcatcggcatgctcgacggcgtgctcagcctgattcccggcgccaaggtcagcgcggtcggcgtcgcccgcaacgaagagaccctggaagcacgcacctacctggaaaaactggcgccggacatcgccgagcgacgctcgctgatcatcgacccgatgctcgccaccggtggctcgatggtcgccaccatcgacctgctgaagaaggccggcagcaaggaaatccgcgccatggtgctggtcgccgcccccgagggcatcgaggcggtacgcaaggcccacccggacgtgatcatctataccgcctcgatcgacgagaagctcgacgagaacggctacatcattccgggcctgggcgacgccggcgacaagatcttcggtaccaagcagaaggaagcctga

SEQ ID NO: 322736 - DNA, 558 bp, Pseudomonas aeruginosa
atgtccgtcgatctcgcgcacatccgccaagtcagggcggaagccgactgcctgttcaacaacgacgaggtcgaggcagccatcggtcgcgtcgccgaggcgatcaaccgcgatctcggcgagaccaacccggtggtcttctgcgtgatgaacggcggcctgatcttctccggcaagctgctcccgctgctcgacttccccctcgaactgtcctacctgcatgcgacccgttaccgcaacgagacctccggcggcgaactgttctggaaggccaagccggaaatctccttcatcgaccgtgacgtgctgatcatcgacgacatcctcgacgaagggcacaccctctcggcgatcatcgacttctgcaagcatgccggcgcacgcgcggtgcacaccgccgtactggtggacaaggaacacgagcgcaaggcccggcccgacctcaaggccagcttcaccggcctctactgcgccgaccgctacgtgttcggctacggcatggactacaagggctactggcgcaacgccgcgggcatcttcgcggtcaaggggctctga

SEQ ID NO: 322737 - DNA, 474 bp, Pseudomonas aeruginosa
atggccggaccgcgctacctcgaccagcaattgttcgccgaactggcgagcggggcgggtaacgcgccgcgtggtcgccagcatcacaacttccaccgcatggaggagccctgccaccgcatggcggtgggcctccagccgaatacctacatcccgccgcaccggcacctggatgcgggcaaggccgaggcgctgatcgtgctcaagggccgtctcggcctgctggtcttcgccgaggacggggaactcctcgacaagcgcgagttgagcgccgctggggactgccccggtgtcgacctgccgcccggggtgttccatgccctggtggtgctggagccggacagcatcctgttcgaatgcaaggccgggccttaccgcccgctcggcgaaggcgagttcgccagttgggcgcctgccgaaggcagcgccgatgcgccggcctaccgggactggatgcgcgcccagttcgcctga

SEQ ID NO: 322738 - DNA, 486 bp, Pseudomonas aeruginosa
atgttcgcccgtagcctgtgcggctccctgctcctgttcgtcagtctggccggcctggccgccgagaatcccccgatgcacgcgcgcttcctgccgcccgacgacggccagttgcgccaggaggcgccggagcagcagcaactgatccagatcaccgagtacagcgtggtgctgggcaaccagcggcagtccaaccagcagccgatcccgatcaccacgccgaccctgctgcgcctgaagggcaaaccgctgagcaagggcgcgaccctggcccaggtgctgatccagttcgacagcgaaggcaagagcctgaagaagccggtctacgatgccgggacccgcaccctcacgctcaactacccgttggcgcagtacccggcgttgctcgacctgctgcgcaaccagacggtctattgccagttcctcgcctatcccaacggccatgtctgggcggacctgcacaccggcgcggtacgcgcgcgttga

SEQ ID NO: 322739 - DNA, 414 bp, Pseudomonas aeruginosa
atgtacgtccagccctacgtctgcttcaacggccgttgcgaagaggccctgcgtttctatgaacacgccatcggtgccagggtgagtttcctgttccgtttcgacgaggcgcccggtccggtggtggtgcccgaaggctggtgcgacaaggtgatgcacgccaacctgcagatcggcgacagccagatcatggcctcggacgggcacgggccggcgttgcagccgatctccgggatttccctttcactgaatacccgcgacccgcagcaggcgcggcgctgctatgacgccttgctggaggacggcgggcgggtcgagctggagttgggcaagaccttctggtcgccctgtttcggtaccctggtggaccgtttcggggtgtcctggatgatcaactgcgaggccggcgcctga

SEQ ID NO: 322740 - DNA, 1524 bp, Pseudomonas aeruginosa
atggcgcaaaacgatcacgaaacagtcgacatgctgctggtaggcgccggcatcatgagcgcgaccctggcggtcctgctcaaggaactcgaccccaacctgaagatggaagtcgtcgaactccaggagtccggcgcgatcgaaagctccaacccgtggaacaacgcgggcaccggccacgccggcctgtgcgagctgaactacaccccgcagtcggccgacggcagcatcgacatcaagaaagccgtgggcatcaacaccatgttcgaggtgtcgaagcagttctggtcgcacctggtcgccaagggcaccttcggctcgccgaagaccttcatcaacccggtaccgcatctgagcttcgtgcgcggcagcgaaggcatcgcctacctgaagaagcgcttcgaatcactgacgaagcaccacgctttcgagaccatggtctactccgaggacaaggccaccctcgccgagtggatgccgctgatgatgccgggtcgtccggccgacgaagcgatcgccgcgacccgcgtcgagggcggtaccgacgtcaacttcggcgccctgaccaaccagctcctgcaacacctggcgcaacagccgggcgcgcagatccgctacaaccagaaggtcacccacctgcgccgcgccgataacggctggcgggtcaccgtcaaggacacccgcaacggcggcgaccgcgagatccaggcacgcttcgtcttcctcggcgccggcggcggcgccctgccgctcctgcaactttccggcatcccggaaggcaagggcttcggtggtttcccggtgagcggccagtggctgcgctgcgacaacccggaaatcgtcaagcagcaccaggccaaggtctacagccaggccgaggtcggctcgccgccgatgtccgtgccgcacctggacacccgtgtggtggacggcaagaaatccctgctgttcggcccctatgccggtttctccaccaagttcctgcgccatggctcgttcctcgacctgccgctgtcggtacgcccgggcaacatcctgccgatgctctcggtggcccgcgacaacatggacctgacccgctacctgatcggccaggtcatgcaatcgccggaacagcgcctggaagccctgcgcaagttctaccccgaagccagagccgaggactggcgcctggaagtcgccggccagcgcgtgcagatcatcaagaaggatccgaagaaaggcggcatcctgcagttcggcaccgagctggtggccgcccacgacggctccatcgccgccctgctgggcgcctcgccgggcgcctcggtgaccgtctcgatcatgctcggcctgatcgagcgctgcttcccggagcaggcccgctcgccggagtggagcgccaagctgaaggaaatcttcccggctcgcgagaaagagctggaaagcgacgccgagctgtaccgcagcgtcagcagccgttgcagcgaggtgctggaactgaccgcgaagaacgacgtgcaggccccggtcaacgccgagtga

SEQ ID NO: 322741 - DNA, 588 bp, Pseudomonas aeruginosa
atgctgcatcgcctgttgctcagcctgatgaccgcaagcgccctggttctcggcggctgcgccctgagcccgcaacaactggacccgcaaccggtccttaaaggaccgttgaccgccgtcggccatggccagccggtggtggtcaaggtggtcgatggccgtcccggcccgtccctgggcactcgcggcggcctctacgccgataccagcaccctgaccgtccgtagcgaggacgtggtgcccaagctccaggcccaggccgagacggccgtgcgcctgctcggctacacgccttcggccaacgcctacaacgcgccgcaactgaccctgaccctggccgagctgaagtaccagtcgccgaaggacggcgtctacgtcacccaggccgacattaccgcgaccttccgcgccgacgtgcagaacagcagccggcgctacaccggtcgctatggcgcctcgctgaaccagcgcttcggcatggcgccgaaccaggcgaccaacagcaagctggtcagcgaggtgctcagcgacgccctgacccgcgtgttcaaggacccgaccatcgctcagaccctcggccagcaatga

SEQ ID NO: 322742 - DNA, 207 bp, Pseudomonas aeruginosa
atgctggaaaccgcaccccacgaacataactatctgatcgaccacctggacgagatcgaggccgtgatcgtcgatctttccttcaatgtccaggacgaccgctggctggtgtactgcaccgcctgcggccatgaacacctcgacctgcctgagaccgacgaacgcatcagcatcggcgagccggacccgttccaccaggccgcctga

SEQ ID NO: 322743 - DNA, 936 bp, Pseudomonas aeruginosa
gtgggcttcctgctgctcgaacacttttccctgccggccttcacccaggcgctggacaccctggtgaccgccaacctgatccgcagcgagtccttcgcggtgagcaacttcagcctgaacggcgagccggtgaccagcgacctcgggttgctgatctgcccggacctggcgctcgcctcggcggcgctgcaaggactcgacctgctggtggtctgcggcggcttgcgcacgcccatgcgctcgtccgccgcgctgcgggaagcgttgcaggacgtggcggcgcgcggcgtcgccctggccgggctgtggaacggtgcctggttcctcggcgacgccggcctgctggatggctaccgctgctgcatccatcccgagcaccgcgccgccctcgccgagatcgcccgcaacagccaggtgaccagcgacagctacatggtcgaccgtgaccgcctgaccgcggccagccccaccggcgccttcaacctggcgctggagtggatcgcccggcgccacgggcgcgacctggtggaggcggtggtggatatcctcgccttcgaggagtcgcgctaccggcgggtgcgcccggccctgcacgagaagatgagcgagccgctgcgcgaagtgatcaacctgatggcggcgaatatcgaggaaccgctcagccaggagcagctcgcccactacgtggggcgctcgcggcggcagatcgagcggctgttccagcagcagctcggaaccacgccggtgcgctactacctggagttgcggatcaccgagtgccggcgcctgctgcaacattccgacctgaccatgctggaggtcctggtcgcctgcggcttcgtctcgcccagccacttcagcaagtgctacaccgccttctacggctacccgccgtcgaaagaagtgcgctacggcaacgtccgctcgacgaaatga

SEQ ID NO: 322744 - DNA, 423 bp, Pseudomonas aeruginosa
atgtcccagccttttctctggcgtcgcgtcaacgactcgtccggtttcgccgagccgcgggtgttcatccgtgtctacctggaaccgggcagcatcgatgcggccatcgctttctacgaagacctgcagggcgtcgcccacgacatgcgcttcgactttcccgagaaacgcctgacactcgccgcagtcggcgccttcctcctgctggagggcagcgacgaggcgctggcgccgttccgcagcaccactggcaccctgctggtggacgacatcgagccctatcaccggcggttgctggctgccggcgcgcagatcatcttcgggccggcgcgcgcgcccaccggcgcctgcttcaatgcgctgctgccggacggcacggtggtcgagttcgtccaccaccggccgcagccgggcgaggcctga

SEQ ID NO: 322745 - DNA, 639 bp, Pseudomonas aeruginosa
atgtacctgccttcgcatttcgaagagtccgacccgcaggcgctgcacgcgctgatccgggactatccgctgggcctgctggtcagccacggcgaagcgggcctggacgccaaccacctgccgttcgagctgagcccggaaaagggcgcgcaaggcaccctggaagcccatgtcgcgcgcaacaacccggtttggagcgagctgcgcgacggcgacgaggtgctggtggtgttccgcgccggcgatgcctacatctcgccgcagtggtacccgagcaagcaggagcaccaccgccaggtgccgacctggaactaccgggtggtccacgcccacggccgggtgcggatccgcgacgacgaacgctatgtgcgcggcctggtggcgcgcctgacccgcacccacgaggcgacccaggaaacgccctggaaaatgaccgacggccccgccgactacatcgacgagatgctccggctgatcgtcggcatcgaaatcgagatcacccgcctggtcggcaagttcaagctcagccagaacaaggaagcccgcgatatccgcggcgccagcgcagcgctgctggcgcgcggcgaacaggcgatcggcgcggccatggacgattgcgccgcccggcgcgagggctga

SEQ ID NO: 322746 - DNA, 720 bp, Pseudomonas aeruginosa
atgcccgagcacgccccgatcctccccgtcatcgccgccgaggtggccgccctcgcccccggtttccgcgccctgagcctcaccgtcgaggcggcgccgatcgttcgtccggaaatcgccgaccgcgccgtagagcgcgcctgccaggcgctggcgcgtggcgaaccggactgggccgaggcgcacctggcagcctgggccgaggcgttccgccgcttcggcgccaagccgcagcgtaccccctgctccgccgaagccctgcgcaaacgcgcgctgcgcgacggcgggctgccgagcatcgacccggtggtggacctgtacaacgccatcagcgtgcaattcgccattccggtaggcggcgagaatctcgccgcctatgccggcccgccgcgcctggtggtcgccgacggcagcgagaccttcgacaccctgaagaacggcgaggcgctcgacgaatcccccgaccccggcgaggtggtctggcgcgacgacctcggcgtcacctgccgccgctggaactggcgccagggcgtgcgcacccgcctggatgccagcgcccggcgcatgtggttcatcctcgagagcctgccggaaatgccgctggcggccctgcacgaagcgggcggcctgctgctcgacgaattgcgcctgatgatgcccggcatgcgcgccgactcgcgcctgctgtgcgtggcgacggtacccgccgacagcgtataa

SEQ ID NO: 322747 - DNA, 1644 bp, Pseudomonas aeruginosa
atggccaaggcagccgatgtggttgtgcaatgcctggaaaacgagggcgtgcagtacgtcttcggaattcccggcgaggagaatctcgacctgctggagtccctgcgcaagtcgcagatccggctggtgctcacccgccacgaacaatcggccggcttcatggccgccacctacgggcgcctcaccggcaagaccggggtcagcctgtcgaccctcggcccgggcgccaccaacctggtcaccgccggcgcctacgcctacctgggcggcatgccgatgctgatgatcaccgggcagaagccgatcaagaagtccaagcagggccgcttccagatcctcgacgtggtcggcatgatgcagccgctgaccaagtacacccaccagttggcctccgccgacaacattccctcgcgggtccgcgaggcgttccgcctggccgaggaagagaagcccggcgcggtgcacctggagctgccggaggacatcgccgccgagcagaccgacagcctgcccatcccgccgagcctgagccgccggccgctggcggaatacaaggcgatctgcgccgcggtggagaagctgcgcgccgcgcgcagcccgatcctggtgatcggcgccggggccaaccgcaagatgaccgccaaggtcctcaagcaactgatcgacaagaccggcattcccttcgtcaccacccagatgggcaagggcgtggtcgacgagcgtcacccgcgcttcctcggcaacgccgcgctgtccgccggcgacttcgtgcatcgcgcggtggaggcggccgacctgatcgtcaacgtcggtcacgacgtgatcgagaagccgccgttcttcatggttcgcggcggtaccgaggtgatccacgtgaacttccgttccgccgaggtggacccggtgtatttcccgcagatcgaagtagtgggcgacatcgccaacgccatctggcagatcggcgaggcgctggacgataccgcgcactgggacttcacccgcctgctggcgatccgcgaggccaacgaggcgcaggtcgccgaaggcgccgacgacccgcgcttcccgctctatccgcagcgcctggtggccgacgtgcgccgggcgttgccgtcgcagggcatcgtcgccctggacaacggcatgtacaagatctggttcgcccgcaactacaaggcgcacatgcccaacaccgtgctgctggacaacgccctcgccaccatgggcgccggcctgccctcggcgatggccgcgcacctggtctacccggaccggccgatcgtcgcggtgtgcggcgatggcggcttcatgatgaacagccaggaactggaaaccgcggtgcggctgaagatgaacctgacggtgatcatcctgcgcgacaacggctacgggatgatccgctggaagcaatcgaacatgggcttcgccgacttcgggctggactacggcaacccggacttcgtgcgctacgccgaggcctacggcgcctatggccaccgggtcgacagcgccgagggcttcctgccgctgctggagcgctgcctgggcacgcccggggtgcatgtgatcgattgcccggtggattactcggagaacgaccgcatcctcaacgtcgagttgcgcgaacgcgccctggcggtctga

SEQ ID NO: 322748 - DNA, 1296 bp, Pseudomonas aeruginosa
atgtcctccccgttttccccccgttcgccccgcacccttcgcggcctgggcgccctcgccctgtgcggcggattcgtcgccccggcccctgccgccttcctcgaggacggcagcgcgcgcctggaagcgcgcaccgtctacttcaaccgcgacttccgcgacggcagctcggccaacccgcagggcgcctccaagcgcgaggaagccgcgcagggcttcatcctcgacctgcgctcgggctataccgagggcgcgctgggcttcggcgtggataccctggcgatgctcgggatcaagctcgactccagccccgcggacagcaacagcggcctgctgccttccagcggccacgatccgcgtcgctcggtcgaccagtacgccaaggccggcgtagccggcaagatgcgcttctcgcagacacagttcaggtacggggcgatgctgccggacatgccgttgctgaaatacaacgacggacgcctgctgccgaccctgttccacggcgcccagctgaccagcgaggagatcgccgggctcaggctctccgccacccgcctggagcgctacaccgcgcgggactccagcgatgcccaggacatccgcctgcactgcaagaacaaacgctacgcctgcgacaccaccggcaaccgcttcgacgcctaccaactcgactaccaggtcaacgacggcctgctgttgcaatacgcccagggtggcctgcgcaacgtctatcgccagcgctacctcggtgccgtgggcaagcggcagctcggcgccggcaagctgagcgccgacctgcgctggttcgacagcgaggacgccggcgcggcccgcgccggcaagatcgacaaccgcgctctcagcctgctgctcgcctacgccgagggcggccacacgctcagcgccggctggcagcggatgaacggcgccagctcgatgccctacctcgacggcagcaatccgtacctggccaactacctgcaggtgaacgacttcgccaaccccgaggaacgctcctggcaactgcgctacgacttcgacctgcgcagcgtcggcgtgcccggcctgagcttcatgacccgctacgtcaacggcgaccatatccgcctggccaacggcgacgagggcaaggaatgggagcgcgacatcgagctgaagtacgtggtgcagagcggccgcttcaaggacctcagcctgcgcctgcgcaacgccacctaccgcaccgacttcgagcgctcggcgcgcgacgtggacgaggtgcgcctgatcgccagctacaacctgtcgctgttctga

SEQ ID NO: 322749 - DNA, 744 bp, Pseudomonas aeruginosa
atgtccgccaccgcgctgtacaccgacctgtcccactattacgacctgatgtgcgccgacatcgactaccaggcgcagagccactgcgtgcgtcgcctgcaccagttgttcggcaaccagggccggcggcacctggacctggcctgcggtaccggccctcacgtgcggcacttcctcgatttcggctatcgcagcgccggcctggacatcaaccagccgatgctcgacctcgcccgacagcgctgtcccgaagcgcacttcagccggcaggacatggccggcttccaggtggacgagccgctggacctgatcacctgtttcctctattcgatccactacaacgcagggctggagcgcttgcgcgcatgcctggccagcgtgcatggcgcactggcggatggcggcgtgttctgtttcaacacggtggacaaggggcagatcgacaatcgctcgttcgtccgccattccgtggagcatcgcggcagccgcttcaccttcggttccggctggtactacagcggcgagggcgagcgccaggcgctgcgcctcggtatcgagaaaaccacggacggaacgacccagacctgggaggacgaacaccccatggtcgccctcagcttcgccgagctgcagcacctgttgcaggcacatttcgaggtgcaggtcttcgaacacgactacgaacggatcacgccctgggccggcagctcagggaatgccctgttcgtctgcgtgaagcgctag

SEQ ID NO: 322750 - DNA, 402 bp, Pseudomonas aeruginosa
atgagccagaccttccacggcagttgcctgtgcggcgcgctgcactaccgactgtcctcgcccccgcgcgcactctctcactgccactgcggccagtgtcgcaaggcccatggcgcggcattcgccagctatggcagcgtccccgtcgcggacctgcacatcgaccgcggcgccgacctgctcgccgcgttccgctcctcacccgccgtgctccggcgcttctgctcgcgctgcggctcgccgctgttctggtcgaggagcgaaggcgagttcgccgactgggtatcggtcgccctcggcagcctggacacgcccttcccggcggcgaaacagaagcatgtccaggtcgcatcgatggcctgctggtgcaggatcgccgacgactggccgcgtttcgactga

SEQ ID NO: 322751 - DNA, 282 bp, Pseudomonas aeruginosa
atggcccgagccactgcccgccacatcctggtttccagcgaagccaagtgcaacgaactgaagaccgccatcgaaggtggtgcggatttcgccgaagtcgcccgcgagcattccacctgcccctccggccgcgacggcggcaacctgggctcgttcggccccggccagatggtccgcgagttcgaccaggtggtcttcagcgcgccgttgaacgtggtccagggcccggtgaagacccagttcggctaccacctgctggaagtcaccagccgccaggactga

SEQ ID NO: 322752 - DNA, 1389 bp, Pseudomonas aeruginosa
atgcataagagaacgtacctgaatgcatgcctggttctcgcgctggctgcgggcgcgagccaggcctcggccgcgcccggtgcgagcgaaatggctggcgacgtcgccgtgctccaggcttctccggcgagcaccggccacgcccgcttcgccaaccccaacgcggcgacctcggcggccggcattcacttcgccgcgccccccgcccgccgcgtggcccgcgccgcgccgctggcgccgaaaccgggtacgccgctgcaagtaggcgtgggcctgaagacggcgactccggaaatcgacctggcaaccctcgaatggatcgacaccccggacgggcgccacaccgcgcgcttcccgatcagcgccgcgggggccgccagcctgcgcgccgcgattcgcctggaaacccgcagcggctcgctgcccgacgacgtgctgctgcacttcgccggcgccggcaaggaaatcttcgaggccagcggcaaggacctctcggtcaaccgtccctactggagcccggtcatcgagggcgataccctgaccgtcgaactggtgctgccggccaacctgcaaccgggcgacctgcgcctgtcggtaccccaggtatcgtatttcgccgactccctgtacaaggccggctaccgcgacggcttcggcgccagcggcagctgcgaggtggatgcggtctgcgcgacccagagcggcacacgggcctacgacaacgccaccgcagcggtggcgaagatggtcttcaccagctcggcggacggcggcagctacatctgcaccggcaccctgctgaacaacggcaactcgcccaagcgccagttgttctggtcggccgcgcactgcatcgaggaccaggccaccgccgcgacgctgcagaccatctggttctacaacaccacccagtgctacggcgacgcctcgaccatcaaccagagcgtcaccgtgctgaccggcggggcgaatatcctgcaccgcgacgcgaagcgcgacaccctgctgctggaactcaagcgcactccgccggccggcgtgttctaccagggctggagcgccacgccgatcgccaacggctcgctcggccatgacatccaccatccgcgcggcgacgccaagaagtactcgcagggcaacgtctcggcagtgggcgtcacctacgacgggcataccgccctgacccgcgtcgactggccgtcggcagtggtcgaaggcggctcgtccggctcgggcctgctgaccgtcgccggcgacggctcctaccagctgcgcggtggcctgtacggcggcccctcgtactgcggcgcgcccacctcacagcgcaatgactacttctccgatttcagcggcgtctattcgcagatctcccgctacttcgcgccctga

SEQ ID NO: 322753 - DNA, 924 bp, Pseudomonas aeruginosa
atggaccgtttcgatgcgatgcaggcctttgcccgtgtggtggagaccggcagcttcaccaaggcggcggagacgctgcacatgagccgcaccagcgtcacccagttggtccagcaactggaagcgcggctgcgggtacgcctgctcaaccgcaccacgcgcaagctcaacctgaccgccgacggcgccgcctactacgagcgggtgatacgcctgctggcggaactggacgatgccgagaccagcctctccagcgccgccctggcgccccgcgggcgtctccggatcgacgtgccgagcccgctggcgcggctgctgctgatcccggcgttgcccgagttccatgcgcgctatccggagatccagatcgacctgggcgtgagcgatcggctcgtcgacctgatcgacgagaacgtcgattgcgtcatccgcggcggcgaactgcgcgaccagtcgctgatggcgcggcgggtcggcgacctgcaactgggggtctacgcggcaccggcctacttgcagcgcgccggcgtgccgagccacccgcgcgaactggaggacagccaccagcgcatcgtcggcttcctctgggcgcgcaccggcaaggccctgccctacgccatgcacagaggcgaggaaagcctgcgggtggcgggccgccatgtgctggcggtggacgacggcaacgcctacctggcggccgggctggccggcctgggcatcctctggctgccgcactacatggcgcgtgagcccctcgcccgcggcgagctgctgccgctgttcgaggactggagcctggagccgatgccgctgtacctggcgttcccgccgaaccgccacgtcagcggcaagctgcgggtgttcatcgagtgggtcgccgaactgatcgcgcggcatgcgccgccgttgcatccgccgctctga

SEQ ID NO: 322754 - DNA, 399 bp, Pseudomonas aeruginosa
atgactgtacgcgacgtggttttccccgccggccgccaggccctctacgagcgcaaccgctattccccggcggtccgcagcgacggcctgctgttcgtctccggccaggtcggcagccgcgacgacggctctcccgaacccgagctggagacccaggtccgccgcgccttcgacaatctgaacgcggtgctcgccgcggccggttgcgggttcgacgatgtgctcgacgtcaccgtgttcatggtcgacgccgaggccaacttcgagcgcatctggaagatcgtcccggagtactggggcgaggcgccgtaccccacgctgacggcggtgggggtgaactggctgtatggcttcagcttcgagatcaaggtggtcgcgaggttgccggaggggcggtga

SEQ ID NO: 322755 - DNA, 801 bp, Pseudomonas aeruginosa
gtggacaccctgaagatcgccaccttcaacgtcaacggcatccagacccggctggccgcgctgctggcctggctggagcgggaagcgccggacatcgtctgcctgcaggaactgaaaacgcccgacgcgcgcttccccgccgcggcgctggagaaggccggatacggcgcgatctggcagggccagtcggcgtggaacggcgtcgccatcctcgcccgcgacagccagccgctggaggtacgccgcggcctgccgggcaacgccagcgatccccacagccgctacctcgaagcggccgtcgacggcctgctggtggccagcctgtacctgcccaatggcaatccccagccgggaccgaagttcgactacaagctggcctggttcgagcacctcatccgacacgccgccgagctgatggagagcggccatccggtggtgctggccggcgacttcaacgtggtgcccagcgacttcgatatctacgacacccgctcctggaaaaaggacgccctgctccagccggagtcccgcgagtgcttcgagcgcctcctgcggcagggctgggtggacgcgctacgccagcgtttccccgaccggcgcctctataccttctgggactacttccgccagcactggcaacgcgacgccgggctgcgcatcgaccacctgctgctcagcgccagcctggcggaccacctggaagacgccggggtggatcgctgggtgcgcggcgaggagcacgccagcgaccacgcgccggcctgggtaagcctgcggcgtccctcagagccccggcgctag

SEQ ID NO: 322756 - DNA, 564 bp, Pseudomonas aeruginosa
atgagcgcgaagctgcaaggcaagaacgtcctggtcatcaccgccaacaccggcatcgagcgcgacgagctgctcgaaccgctgaagaccctgaagcaacagggcgccacggtcacccacgcgaccatcgagggcggcgaagcgcagacctgggtgcacgacagcgagaaggacctgatcgtcaattccgacgccaggctgcaaggcctgcgcgccgaggactacgacttgctgctggtccccggcggcacggtgaatgccgacaccctacgccaggacagcgaggcccggcgcctggtcagggaattcagcgacgcaggcaagacggtcgccgccatctgccacggcccctggctgctgatcgacgccggtgtcgcccgcggcaagaccctgacctcctattccagcgtgcgtatcgacctgaccaacgccggcgcggactgggtcgacacgcgggtgaaagtctgcccggcgaacggctggaccctgatcacctcgcgcaacccgggtgacctgcaggcgttcaacgaagccatcggcgaagccctgcaggcggccgcctga

SEQ ID NO: 322757 - DNA, 888 bp, Pseudomonas aeruginosa
atgactttcgacgtgatcatcgtgggtggcagctacgccggcatctccgcgggcatgcaactggcgcgggcgcggcgcagggtgctggtgatggatacgggactgcgacgcaaccgcttcgcccgggcctcccacggctttctcggccaggacggccgcgatccggcggccatcaccgatgacgcccgcgcgcagttgctggcctatcccagcgtcgagtggctgtccgaagccgccgtcgcggcgaagaaggaggcggacggtttcgtggtgaaggccgccaacggagaacgtttcaccgcgcgccggctgatcctcgccagcggggtcgccgacgagctgccggagatccccggtcttgccgagcgctggggacggcacgtgttccattgcccgtattgccacggctacgaactggacggcgggccgattggcgtactggcggcctcaccgctggccatccaccacgccctgatgttgcccgactggggagcgaccacctttttcctcaacggcgtcttcgaaccggatgccgagcaaatgtccaggctggaccggcgcggcgtgacgatcgagcgcgaagccgtggtcgcgctgggcggcgcgcgcgccgacgtgaccctggccagtggccgcacgattacgctcgcggggttgttcacccagccgcgtacgcgcatggccagcccgctggcggcgttgctcggctgcgagttcgaggacggcccgagcgggccgttcatcaggaccgacggcatgcgcgaaaccagcgttcccggcgtcttcgcctgcggcgacgcggcgctggcggccggcaacgtcgccatcgcggtgggcgacggcgcgcgcaccggtggcgcggcgcatcattcgctgctgttccgctga

SEQ ID NO: 322758 - DNA, 429 bp, Pseudomonas aeruginosa
atgagaaacgacacccgcctctcgcgcatgctccatgtgctgatccatatggcccgccacgaagggccggcgacgtccgaagccatcgggcagatgctcggcaccaacccggtggtggtgcgacggaccatggcgctgctgaagaacgaaggctacgtgagttcggagaagggccatcgcggcggttggcggctggccaagccgttggcggacatcaccttgctggatatccaccaggcgctgggagcgtcctcgatcttcgccatcggcctgtctaccgatcatccggaatgcctggtcgagcaggcggtcaacgaagcgctcggcgaggcgttcgaggcggcgcaggcgttgctcctggagcgcctggggagcgtcacgctggagcagttggcgagcgagttcgagcgccgctatcggccctgctga

SEQ ID NO: 322759 - DNA, 2409 bp, Pseudomonas aeruginosa
atgaaacacgtcgtttccagtgcgttattgctcggtctctcctcgctttccctggccgcccaggccgctcccatcgcccttgaccttcccgcccagcccctggccgcatccctcgagcaattgcagggcgccagcggcctgcgcatccgtttcgaccgcgcggccgtggccgaccggcgcgcaccggccctacgcggcacgctggagccaagcgaggcactgcagcgtctgctcgcaggttccggactgagcggggaggtacggggcggcgacgcctgggtcgaggccgcggcgacaggtgccggcatcgcccccggcgacagcgtcgacctcggcgcgctcagcgtggtcgccacccaggacccggccaccgccgccatcaccgaagacagcggctcctacaccacgcgggcgatgcgcacctcgaccaagctggcgatgtcgatccgcgagacccctcagtcggtcagcgtggtcacccgccagcgcatggacgaccagggcatgcgcgacctcaacgacgcggtgaagggcgtcaccggcctcaccgtgcaacagtacgggccggcccgggtgaagtacgcggcgcgcggcttcgacgtcgacaacatcatgtacgacggcctgccgacgagcatttccacctatacccaggacgtcatttccgccgccgacctggccatgttcgaccgcgtcgaagtggtgcgcggcgccaccggactgatgcagggcgcaggcaacccggcggcggcgatcaacatggtgcgcaagcgtccgacccaggacttccgcgcctccctgcaaggcagcgtcggcacctgggaccgctatcgcagcgaggccgacgtttccggcccgctgaacagcgaaggaaccctgcgcggccgcgcggtggtcgcctaccagaaaggcaacagcttccaggaccacgtcagcagcgaacgcggcgtgttctacgggatcgccgaagccgacctgagcccggacaccaccttcgccatcggcgcctcgaaccagaacgacaaccgcaacgacaactgggtaggcctgcccagcccgctgggcggccgccacctggacctcaagcgctcgtcctattacggcgccgactggtcctactgggataccgacaccacccacctgttcagcgacctgacccaccgcttcgccaacggttggcagatgaagctggccgccgacaagctgtgggcgcgaatcaacatgctcgggctgtacaacgactgctactactcgaccaccggctgcgccagcatgacccagaaccccggcgactacagctacaccgacgaccacgacagctatgacgcctatgccaacggtcccttccagttgctcggccgcgagcacgagctggtggtcggcgccagctatcgccaggaacgcttcgacggccacggcggctggggcagcctgttcaacaaggacggcacccccaccgggccgatggacccgacccagtgggacccgagctcgactctcaagccgaggctgaacaccagcctgtggggcatgaagctcgaccaggaacagaaaggcgcctacctcaccacccggttgaacctcgccgacccgctgaaagtgatcctcggcgggcgcctggactggtacaaggccgacgccgataccgacagctacaaggtcacccgcaacgtcacccgctatgccggggtgatctacgacctgaaccagacctactcggtctacgccagctataccgacatcttcaagccgcagagcaacttcgacgccggcggcggcctgctcgacccgatcaccggcaagaactacgagatcggcctgaagggcgaacacttcggcggcgcgctcaattcgcagatcgctctgttccagatcgaccaggaaaaccgcgccaccgaggacgtcggcggcccctcgccatgccccttcagccccacctcgcgctattgctcgcgcgcttcgggcaaggtccgcagccagggcgtcgacctggagctgagcggtgcgctgagcgacgactggcagatgatggccggctatacctacgtcgacgccaagtacaagcacgacagcaacaaggccaacgagggcaagccattcgacgcggccaagccacgccacctgttcaagctcgccaccagctatacgctacccggcgaactgcacaaatggcgcgtcggcggcgacctggccacccagagcaagaccgaggacagcagcaccggtttccagcagggcggctacaccgtggtcaacgccatgctcggctacaaggtcaacgaacggatcgacacgcggctgaacttcaacaacctgttcgacaagtactattacagcggcatcgacttcggcaacctcaactacggcgagccgcgcaacctgatgttcacggtgaagtactcgctctga

SEQ ID NO: 322760 - DNA, 819 bp, Pseudomonas aeruginosa
atgtcgtccaccatccaccccctcccgtccttcggtctcggcaccttccgccttaccggccaggtcgtcgtcgactcggtgcgcagcgccctcgaactgggctatcgcgccatcgataccgcgcagatctacggcaacgaggcggatatcggccgcgcgatcgccgagagcggcgtaccgcgttccgagctgttcctcaccaccaaggtctgggtcgacaactacgcccgcgaaaagctgctcgccagcctgcgcgagagtctggagaaactgcgcaccgaccggttggacctgctcctgatccattggccggcacccggcaacggcgtcgagctggcggagtacatggcggcgctggcggaagccaagtccctgggcctgacccggcggatcggcgtctccaacttcaacatcgaactgacccgccaggccatcgccgcggtcggtgcgggcgagatatccaccaaccagatcgaactcagcccttacttgcagaaccgcgagctgaccgcctacctcgaggagcagggcatcgcggtcacctcgtacatgaccctggcctacggcaaggtgctgaaggacccgacgctggccgggatagccgccaggcaccgggccacggtcgcccaggtggcgctggcctgggcgatgcaactgggctacgcggtgattccgtcctcgacccgccgcgagaacctcgccagcaacctgctggcgcgcgacctgcgcctggacgccgaggacatggcgcgcatcgccggcctcgagcgtaacggccgcgaggtcagtccgcagggcctggcgccggcctgggactga

SEQ ID NO: 322761 - DNA, 459 bp, Pseudomonas aeruginosa
atgcaatccctgcacacactggtatcggtacgccccgtggcacccgaggacttcgagcagtggctcgaatactggaaggcctaccaggcgttctatgaagtcgaactctcggcacaggccaccgaggccacctggcggcgcttcttcgacgagggcgaaccgatgcactgcgccgtggccagcgacggtagccgcctgcatggcatcgtcaacttcctctaccaccgctcgacctgggcggcacaggacgtctgctacctggaagacctctatgtctcgcccgacgtgcgcggccagcagatcggcaagcagttgatcgagtacgtccgccggcaggccgaggaacgtcgctgcgcgcgactctactggcatacccaggaaagcaaccacagggcacagcgcctgtacgactgggtagcggacaagccgggtgtgatcgaataccgcatcgagctctga

SEQ ID NO: 322762 - DNA, 1491 bp, Pseudomonas aeruginosa
ttgttcaggcagtcactgctcgagtcggtcaaggcgcgcctcctccatccacagctccaggccctgccgctgcatgcgcgaatccagcgcgcgatccgccaactgatcctcgacggtgcgctggcgccgggcaatccgttgccggcctcgcgggcgctggcgcagtcgttgggggtatcccgcgacaccgtcgaagcggcctattcgcacctgcatgccgagggcttcatcgagcgtcgggtcggcagcggcagcgtggtcgccgcggctacccggctgtcccccggccggcgcggcgcgggcgctccacgacggggcggcggcgcgccgcgactgagccggcgtggcgaggcgatgcaggctggcggcggggttcgcgagcagctcgtcccgcgccccttcgctcccggcgtgccggagacccgcacctttcccctggcgacctgggagcgcctgcagcgccaggtcctcaaggaatacggcgcgcgcgccctgacccatggcgacccgcagggtgccgaaccgctgcgccaggcgatcgccgactacgtcaacctggagcgtggcgcacgggccacggccgaccgggtactggtgctgaccagttcgcaacaggcgctgggtctttgcgccagcgtgctgctcgacgccggcgagcggatattcgtcgaggacccggcctactacggcgcgcgcaaggccttcgaggccgcaggcctggagtgcctgccggtcccggtcgacgaacagggcctgcggcccgagccgatcctcgcccagccgcaggcggcgcgggcgctgtgcctgaccccgtcgcaccattacccgaccggcgtgaccctgtcgctggagcgccgcctggcgctgatcgaatgggcgcagcggcagcaggcatggatcatcgaggacgactacgacagcgagttccactacgccggccggcccaccgcctgcgtgcaaggcctggacgcccacgagcggacgctctacatcggcacgttcaccaagtcgctgtttcccggcctgcgcatcggctacatggtcctgccgccggcgctggtggcaccgatgaccgtcgctcgctccctgcaggacgggcacaacgcctcgctggcgcaactgaccctggcgcgcttcatcgccggcggccatttcggcgtctatgtgcgcggcatgcgcaatctctacggcgagcgcctgggattcctcgcggagcgggtgggcaagcgtctgggcggcctggtcgagccgcgcgtgccggccggcgggctacagatgcccgggctgctttgcgcgggaatcgacgaaacgcgcgccatcgcggcggcataccgcgccggtgtcgagctggtcgggctcagcgccctgcatctcgccgcgccaccgcgagcgggtttcctgatgggcttcgccgcctacaccacggacgagctggaggcggcggtcggggtcctcgcgaagaccctgcgcggtttgcgtgcgaatccctag

SEQ ID NO: 322763 - DNA, 327 bp, Pseudomonas aeruginosa
atgcagcgactcttcgtctacggcagcctcggccccggccgtcccaacgaacacctgatgcagaagatcggcgggcaatggcaggcggccagcctccgcggtcgcctgctggaaaagggctggggtgccgggatgggctttccgggcctggcgatcgacgccgacggcgaggaaatccacggccatgtgttcgtctccgaccgcctcgccgagcactggcccgcgctggatgaattcgaaggcaccgaataccggcgcgtggcgacccgggtaacgctggccgacggcgcccaggtcgatgcctacgtctacgccctgcgcgactga

SEQ ID NO: 322764 - DNA, 1710 bp, Pseudomonas aeruginosa
atgatcgaggtcaccgaggtttccatcgccgagctgcgtgacgcgctcgagtccggtcgtaccacggcggtcgaactggtccaggcctacctggcgcggatcgacgcctacgatgcacccggcacgcccaccgcgctgaacgcggtggtggtgcgcaatcccgatgcgctggccgaagcgcaggcctccgacgcccgacgggcgcgtggcgagcccctcggtccgctggacggcattccctacaccgccaaggacagctacctggtcaagggcctcaccgcggcttccggcagcccggcgttcaaggacctggtggcccagcgcgatgccttcaccgtcgagcgcctgcgcgccgccggggcgatctgcctgggcaagaccaacatgccgcccatggccaacggcggcatgcagcgcggcgtctacggccgcgcggagagcccgtacaatgccgcctacctcaccgcgcccttcgcctcggggtcctccaatggcgccggcaccgccaccgcggccagcttcgccgccttcggcctggccgaggaaacctggtcgagcgggcgcggcccggcgtcgaacaacggcctgtgcgcctacaccccttcgcgcggggtgatctcggtgcgcggcaactggccgctgacgccgaccatggacgtggtggtgccctatgcgcggaggatggccgacctgctggaaatcctcgacgtagtggtcgccgacgatcccgatacccgcggcgacctctggcgcatgcagccctgggtgccgatccccaaggcctccgaggtacgcccggcgagctacccggccctggccgcaggcgccgaggccctggccggcaagcgcttcggagtgccgcgcatgttcatcaacgccgaccccgatgcgggcaccagcgagtcccccgggatcggcggcccgaccggccagcgcatccatacccggccctcggtcatcgccctctgggaacaggcgcgcaaggccctggaagccgccggcgccgaagtgatcgaggtggacttcccgctggtgtcgaactgcgaaggcgaccgacccggcgcgcccaccgtgttcaaccgcggcctggtgtcgaaggaattcctccacgacgagctgtgggaactctcggcctggggcttcgacgacttcctgcgcgccaatggcgatccgaagctgaaccgcctggcggatgtcgacggcccgcagatcttcccccacgaccccggcaccctgcccaaccgcgagggcgacctggccgccggcatggacgaatacgtgcggatggccgagcgcggcatcaagccctgggaccggatcgcgaccctccccgatggcctgcgcggcctcgaggaaacccggcggatcgacctcgaggagtggatgcgacgcctgcgcctggacgccgtgctcttccccaccgtcgccgacgtcggcccggcggacgccgacgtcaacccggcctcggccgacatcgcctggagcaacggtgtctgggtcgccaacggcaacctcgccatccgccacctcggcgtgccgacggtcaccgtaccgatgggggtgatggccgacatcggcatgccggtgggcctgaccttcgccggccgcgcctacgacgactcggcgctgctgcgcttcgccgcggccttcgagtcgaccggctcgcggcgtatcgtgccgccgcgtactccaccgctggcaagcaagtga

SEQ ID NO: 322765 - DNA, 717 bp, Pseudomonas aeruginosa
atgacgaatcatcgtaccgcgctggtcaccggcgccacccgtggcatcggcctggccctggccaggcgcttggcggcctccggctggagtgtagtgggcatcgcccgccatgccagcgacgactttcctgggcgtctgctgtgctgcgacctggccgatcctgcgcaaaccgccgagacgctgcgcggattgctctcggaaagcgccgtggatgccttggtcaacaacgccgggatcgccttgccgcaaagcctggagaacctcgacctggccgctctgcaacaggtcttcgacctcaacgtgcgggtcgccgtgcagcttgcccaggcctgcctgccggggctcaagcgttcgccggcgggccgcatcgtcaacctgtgcagccgggcgatccacggcgcccgcgaacgcaccgcctacgccgcggcgaagagcgcgctggtcggggtgactcgcacctgggcgctggagctggcgccgctgggcatcacggtcaacgcggtggcgcccgggccgatcgagaccgagctgttccgccagacccgcccggtcggcggcgaggaggaacggcggattctctcgaccatccccatgcagcggctcgggcggccggacgaagtggccgcgctgatcgagttcctgctcagcgagggcgcttcgttcgtcaccggccaggtgatcggtgtcgacggcggcggcagcctgggcggtcgttga

SEQ ID NO: 322766 - DNA, 1032 bp, Pseudomonas aeruginosa
gtgaacggtctccacgccctgcgcctgggctccctgtcgctgcgttggcggccacgggcggcgctggcctgcctggtcctcgcgggggtcggactggcgctggcggcggcgctgctggggaccggcagcctggcgctgggcccggcagaggtgttcgccagcctgctcggccagggccaggaccccaccgcccagcgcatcgtccagcgcgtacgcctgccacgggtgctcaccgcctgcctggtcggcgccgcgctgggcatggccggggcgatcttccagtcgatctcgcgcaatccgctgggctcgcccgacgtcatcggtttcaccaccggcgccgccagcggcgccatcgtgcagatcatcctgttcgatgccggcccgctggccacctcgctggcggcgctggccgccggcctctgcacggcgctggcggtggtgctgctggcgcgccggggcgccaccgccggcggctaccgcctggtgctggtgggcatcggtgtcggcgccagcctgtcgggcctgaacagcctgctgctggtcaccggcaacctcgaccaggcgatgtacgcccagctctggctggccggctcgctgaacacccggacctggtcgcacgtcgtcccggcatcgctgggcctgctcgccagcgtgccgctggcgctgtaccacggtcgtcgcctggaagtgctggagctgggcgatgccagcgccgcccagctcggcgtggcggtggagcgcgtgcgcttgcagatggtcctggtcgccgtcggcatgaccgccatcgccaccgccgcggccggccccatcgccttcatcgccctggccggcccgcaactggcccggcgcctgacccgctcggccggggtgccgttgctgtccggcgcattgatgggcgcggtcctgctgctggccgccgacctgctcggccagcgcctggcatacgtcgccaacctgccgatcggcctgatgaccggcctgctcggcggtttctacctgctctggctactgctacgcagccgccggatctga

SEQ ID NO: 322767 - DNA, 1023 bp, Pseudomonas aeruginosa
atgcaggcgtccccgatgcgccgccggcgcctgcgcgcctggggcctgctcgccggcgcgctgctgctcgcgctggcggccctggccagcctggcgctgggctcgcggccggtgcccctggcggtcaccctggacgccctgcaagccgtcgatccgcacgatgatcgccacctggtggtacgcgaactgcgcctgccacgcaccctggtggcgctgctggccggcgcggcgctgggagtggccggcgcgctgatgcaggcgctgacgcgcaatccgctggccgaacccggcctgctggggatcaacgccggcgcggcgctggcggtgatcgtcggggtcgcgctgttcgacctggcgagcatgggccagtacctcggttgcgccttcctcggcgccggcctggccggcatcgccgtattccttctcggccaggcccgcgagaccggcaccaacccggtgcgcctggtgctggcgggtgccggcttgtcagtgatgctcgcctcgctgaccgggatcatcgtgctgaacgccccgccggaagtcttcgaccgcttccgccactgggccgccggctcgctttccggcagcggcttcgccctgctcggatggccgggcctggccatcggcgccgggctggccgccgccttcgccctcgccgccaggctcaatgccctggccctgggccaggagatcggccgggcgctcggcgtcgacctgcgcctgacctggctgctcgcctgcctggcggtgatgctgctggccggcgcggcgaccgccctggccgggccgatcgccttcgtcggcctggtcgccccgcacctcgcgcgactgctggccggaccggaccagcgctggatcctgcctttctcggcgctgatcgccgccggcctgctgctcggcgccgacatcctcgggcggctgctggcggcgccggcggagatcgccgccggaatcgtcgctttgctgctcggcggaccggccttcatcgtcctggtcaggcgcttccgcctgagccgcctgtga

SEQ ID NO: 322768 - DNA, 906 bp, Pseudomonas aeruginosa
atgccgacccgccgccgctccgccctgccgttactcgccctcgccctgagcctgttcgccaccctcgccgcggccggggagccgaagccggcgcggatcgtctccaccaccccgagcgtcaccggcatcctgctggcgatggacgcaccgctggtggccagcgccgccaccacgccaagtcgcctgaccgacgccaagggcttcttctcgcaatgggcgaaggtcgccgaccaacgtggcgtcgaggtgctctaccgcaacctgcgcttcgacatcgaagcggtgatcgcccaggatccggacctgctggtcgcctccgccaccggcgccgacagcgccgcgccataccgtgcggagctggaggcgcagggtgtaccgacgctggtggtcgactactcgaaacacagctggcaggaactggctaccgagctgggccggcacaccggcctggaacgccaggcgcaggccgccatccagcgcttcgacgcctacaccgccgaagtcgccacgaccatcgcgccgccgcagggcccggtcagcgtggtcggctacaacatcgccggcagctattccatcggccgtcaggccagcccccaggcacgcctgctcgaggccctcggcttccaggtggcggaactgccggaggcgctggcgggcaaggtgacgcgcgcctcggacttccagttcatctcgcgggaaaacctgcccgccgccatcgccggcgacagcgtgttcctgctcggcgccagcgacgacgacgtgcaggcgttcctcgccgacccggtgctggccaacctgtcggcggtccgcgaaaagcgcgtgtacgccctgggccccagttccttccgcatcgactactactcgggacggcagatgatcgacaacgtcgcccgccatttccgctga

SEQ ID NO: 322769 - DNA, 798 bp, Pseudomonas aeruginosa
atgacccatcgcctgcacgcggacgccgtgaccttgcgccgcgacgcgcggatcgtttcgcggaatctctcgctggccatccccgagggttcgttcagtgtgatcgtcgggcccaacgcctgcggcaagtcgaccctgctggcggcattgtcgcgcctgttggcgccggccgagggccgggtggtgctggacggcagggatatccacagcctgccgggacgggaagtggcgcggcgtctcggcctgctgccgcagagcgcgctggcgccggatggcatcacggtggccgagctggtggcgcgcgggcgctatccgcaccagtcgttcctgcgccagtggtcgccggcggatgagcgcgcggtagcggcggcgttacgcgccacgcgggtcgacggcctggccgagcgaccgctcgatgcgctctccggcggccagcggcaacgcgtgtggatcgccatggtgctggcgcaggaaaccccgttgctgctgctcgacgagccaaccacctacctggatatcgtccaccagatcgaattgctcgaactgctcgccgagctgaatcgccaggggcgcaccatcgtcgccgtgctgcacgacctcaaccaggcctgccgctatgcctcgcacctgatcgccatgcgtgacggcgcgatcctcgccgagggcgcgccggcgcatatcttcaccgagcgtctggtggaggaggtgttcggcttgcgctcgttgatcatcgccgacccggtcagcggcacgccgctgctggtgccgcgcgggatcgccgccgacgcgccgggctga

SEQ ID NO: 322770 - DNA, 819 bp, Pseudomonas aeruginosa
ttgaatacttcgcagcccccggcggacgagatgccggacgccccgggcgaaaagcgctccggcaccatccagtcggtgtccatcgccgcgcgcttcctgaagaccctggccaacgccgaaggcgaactggccctcggcgaagtggcccggcgcaccggcaccggcggctccaccgcgcaccgctacctgcagagcctggtgaaggaaggcctggcccgccaggacccgctcagcggtctctacgacctcgggccggcggcgctgagcatcggcataggcgcgctgaagcggatcgacgcggtggatatcgccgcccgccacatgaaggccctggcccaacggcatgccgccagcggcggggtggcgatctggaccgagcgcggcccgaccctggtgcgctggtaccgcagcgcctatttctcgatcaacccgctggccctgggcgatatcctgcccatcgacaataccgcttgcggcctggtgttccaggccttcctgccgaaggccgtggtcgacgccgcgcgcaagcagcaaccggcgcacttccgcggcagcccgccgagccgcgcgctgctcgacgaggtgcgtgagcgctgctgggccgaactgaccagccacctgctgtcgaatgtcaccggccaggcggcgccggtgttcgacgcccagcaggagatcgtctgtgccatgaccacggtgaccgatctcggccagttgcagtcggcggaagaccgcgacgcgctgttccacgaggcgctgcaggtcaaccagtccaccggtggcctggtactccaccccggcatgcggccgccgccgcgctga

SEQ ID NO: 322771 - DNA, 2085 bp, Pseudomonas aeruginosa
ttgaacgcccgcacgcaccgcacgctcaaccggggaatcggcgtcgtcacgctgtccaccctgctcgcctcgccatcggcactggcccgggaaaacccgcccgccgaggacgaacccgccgccctcgaggcgctggtcgtgaccggcgagaaacgtgaacgctcgctgaaggacacggcgtcctcggtatcgctcaccagcgcccgcgacatcgaccgcaagcagaccggcaacgcctcggtcgccgaggtgatcaatggcagtcccaacgtggtctacaccgactcggtgggcgcgccgatcatccgcggccaggacacccagggcccgaacaacgggcagaacgtgttctggggcggcacagtgccgcgggcgacgatcaacctcgatggccactacctgaactacaacgagatgttcttcggcgcgacctcggtctgggacgtcgacagcatcgaggtgttccgcggcccgcagaccacctcccagggcgccaacgccatcgccggggcgatcatcgtcaacaccaaggacccgaccttcagccccgaggctgcctaccaggcggagatcggcagctaccattcgcggcgcagctcgatcgcagtgtccggcccgctggcgcaggacttcgccgggcgcctggcggtggactacgcgggtcgcgacaccttcatcgactacgacaacccgaagttccaggacagcggcaccgaccaggacttccgcgccctcaacgcgcgcgccaagctgctctggctgcccagcggaattccgggcctggagagcaagttcaccttctcccacaacgacagcaaccgcccgacccaggaagcggcgacccgcccgttcgacaagctcgaccatcgctcgaccaccatgcccagctgggagcaggacaccaacaccagcatccttgacgtcgcctatgacctcgacaacggcatccgcctgttcaaccaggcgcagtactcgctgtcctcggtgcaccgcaccaccggcgcgggcggcgagggcgacgccgatatccgccagaagaacgcctccaacgaatcgcggatcagcttcggcgagcaggaggaccggatcagcggcatgggcggggtctactacgctcgcacccgcaccgacgagacactgcacctgcgcgggctgtcggccttcgacgacacgaagaagaacctcggtgtgttcggcgagctgaactaccgcctgagcgaccgctggaccctgaccaccggcctgcgctaccaggaggatcgcatcgagcgcagcggcaactcggtgctggcgccgcgtccgctggactaccagaagaccttctcggccttcctgccgaaagtctccctggccttcgccgcgaccccggactggaccgtcggcggcctggtcagccgcggctacaaccccggcggcgtgtcgctcaacctgaccacccgcaactgggcctacttcaaggaagaaaccatctggaactacgaactgttcacccgcgccagcctgctcgacggccgcctgctgctgaacggcaacctgttcttcatggatttcaaggacgcccagtacaacatcccggtggtggtttcgccgggggtggcgcagtcgtacaccatcaacgccgagaaggcccacgcctacggcatggagctggacctcgactatcgcctgcgcgacgacctgcggctgaaggccagcgccggcgtgctacgcacccggatcgacgagatgtccggcaataccggctacgagcacaacgagttcgcccgctcgccgggctataccctcagcttcggaccgagctgggacgtcaccgagcgcctcaacctgaacgcccaggtgcgctacctggacggctactactcggacaccgccaacaccaaggcctactcgatcaaggcctacaccctcaccgacgcccgcgccagctaccgcttcaacgaccaggtgcagctctatggctacgtgaagaacgtgttcgacgaccgctcgcccacctacatgcaggaaaaccgggggatcggcggcattgaggcgagcatgacgcagccgcggaccctcggcatcggcatcaagggcaccttctag

SEQ ID NO: 322772 - DNA, 1308 bp, Pseudomonas aeruginosa
atgagtaccccgaaacgcctgcacatcggcatgtcgctggcccccacctggctcagcggcgatgcctggcggcgccccgacagcaatatcgaaggcatcttcggcagcgatttcgccgtcgacatcgccaggcgctccgaagccgcccacctcgacttcgtgtttcgcccggacgtcagcagcctgccactggacgtgctggagaccggctccggcttcgccagcctggatcccaccgtactgcttgccgcggtcgcccgcgaaacctcgcggatcggcctggtgtcgacgatctccaccacgttctatccgccctacgtggtggcccggcagctgcaatcgctgcactggatcagcaacggccgcgccggctggaacatcgtcaccgcgctgcagggccacgagaacttcggcctggacgcgatgcccgatgcggagcagcgctacgcgcgcgccgccgagttcacccggctggtgcacgacctgtgggacagcttcccccgcgaggcactcctggtcgaccgcgagagcggccgctacgccgacgtttcccgggtgcacccggtcgaccacgacggcgaattcctcaaggtcaagggaccgctcaacctgccggccttcggcgaggcgcggattcccctggtgcaggccggcgcctccgagagcgggcgcgacttcgccgcctcggtggccgacctggtgttcgcgccgaccccggacaaggaggctgccctggaactgcgccgcgacctttcccgccgcgccgaacgccacggtcgctcgccgcgcgacgtgcgcctgctgccgggcttcagcctgtacctggcggagagccgcgaggaggcgcgggaaatcttcatgcagacccacgcgcgcctggaccgcgcgcgcaagttcgccacgatcaggcagatgctcggcctcgacctcagcgactggccgctggaccggccgatttccgcggccgacctgccgccgccggtggccgaccccggcagccgcacccacaccgacctgctgcggcgcctgatcgagcgcgagacgttacgcctggaccagttgctgctgcgccccgaggtggtttccgcggcgcactggcaggtcatcggtacggtggacgatgccgtcgagcagatcgtcgactgggccgccgccggcgccatggacggtttcatcgccgcgccgggaggctcggtcggctcgctgcggctgttcctcgaacaggtggtgccgcgcctggtggagaaggggctgttccgcgagcgctacagcgccactaccttcgccgggcacctggcagaggaatga

SEQ ID NO: 322773 - DNA, 669 bp, Pseudomonas aeruginosa
atgtccctatcccgtcgcatccccgccgctctttccccgttccagaaccgcgtcatcggagcctgcctgctcggcggcctgctggcggccggcgccccggcgcaggccgaggaggcgaccggcaacgcgcgctgggtgagcgacagcctgaccactttcgtgcgcagcggccccaccgatggctatcgcatcgtcggcaccctcacctccgggcagaaggtcgagctgcttggcacccagggcaactacagccaggtgcgcggcgagaacggcagcaccgtgtggattcccagccgcgacttgcaggaggttcccggccaggccgagcgcctgccgcaactggaacagaaggtggccgccctgaccgccgagctggacggcatcaacgacacctggaagacccgcgtgcagggcatgcaggaaaccctcgacacgcgcaagaagctgatcgacgaattgcaggcggcgcgcagcaacctggacgccgagctcggcaaggcccgctccgacctgcgtgcggtgcaggcgcaactgggcgacgagaacaagcaggtgctgatgcgctacatggtctacggcggcagcatcgccggcgccggcctgttcgccgggctgatcctgccgtcgctgctgagggtgcggcgcaagcgcaacgacaagtggttctga

SEQ ID NO: 322774 - DNA, 1092 bp, Pseudomonas aeruginosa
atgaacagttccccgcaagccaacgcggcgatgcgcgccgccgtctggcacggccgccacgatatccgcgtggaagacgtgccgctcccggccgagccgccgcccggctgggtgcagatccgcgtgcactggtgcggcatctgcggctccgacctgcacgaatacctggccggcccggtattcatccccgtggaggcgccgcacccgctcaccggcctcaaggatcaatgcatcctcggccacgagttcagcggcgaaatcgtccgcctcggcaacggcgtgaccagcttcgccgtcggccaggcggtcgccgcagacgcctgccagcattgcggcacctgctactactgccggcatgggctgtacaacatctgcgagaacctggccttcaccgggctgatgaacaacggcgccttcgccgaatacgtcaacgtaccggccaacctgctctacgccctgccggccggatttcccagcgaggccggcgcgctgatcgagccgctagcggtgggcatgcacgcggtgaagaaggccggcagcctgctcgggcagaacgtggtggtggtcggcgccggcaccatcggcctgtgcaccatcatgtgcgcgcgcgccgccggcgcggcacaggtgatcgccctggagatgtcctcggcgcgcaaggccaaggccctggaggtcggcgccagccaggtgctcgacccctcgcgatgcgacgccctaggcgaaatccgcgccctcaccggcgggcttggcgccgacgtcagcttcgaatgcatcggcaacaagcacaccgccaagctggccatcgatgccatccgcaaggccggcaaatgcgtgcttgtgggaatcttcgaggagcccagtgaattcaatttcttcgagctggtttccaccgagaagcagttgctcggggccctcgcctacaacggcgagttcgccgacgtgatcgccttcatagccgacggccgcctcgacatcgcaccgctggtgaccggtcgcatcggcctggaagaaatcgtcgagcgcggtttcgaagagttggtgaacaacaaggagcacaacgtgaagatcatcgtctcgccgggcggctga

SEQ ID NO: 322775 - DNA, 1113 bp, Pseudomonas aeruginosa
atgagccggatccatacactgaccatgcccaagtggggcctgtcgatgaccgagggtcgggtggacgcctggctcaaggaagagggcgcgcatatcgagaaaggcgacgaggtgctcgacgtggagaccgacaagatctccagcagcgtcgaggcgcccttctcgggcgtgctgcggcgcaaggtggcgcgcgaggacgagaccctggcggtcggcgcgctgctcggcgtggtggtcgagggcgaggcgagcgacgaggagatcgacgcactggtgcaacgcttccaggccgaattcgtacccgccgacgaggacgctggggatagcggaccggcaccgcggaaagtcgagctggacgggcgcctcctgcgctatttcgaccgcggcgagggcgatccggcgctactgctgatccacggtttcggtggcgacctgaacaactggttgttcaaccacgaggcgctggccgccgagcggcgggtgatcgctctagacctgccgggccacggcgagtccggcaaggccctggtgcgcggcgacctcgatgaactcagcggcagcgtgctggccctgctcgaccacctcgacctggaacaggtacacctggccggtcactccatggggggagcggtggcgctgaactgcgcgcgcctggcgccgcagcgggtgctgtcgctgagcctgatcggcagcgccggcctcggcgaggagatcaacggcgactacctgcgcggcttcgtcgaggcggccaaccgcaacgcgttgaagccgcaactggtgcagttgttctccgaccccgcgctggtcacccggcagatgctcgaggacatgctccgctacaagcgcctggaaggcgtcgatgcggccctgcgccagttgctggacaacctgttcgccgacggtcgccagcgcaacgacctgcgtgccgtggcgagcgagggccgccagccggtcctggcgatctggggcagcgatgacgcaatcatcccggcgcggcatgccgagggcctgccagcccaggtggagatcattcacggacaggcgcacatggtgcagatggaagccgccgagcaggtcaaccgcctgctgctcgacttcctccgccagcattga

SEQ ID NO: 322776 - DNA, 1020 bp, Pseudomonas aeruginosa
atggcgagaaagatcagctaccagcaggccatcaacgaggcgctggcccaggaaatgcgccgcgacccgagcgtcttcatcatgggcgaagacaatgccggcggcgccggcgcgcccggcgaggacgacgcctggggcggcgtgctgggggtcaccaagggcctctaccaccagttccccggccgtgtgctggataccccgttgtcagagatcggctatgtcggcgccgcggtcggcgccgccacccgcggcatgcgcccggtgtgcgaactgatgttcgtcgacttcgccggttgctgcctggaccagatcctcaaccaggccgccaagttccgctacatgttcggcggcaaggcggtcaccccgctggtgatccgtaccatggtcggcgccggcctgcgcgccgccgcccagcattcgcagatgctcacttcgctatggacccacatccccggcctcaaggtggtctgcccgtcgtcgccctacgacgccaagggcctgctggtccaggcgatccgcgacaacgacccggtgatcttctgcgagcacaagctgctctattcgatgcagggcgaggtacccgaggagctgtacagcgtacccttcggcgaggcgaacttcctccgcgacggcgacgacgtcaccctggtgacctacggccgcatggtccacctggcgctggacgccgccgccagcctggcgcgccagggcatctcctgcgaagtactggacctgcgcagcaccagcccgctggacgaggacagcattctcgaaagcgtggaaaagaccggccgcctggtggtggtcgacgaagccaacccacgctgctcgatggccaccgacatcgccgcgctggtcgccgaacgggccttctccgcgctgcgcgcgccgatccgccgggtcaccgcgccccatacgccggtgcctttctccgacgccctggaagacctctacatccccgacgcggcgaagatcgaggcagccgtgcgccaggccctggaagggagggacgcggcatga

SEQ ID NO: 322777 - DNA, 921 bp, Pseudomonas aeruginosa
atgtccactctgagcaccgaccaactgctccatgcctaccgcgtgatgcgcaccatccgcgccttcgaggaacgcctgcacgtcgagttcgccacgggcgagatacccggcttcgtccacctctacgccggcgaggaagcctccgccgccggcgtgatggcgcacctgcgcgacgacgactgcatcgcctccacccatcgcggccacggccactgcatcgccaagggcgtagacgtgcacggcatgatggcggaaatctatggcaagaagaccggggtctgccagggcaccaccgcatcgctgcctttcagcttggccgccggcgccgcgctggcggccaagctgaaaggcagcgatgcggtggcggtggccttcttcggcgatggcggctccaacgaaggcgcggtgttcgaggcgatgaacctggccgcggtgtggaacctgccgtgcctgttcgtcgccgagaacaacggctatgccgaggccaccgcggccaactggtcggtggcctgcgaccacatcgccgaccgcgccgccggtttcggcatgcccggggtgaccgtcgacggcttcgacttcttcgccgtccacgaggctgccggcgccgccatcgagcgcgcccgcgccggcgaggggccgtcgctgatcgaagtcaagctgacccgctactacggacacttcgagggcgacgcacagacctaccgcgatcccgacgaagtaaagcactaccgggaaacccgcgactgcctcaagcagttccgcgaacgcacctgccacgccggcctgctctccgccagcgacctggacgccatcgacgccgaggtcgaggcgcgcatcgaggatgccgtgcagcgcgcgaagaacgatcccaagccggagccggacgacctgctgcgcgacgtctacgtgtcctatccctga

SEQ ID NO: 322778 - DNA, 1041 bp, Pseudomonas aeruginosa
atgaccccgccctcgccgatcgtcggcatcatcgccaacccggcctccggtcgcgacctgcgtcgcctcaccgcccatgccgggctgcactccagcaccgacaaggcatcggtggtgcaacgcctgctcgccgccttcggcgccaccggcatccgccatgcgttgctgccgccggacatgaccggcatcgccgccgccgtgctccgggccagccagacccgccaggcccgcgacggccactggccgttcctggagttcctcgacatgccgctgcgccagagcgtcgaggatacccgcctggcggcgcggcgcatggtcgagcgcggcgtggcgctgatcgccgtgctcggcggcgacggcacgcacaaggcagtggccgccgaggtcggcgacgtccccctgctggcgctgtccaccgggaccaacaacgctttcccggagctgcgcgaagccaccggcgcggggctcgccggcggcctctgcgccagcaaccgggtgccgccggagatcggcctgcgacgcaacaagcgcctgctggtgcgcgagccgcgccgcgggctctgcgagtgggcgctggtggacgtcgcggtgtcgccgcagccgttcatcggcgcccgcgccatcagtcgcgccgaagacctcgccgaagtcttcgtcagcttcgccgaaccccacgccatcggcctttcggcgctttgcggactgtggtcgccggtgagccgcgaggagccccacggcgcctggatgcgcctgcatccggacgcccgcgagagcctgctggtgccgctggcgccgggcctgctggtgggctgcggggtctctgccgccggctacctgcaacccggcgtggcccacgcaccgagcctgtccagcgggaccctggcgctggacggagagcgcgagatcgagttcagcgccaccgaccgcccgagcatcaccctcgacccttccggcccgttcagcgtcgatgtgccggccaccctcgcctacgccgcccgccatcgcctgctggccggccagcgaaccccgatgaccccgtga

SEQ ID NO: 322779 - DNA, 801 bp, Pseudomonas aeruginosa
atgcacgctacgtcgtccgacgatttctccctgtcttcccgggtcgcgctggtgaccggcgccggacgcggcatcggccggggcatcgccctcgccctggcgcgcgccggcgccgacgtggcggtggccgacctcgatccgcaggtcgccgaggaaaccgccgccgcgatccgcagcctcggtcgccgcagcctggcccttggggtcgacgtcagcgacggcgacagcgtccgggcgatggtcgagcgggtcgccacggagttcggccggctcgacgtggcggtgaacaatgccggggtgatcagcatccgcaaggtcgccgaactcagcctcgccgactgggaccgggtgatgaacgtcaacgcccgcggcgtgttcctctgctgccaggccgaactgccgctgatgcaggcgcagcgctgggggcggatcgtcaacctgtcatcgatcgccggcaaggtcggtctccccgacctcgcccactactgtgcctcgaagtttgccgtgatcggtttcagcaatgccctggccaaggaggtcgcgcgcgacggggtgacggtcaacgcgctctgcccgggaatcgtcggcaccggaatgtggcgcggcgaggacggcttgtcgggccgctggcggcaggccggcgaaagcgaggcgcagtcctgggaacgccaccaggccagcctgctgccccagggcgaggcgcagaccgtcgaagacatgggccagctcgtcgtctacctggcctgcgcgccgcacgtcaccggccaggccatcgccgtcgacggcggattctcgctatga

SEQ ID NO: 322780 - DNA, 1878 bp, Pseudomonas aeruginosa
atgctttccgcacactcgaaggaccatgtggactgtgtcagccgtgtcctgaggaacgccgcgcgcctgccgcaggcgccggtgccgacgccgatcctcgactcctggcgccgctccatggagcagcaccgtctcgacccggggtccctgcaagggccgcggatcctctcgcagaccctcctcgacgaatgtcgcgagcgttccgaactgttcctgcgcatcgccagcgaagaggtggcgcgactgcatggacgggtgcgcgatgccgactactgcgtactgctcaccgatgcccaggggcggaccatcgactaccgtgtcgagtcgaccatccgcaacgactgccgcaaggccgggctgtatctcggcacctgctggtcggaaggcgaggagggcacctgcggggtggccgccgtactcaccgacaggactgcggtgacggtgcacaagcgcgatcacttccgcgccgccttcatcgacctgacctgttccgcggcgccggtcttcgatccgcagggcgagttgctcggtgtgctcgacgtttccgccgtgcaatcgccggacgaccgccgtagccagcatctgatccggcagatggtggcgcagagcgcgcgggagatcgagaacgccttcttcatgcacagcgcccagggccattgggtgctgcgcgcgcaccgtgcgccgggctacgtcgacagccagccggactacctgttcgcctgggacgccgatgggcgcctgctggcgttgaacccggcggcgcggcactacctgcggcagcgcctggggcaggtgccgagccacatcggcgaggtgttcgacctcgacgccctgcacgccgccgccgaccaggcgccgtgcctgctgcgcggccaggccggcgagctgcacgtgcgtctcagcgcgccgcgggccaaggcgcggcggctggagcgcgaggtgcccgacgacgctgcgctcgacccgcgcatcgccgaaagcctgcgcctggcggtgcgggtcaaggaccgcaacctgccggtgctgatccagggcgagaccggtgccggcaaggaggttttcgcccgccagttgcaccaggccagcgcccgtcgcgacaaacccttcgtcgcgctcaactgcgcggcgattcccgaaagcctgatcgagagcgagctgttcggctacgttggcggagcctttaccggcgcggcggcgaaagggatgcgcggcctgctgcagcaggccgatggcggtaccctgttcctcgacgagatcggtgacatgccgctgggcctgcagacccgcctgctgcgcgtgctggccgagggcgaggtggcgccgctgggggctgcgcgccggcaggctgtggatatccaggtgatctgcgccacccaccgcgacctggcggcgctggtggcggccggcggcttccgcgaggatctctacttccgcctcggcggcgcccgcttcgaactgccgccgctacgcgaacgcagcgaccggctggcgctgatccggcgcatcctcgacgaggaaaccgcgcactgcggcgtacgcatcgaactcggcgaggcagccctggaatgcctgctcggctatcgctggccgggcaatgtccgccagttgcggcatgtgttgcgctacgcctgcgcgctgtgcggcggcgccaccctgcaactcgccgaccttccggcagagctgcgtggcgaaggccggacaccggccagtgcgtgcgagagcggcggcggtccggagcgcgacgccctgctcgacgccctcgtgcggcatcgctggaaacccatggccgcggcgcgggaactgggtatctcgcgagcgaccctgtatcggcgggtgcgccggcatggcatccgcatgccgggccaggcggacgactga

SEQ ID NO: 322781 - DNA, 612 bp, Pseudomonas aeruginosa
atgccgctagccctgctgctcgccatgggcgcgttctccctgagcctgtcgatttcccccggtccggtgaacctgaccatcgtcgcttccggcgccaaccatggtttccgccggaccctgccgttcgtcaccggcgccaccctcggcttcgtcctgctgctggccttcgtcggcttctggttcgtccgcgcgatcgaggcctacccgcgcttcttcgactacctggggatggccggcgcggcgttcatcgctcatgtgggctaccgcatcgccaccgcggatccacgcctggccctggaggaaaacggggtccccgggttcttccagggcgtgctcctgcaatggctcaatcccaaggcctggatcgcctgcgcttccggcgtggccttgttcgccagcccgagcacgcacgcgccgctgctggtcttcatggccatctacctggtggtctgctacctctcgctggccgcctgggcactgctcggtgaccgcgtggcgctgctgctcgacagcccccggcgggtgcgcctgttcaatcgggcgatgggcggcaccctggtgctgaccgctggctacatgctctacctgcagctcgccgctagcccggattga

SEQ ID NO: 322782 - DNA, 891 bp, Pseudomonas aeruginosa
atgatcgacgacatccgctacctgatcgtattcgccaagatcgccgagaccggctccgtctccggcggcgccgaggcgctgggcctgagcgccgcgaccgccagcctgcacctgtccaggctggaacggaacctgggccgtgcactgctctaccgcaacagccgcaagctgtcgctgacccaggacggcacgcagttgctggacaccgcccgctccatgctggaactctacgagaagggcttcatcgagttccgccagcgcgccgtctcgacccgcaacagcctgcgcatctcgatgcccgcggtgttcgtcaacggcgacttcacccgtcacctggcagccttcatcgaggagcatcccgacctcgacctcggcatcgcctgcgacgacagccgccacgacatcatcggcgacggcatcgacatcgccttccgcatcggcgacctgccggacagctcgctgaaggcccgtcacctgttcctgctgccgcgccaggtagtggcggcaccggcattcctggcccggcacgcgccgctggaacacccgcgcgacctgcagcggctggaatggatcgggctcggcatgcgccccgacagccggctattccgtcatgcgcgggacgacgaggaggtacgcgtcgactacaccccgcgggtgcgcgtcgacagcgtcgaagcctcctgccgcctggcccgcctcggcgtcggcctggccgcgccgccgacctacctgagcgacgagccgatccgccgcggcgagttgcgcgcggtgctgccggaatggcgcctggagccgttgaaggtgtatgcggtgtggccgcccaacgtacccgccagcagcatcgcctataccctcatcaatcgcctctacgaggccttcaatccgggctag

SEQ ID NO: 322783 - DNA, 729 bp, Pseudomonas aeruginosa
gtgcgcgacctcggccacggtgccaacgacgagtccggcaagagcaacggaggcaagccggcgatcgccttgagcggtccggcagggatcgccgcggcgacgccggcgagcctgaccctggccgccggcgagcacgtcgacagcgtggcccggcagaaccagcaggtgaccgccgggcagaaggtggtgatcaacgccggcagcgacatcggcctgttcgcccagggcggcgagctgcgccagatcacccaccaggggccgatgctgctgcaggcgcagaagaacgacatccgcctggaggccgagcagagcgtggaggtcagcgccagccagcagcacgtgctggtcaccgcgaaggagcacatcaccctgatgtgcggcggcgcctacctgaccctcaagggcggcaacatcgagctgggcatgcccggcaacttcgtggtcaaggcggcgaagcatagtcatgtcggtcccgctcatgcatcgaccagcttcaacgcctgggattcgacaccgttcgatgaccggtatgtcctgcgcgacgaagccacgctggagccgttacccaatatcgccgttgaagtgatacgaggcgatggtggtgtggtgaaactgatgaccgacagccagggccgtttacccaagcaacaacacctggccatggacccggtgcagatacgcatcctgggcaagggcagtcacaacagcgacacggagtccaacacatga

SEQ ID NO: 322784 - DNA, 1710 bp, Pseudomonas aeruginosa
atgagcagcgaaccgctcgagccgaatcatgatgtgatcatccctcgctctcgcgacaggctgggacggcctgtctacaaggcgcagttgacccgtaccgacaaccagagcgaaaaggtggcgctggttcggcagaccgctcccctgccggtgatcttcattccggggatcatgggaaccaacctgcgcaacaaggcagacaagagcaagatctggaggccgccgaacggtctctggcccatggatgacctgtttgcctcaatcggagcgttatggacctggtattggcgagatgcaaaggctcgtcaaagattgctgaaagcggagagagtggaagtcgatgaccagggtacgatcgatgtcggtcaatctggtttgtccgaagaagctgcccgcctgcgcggctggggcaaggtcatgcgcagtgcgtataacccggtcatgggattaatggagaggcgactggaaaacatcgtcagccgccgggaactccaggcatggtggaatgacgaagccctctctcctcctgcagatcagggtgaggagcagggaaaggttgggccgatcgatgaagaggaattgctcaaggccagccgataccagttcgacgtctggtgcgccggttataactggctacagtccaaccggcagtcggcgctggatgtacgcgactacatcgagaacacggtgttgcctttctaccagaaggagcatggtctcgatcccgagcaagtgagtcgtatgaaagtcattctggtcacccactcgatgggagggctggtggcgcgggccttgacgcagttgcacggctatgagcgcgtattgggggtggtacatggcgtacaacctgcgacgggttcctcgaccatctaccatcatatgcgctgtggctatgaaagtatcgcacaggtcgtgctgggacgaaatgccggtgaagtgacagccgttgtcgccaattcggccggcgcgctggagttggcccctagcgccgaataccgggaaggacgtccctggctgtttctgtgcgacgcgcaaggccaggtactcaaggatatcgatggaaagcctcgggcttatccgcagaatcaggacccttatgaagagatatacaagagctctacgtggtatggattggtgcctgagcaaaatgcacaatatctggacatgtcagacaaaaaagaaagtttaagagttggcccccgtgataactttgaagacttgatagatagcattgctaagtttcatggtgaattgtcagcagcaggctatcactcagagacctatgcccattacggagctgacgatagccgccatagttggcgcgacctgatctggaagggtgaccctacccctctggagacccctggtgccacactcaacgacgatgagaacggcacttacaacagttggttccgtcggggcttgcccaccatagtgcagggtccgctggaggcgggaaatccactggacgcttccggcagcggaggtgacgaaacggtaccgaccgactccggccaggcgcctgccctggcgggcgtcaaggccagctttcggcatggcagcaagggcaagggacaggccaataccaaacggggctatgagcaccaggagagttacaacgatgctcgtgctcaatgggcagcgctatatggggtgatcaaaatcacccagttggcggattggcatcctaatgacaaaggagggacatga

SEQ ID NO: 322785 - DNA, 1140 bp, Pseudomonas aeruginosa
atgcatccccgtcggttgcttgctgtacttgggttggtggtcttgaccagcatgaccagttgcacttcgttttcttcttctcggagctcttccatggacaagaccggatggatcactcattgctttggtcgctttctgattgatctgccacctgacgcggtagtcaatgctggatactacctatggggagacagaattgagtacttagatgataaacctaccgaactggcagccagggttgatcgtcttgaacaagagtggaggactcagaagcataaatccaaaggtaacatgtttcttcgtaaaattgactttggcaatgaatcagtaggtttattgtcttggtcttcagaggttgcctctaaaacctatttattggatacctatgttacatctaagcctacgtggcatgcctatcgttggaaagggaaagtttcggtagacagagagcaacgtgctgtagagatgtctaggactttagctcgaaatctacgctcgcgcgcgcccaaagaaatccccagcgggccgggcttttgcatcgaccaagcttatattgcaggggataattttcaagatgaagagtttggggttggcgttacgttccccaaccaccccggcgtagacttcgagtttcgttccttaacgggggctgcgcaaaaaaacctgcttgagcgcgttggtggcctcatgcaggaattgctctccacgtttgcaggtatggaaacattaagaaaaggaaagcatcctgtcgggagccttcccggagaggagtatctggttgcgggaagcgataagggacagcgcgcttacacattcatgtgggaggttcaaggcaaggaggaatcgctaaccgagcccaatcttactgcgggactggcggtactggaacgcagcaatgaaaacggtaaaccaccgccccctgccttcaaatcggataaagaagcattggaactgtgggacaccattgtcgattcgattcgcgtgcgcccgacttcttcatcaccgcgaggtggaaatgccggtccttcccctgctccgaaacccgctacgcctggcggccaaacgctcggtgatgactatgtctacgaggaattcctctccagcctgaagccaaaagacagctggctggacgacctatag

SEQ ID NO: 322786 - DNA, 261 bp, Pseudomonas aeruginosa
atggacatcattcgccttggcgacaccaccagccatggaggcacggtgattgaggcgttcgcccagaccgacctcaacggcaagccgatggccggtgtaggccaccaagtggtttgccccttgtgcaagggaaccttccccattaccgaaggtagcgccctgctggatgtgaatggggtcccggtcgcgctacatgggatgaaaacagcttgtggtgccagcctgattgccagtggcccgttgggcgctgccgaaaactga

SEQ ID NO: 322787 - DNA, 1368 bp, Pseudomonas aeruginosa
atgtccgtggtaactgatcgccgcatccccgactcgcccgtagaccagcgcctgccgctgacgcagctgctgctggtgggcttccagcatgtgctgctgatgtacggtggcgccgtcgccgtgcctctgatcgtcggccaggcggccggcctctcgcgcgaggaaatcgccttcctgatcaacgccgacctgctggtcgccggcatcgccaccctggtccagtcgctgggcatcggcccgatgggcatccgcatgccggtgatgatgggcgccagcttcgccgccgtcggcagcatggtggcgatggccgggatgcccggcgtgggcatcaccgggatcttcggcgcgaccatcgccgccggtttcttcggcatgctcatcgcccccttcatgtcgcgcatcgtgcgtttcttcccaccgctggtgaccggcacggtgatcacctcgatcggcatgtgcctgttcccggtggcgatcaactgggccggcggcggcaagggcgcggaagacttcggctccctgcacttcctgttcctctccagcctggtgctctgcaccatcctcctgatcaaccgcttcatgcgcggtttctgggtcaacatctcggtgctgatgggcatgggcctgggctacgcgatcgccggcggcatgggcatggtcgacctcggcggtctggccgagcgcccctggttcgacatcgtcaccccgctgcacttcggcgcgccgaccttcgacctggcgccgatcctgtcgatgtgcctggtggtagtgatcatcttcgtcgagtccaccggcatgttcctcgccctgggcaagatcaccggccgcgagatcaccccgaccgaactgcgccgcggcctgctctgcgacgccggcgcctcgttcttcgccggtttcctgaacaccttcacccattcctcgttcgcccagaacatcggcctggtgcagatgaccggggtgcgcagccgctacgtcacggtggccgccgccggtttcctgatcctcctcagcatgctgcccaaggccgccttcctggtcgcctcgatcccgccggcggtactcggcggcgccggcatcgccatgttcggcatggtcgccgccagcggcatccagatcctccacgaggccaacatcaccgaccgccgcaaccagttgctggtggcggtaagcatcggcatgggcatggtgccggtggtgcgcccggacttctttgcccgcctgccggtctggatggagccgatcacccatagcggcatcgccatgaccgcgatctgggcggtggtgctgaacctgctgttcaacatcctcagccgcaacgaccgcagccacttgtgcggcagccacgcgccggcgcccaagcactcctga

SEQ ID NO: 322788 - DNA, 330 bp, Pseudomonas aeruginosa
atgcaccgggtcctgttcatctgcagccgcaaccgcctgcgtagtcccagcgccgaacggctgttcgccgactggccgggcgtcgagaccgattccgccgggctggcggcggacgccgagacgcccctggagcgcgagcaactggagtgggcgacgctggtcgtcgtcatggagcgccgccaccggcaggctctgctgcgccggcacgccgcggcgatgaaaggcaagcgcctggtctgcctggatatcccggacgactacgcctacatgcaggcggaattgctgcatctgctggagcgcaaggcggggcctttccttcggcgggactga

SEQ ID NO: 322789 - DNA, 996 bp, Pseudomonas aeruginosa
atgtccgattcccgcctggtcgatcccttcggccgtcgcatcacctacctgcgcctgtcggtgacggatcgctgcgacttccgctgcacctactgcatgagcgaagacatgcagttccttccccgcgaccaggtcctcagcctggaagaactgtacgcggtggccgacgccttcatcggcctcggcgtgcggcgcattcgtatcaccggcggcgagccgctggtgcgcaagggcatcaccggcctgctggcacgcctggggcagcgtgcggaactggaagacctggcgatcaccaccaacggttcgcaactgcgcgagcgcgccgccgagctgaaggccgccggcgtccgccgcctcaacgtcagcctcgactcgctgcagcgcgaacgcttcgccgccttcacccgtagcgatcgcctggagcaggtgctggacggcatccaggcggcgcgcgaagccggtttcgagcggatcaagctgaactgcgtggtacagaagggccgcaacgacgacgagatcctcgacctggtcgagtacgccctggccaaccagttggacatcagtttcatcgaggaaatgccgctgggcagcatcaccagccaccgtcgcgaactgactctctgcaccagcgacgaagtccgggcgatcatcgagcgccgctggccgctgaccccgagcctggcgcgcagcggcgggccgtcgcggtattaccagatcggcgacgagcccagccggatcggcttcatctcacctcacagcaataatttctgcggcgactgcaaccgcgtgcgcgtcaccgccgagggcaagctggtgctctgcctcggccacgagggggcgctcgacctgcgcgaactgctgcgcagccatcccggcgaccgcgagcgcctgagcgcggcactggtggcggcgctgaacctgaagccggagcggcatcacttcgacgcccaggagcaggtccaggtgctgcgtttcatgagcatgaccggcggctga

SEQ ID NO: 322790 - DNA, 651 bp, Pseudomonas aeruginosa
atgaccagcatccgcgagcgcaacaagcgcctgatcctccgcgccgccagcgaggaattcgccgacaagggcttcgcggcgaccaagaccagcgacatcgccgcccgcgccggcctgcccaagcccaacgtctactactacttccagtccaaggaaaacctctatcgctgcgtgctggaaagcatcgtcgagccgctgctgcaagcgtcggcaccgttccgcgtggaagacgacccgctgctcgccctgcccgcctacatccgctcgaagatccgcatctcccgcgagctgccgcatgcctccaaggtcttcgccagcgagatcatgcacggcgcgccgcacctgccgaaggaatacctcgacgaactgaacgcccaggcccagcgcaacgtcacctgcctgcagacctggatcgaccgtggccagctcgccccggtggacccgcatcacctgctcttcgccatctgggcggcgacccagacctatgccgacttcgattggcagatttccatcgtcaccggcaaggaacagctcagcgacgccgactacgacgctgcggtggaaaccatcacccgcctggtcctgaaaggctgcacgcccgacgggcaatccggcaagagcgccggccggcttcggccgctgccgctctga

SEQ ID NO: 322791 - DNA, 432 bp, Pseudomonas aeruginosa
atgaccaccatcagtctggaaaccgcgctgggcattacccgccaggcgctggcggtggggcgcgagctgtccaccgcgcccctgaccatcgcggtgctcgatgctggcggccacctggtggcgctgcagcgcgaggacggcgccagcatgctgcgaccgcagatcgccatcggcaaggcctggggcgccgtggccctgggcaagtcgtcgcggctgctggcggcggatgcgcagcagcggccttcgttcatttccgcggtgaacaccctggcccatggcaatctggttccggcgccgggcggggtgctgattcgcaacgacaaggcagaggtggtcggcgcggtcggtatcagcggcgatacctcggatatcgacgagcaatgcgcgatccagggcgtgctggcggtcgggctggtgcccgacgccggttga

SEQ ID NO: 322792 - DNA, 1776 bp, Pseudomonas aeruginosa
atggccagaatgagagcaatcgaagccgccgtactggtgatgcgccgcgaaggcgtggataccgcgttcggcgtccccggtgccgcgatcaaccccatgtacgccgcgctgaagaagatcggcggcatcgaccatgtcctggcccgtcacgtcgaaggcgcctcgcacatggccgagggctacacccgtaccaaggccggcaacatcggcgtctgcatcggcacctccggccctgccggcaccgacatgatcaccggcctctactccgcctccgccgactccatcccgattctctgcattaccggccaggcaccgcgcgcccgcctgcacaaggaagacttccaggcggtcgacatctccagcatcgccgcgccggtggccaagtgggcgaccaccgtgctggaaccggcccaggtcccctatgtattccagaaggccttccagctgatgcgcagcgaccggcccggcccggtactgatcgacctgccgttcgacgtacagatggccgagatcgagttcgacatcgacgcctacgagcccctcccggtgagcaagccgaaggccacccgggtccaggccgagaaggtcctggccatgctcgacgaagccgagcgcccgctgctggtggccggcggcggcatcttcaacgccgacgccgccgagcgcttccgcgaattcgccgagctgaccggcatcccggtgatcccgaccctgatgggctggggcgtaatccccgacgaccacccgcagatggccggcatggtcggcctgcagacctcgcaccgctacggcaacgccaccctgctggaatccgacctggtgctcggcatcggcaaccgctgggccaaccgccacaccggcagcgtcgaggtctataccgaaggtcgccgcttcatccatgtcgacatcgaaccgacccagatcggccgggtgttcatgcccgacctgggcatcgtctccgacgccggcgccgccctcgacgcattcctcgaagtggcccgcgaatggaaggccgccggcaagctgaagtcgcgcgccgcctggctggaaagctgccagcagcgcaaacgcacgctgcagcgcaagacccacttcgacaacgtgccggtgaaaccgcagcgcgtctacgaagagatgaacgagttcttcggcaaggatgcctgctacgtcagcaccatcggcctgtcgcagatcgccggcgcacagttcctccatgtctaccaaccgcgccactggatcaactgcggccaggccggcccgctgggctggaccattcccgccgcgctgggggtggtcaaggccgacccgagccgccaggtggtggcgctctccggcgactacgacttccagttcatgatcgaggaactggcggtcggcgcgcagttcaagctgccctatatccacgtactggtgaacaactcctacctgggcctgatccgccaggcgcagcgcggcttcgacatggactattgcgtgcagctggccttcgacaacatcaacgcccccgagctggaaggctacggcgtcgaccacgtcgcggtggtcgagggcctgggctgcaaggcgatccgggtgttcgacccgaacgagatcggcgccgccctggccaaggcccgcgaactgatgcaacagcaccaggtgccggtggtggtcgaggtgatcctggagcgcgtcaccaacatctccatgggtaccgagatcaacgccatcaacgagttcgaggaactggccgagaaaggcgccgacgcgccgaccgccatctcgctgctcgactga

SEQ ID NO: 322793 - DNA, 783 bp, Pseudomonas aeruginosa
atgccccgtttctgcgccaacctgtccatgctgttcaccgaggtggatttcctcgaacgcttcgacgccgccgccaaggccggcttcgccggcgtcgagtacctcttcccctatgacgtcgaggccgaggcgatcaaggcccgcctggaagccaacggcctggagcaggtgctgttcaacctgccggccggcgactgggccaagggcgagcgcggcatcgcctgccacccggatcgggtccaggagttccgcgagggggtcgacaaggccatcgcctacgccagggtgctgggcaaccgccaggtgaactgcctcgccgggatccggccgcaggggcacgactgcgccagcgtcgagaagaccttcgtcgacaacctgcgctacgccgccgacaagctggaagccgcaggcatccgcctggtcatggagatgatcaacaccctcgacatccccggcttctacctgcagaacacccgccaggccctggagatccgcgacaaggtcggcagcgccaacctattcctgcaatacgacatctatcacatgcagatcatggaaggcgacctggcccgcaccctggaaaaccagttggcggcgatcaaccacgtgcaactcgccgacaaccccggccgccacgaaccgggcaccggcgagatcaactaccgcttcctcttcgagcacctggaccgcatcggctaccagggctggatcggctgcgagtacaagccggccaccaccaccgaagccggcctcggctggatgaagacgcacaacgtcgtctga

SEQ ID NO: 322794 - DNA, 891 bp, Pseudomonas aeruginosa
atggccaagatcggattcatcggcaccggaatcatgggcaagcccatggcgcagaacctgcagaaggccggccacagcctgttcctttccacccaccacgacgccgctccggccgacctgctggaggccggcgccattgccctggccaacccgaaggaagtggcccaggaagccgagttcatcatcgtcatggtgccggacaccccgcaggtcgaggatgtgctgttccgcaaggacggtatcgccgagggcgtcggcccaaacaaggtggtgatcgacatgagttcgatctcccccaccgccaccaagggcttcgccgagaagatcaaggctaccggcgcgcagtacctggacgccccggtctccggcggcgaggtcggcgccaaggcggcgaccctgagcatcatggtcggcggctgcccgaacaccttcgaacgcgccctgccgctgttccaggcgatgggcaagaacatcacccgcgtcggcggcaacggcgacggccagaccgccaaggtggccaaccagatcatcgtcgcgctgaacatccaggcggtcgccgaggccctgctgttcgccgcccgcaacggcgccgatccggccaaggtgcgcgaggcgctgatgggtggcttcgcctcctcgcggatcctcgaggtacacggcgaacgcatggtcaagggcaccttcgacccgggcttccgcatcagcctgcaccagaaggacctaaacctggccctggccggcgcccgcgagctgaacctgaacctacccaacaccgccaacgcccagcaggtgttcagcacctgcgcggccatcggcggcagtaactgggaccactcggcgctgatcaagggcctggagcacatggccaacttctcgatccgcgacgagtga

SEQ ID NO: 322795 - DNA, 1266 bp, Pseudomonas aeruginosa
atgagtaccgatccacgcgcctttctcaccgagctgttcaataccgcggtggcagccggccatccctaccaggtgctggccgaccacctgccggaagatcgcagcgggcgcgccatcgtcatcggtgccggcaaggccgccggagccatggccgaagtggtggagaagcactggcagggcgagatccagggcctggtagtggcgccttaccgctacggcgcgcaatgcagtcgcatcgaggtggtggaagcctcccatccggtgcccgacgacgccggcgagcgcgtcgcccgtcgcgtgctggaactgatcagcggcctgaacgagagcgaccgggtgatcttccttctctccggcggcggctccgcactgctttcgctgcctgccgaaggcattggcctggcggacaagcaggcggtgaacaaggcgctgctcaagtccggcgccgccatcggcgagatgaactgcgtgcgcaagcacctctcggcgatcaagggcggtcgcctggccaaggcctgctggccggccagcgtctttacctacgcgatttccgacgttcccggcgacgaggccacggtgatcgcctccggccccagcgtcggcgacccgaccacctccgccgacgccctggcgatcctcaggcgctacgccatcgacgtgccgcagaacgtcctcgactggctcgccgacccgcgctcggaaaccgtcaagcccgacgacccgtgcctggcgcgcagccacttccagttgatcgccacgccacagaacgccctcgacgcagcagcggtgaagtgccgcgcggccggcttctcgacgctgatcctcggcgacctggagggcgaagcgcgggaggtcgccaaggtccacgccggcatcgcccggcagatccgcaagcacggccagccgctggcggcgccctgcgtgatcctctccggcggcgagaccaccgtcaccgtgcgcggcaacggtcgcggcggacgcaacgccgagttcctcctcagcctcaccgccgagctaaagggcgaaccgaacatctgggccctggccggcgacaccgacggcatcgacggctcggaagacaacgccggcgcgttgatgacgccctgctcccatgcccgcggcgaaaaggccgggctgaagatccgcgacgagctcgacgacaacaacggctacggctatttccaggccctcggcgacctgctggtgaccggaccgacccgcaccaacgtgaacgacttccgcgccattctcatcctcgagtcctga

SEQ ID NO: 322796 - DNA, 1434 bp, Pseudomonas aeruginosa
atgacagccgacaagaaagccaagatcctcgccaccctcggcccggccacccgcagccgcgacgatatccgtgccctggtggaggccggcgccaacctgttccgcctgaacttcagccacggcgactacgccgatcacgcgcagcgcttcgcctgggtgcgcgaggtggaagcggagctgaactacccgatcggcgtgctcatggacctgcagggtccgaagctgcgggtcggccgcttcgccgccggtgccgtgcaattgcagcgtgggcagaccttcaccctcgacctcagcgacgcccccggcgacgagcggcgggtcaacctgccgcatccggagatcatccatgccctggaaccgggcatgagcctgctgctggacgacggcaagatccgcctggaagtggtcaactgccacagcgacgccatcgagacccgcgtggcggtgggtggcgagctgtccgatcgcaagggcgtcaacgtgccggaagcggtgctgcaactcagcccgctgaccgacaaggaccgccgcgacctggccttcggcctggaactgggggtcgactgggtggcgctgtccttcgtgcaacgcccggaggacatcgacgaggcccgtgggctgatcggcgacaaggccttcctcatggccaagatcgagaagcccagcgcggtgagcgccatcgaggcgatcgccgagcgcgccgacgcgatcatggtggcgcgcggcgacctcggcgtagaggtgccggcggagagcgtgccgggcatccagaaacgcatcgtccaggtctgccgccagctcggcaagccggtggtggtggccacccagatgctcgagtcgatgcgcttctcccccgccccgacccgcgccgaggtgaccgacgtagccaccgcggtgggcgccggcgccgacgcggtgatgctctcggcggaaaccgcttccggacaataccctcgcgaggcggtagagatgatggcgaagatcgtccgccaggtggaggccgagccggactaccacgtccagctcgaggccaaccgtccgcagcccgacgctaccgtctccgatgcgatcagctgcgcgatccgccgggtcagccggatcctcccggtggcggtgctggtgaactacaccgagtcgggcaactcgaccctgcgcgccgcccgcgagcggcccaaggcgccgatcctcagcctgaccccgaacctgcgcaccgcgcggcgactgaccgtggcctggggcgtgtattcggtggtcaacgagcaactggcgcacgtcgacgagatctgctcgaccgccctcgacatcgccctggcccagcgcatggcgcgccgcggcgacaccgtggtggtcaccgctggcgtgccgttcggtcgccccggctcgaccaacatgctgcgcatcgagaccgtggcgccgccgctgggaggcctctga

SEQ ID NO: 322797 - DNA, 915 bp, Pseudomonas aeruginosa
atgcccctgcaatctctcctcaatgcatcccgaatcctcctgcgcggcatcagccaggtgttcctccagggcgacccacgcctgggcctggcctgtctgctggcgatcgccgtcggcgcgccgccgctgctcgccggcgccctccttggcggcgccctcggcccgttgctggcgcgcctgttgcactgcgccgacagcgacatcgaggccgggctgtacggctacaacgccgtgctgatcggcatgctgctggcattccgcttcgcctggtcgccggggctggtgtcgctggtagcgctcggctgcctggccagcgtggcgttgcagcgcctgttcctgcatgggctgcgccgacgccgctggcttccgccctataccctgggcttcgtcctcaacggctggtggctggtgcccctcggcgcctggctaggcctggccccggcgacccatggcggctgcttcagctgcgcctggagcggcacggcggagctggcggcgctagcgcaggggatcggcgagatcatcttcctcggtgaaccgctggcagggctgctggtctggctcggcctgctgctggtctcgcgtccctcggccgcctgggccctcgccggcgccgcggccagcctgccgctggcctggctgctgggctacgactgggcgagcgcgctcgccgggttctacggcctgaacgccgcccttgccgggctggccctggccttgcgctaccgcagcgtctggccgccactgctcggcatgggcctggcggtggcgctgcaaccgctgttcggcctgctcggcctgccggcgctgaccgcaccgttcatcctcgcctgcctgctttgcatcggcggcgagcgcctgtacctgcgcctggccggcagcctcggcgcgcgcctcggccggcgacgctcctga

SEQ ID NO: 322798 - DNA, 852 bp, Pseudomonas aeruginosa
atgagcgcacccgacagctggcgcgaacgcctctacatcgtcatcttccagaccgacacccgcgacggccggcgcttcgacagcgcgctgctgctggtgatcctggccagcctgctggtagtgatgatcgacagcatcgacgaaatccaccaggactacggcgacctgctggcctacatcgaatggggcttcaccggcatcttcctggtggaatacctgctgcgcctgtactgctcgcccaagccgctgcgctatgccttcagcttctacggcctggtcgacctgctggcgatcctccccggcttcctcgccctgctctaccccgacgcccaatacctgctgatcgtccgggtgatacgcatgctgcggatcttccgcgtgctcaagctgcgccagtacctgagccaggccaatttcctgctcaccgccctgcgcggcagcaagcagaagatcatcgtgttcttcctcaccgtgatgaccctggtcaccgtgttcggcgcgctgatgtacgtggtcgaaggcccggagcacggtttcaccagcatcccccgcggcatctactgggcgatcgtcaccctgaccacggtcggcttcggcgacatcaccccgaagaccccgctcggccaggccatcgccagcctggtgatgctcaccggctactcgatcatcgcggtgcccaccgggatcttcaccgccgaactcgccaccgcgatgcgccaggacccggccaacctgttgcagcgggattgcccggtgtgccgcaaggcgacccacgaagtgcaggcggcattctgctgccgctgcggcaacccgttgttccctcgcgaggaaggcagccatgggaagtcttga

SEQ ID NO: 322799 - DNA, 627 bp, Pseudomonas aeruginosa
atgggaagtcttgaccggcagcgctgggacgccctctggcagcgactcggcggcaacccgccggcggatgccttcgacgcgctgctggcggcctatggcggggccgaccggcactaccacagcgatcgccacatcctcgcctgcctggagcacttcgaccgctggcgccaactggcgctgcggccggacctggtggagctggcgttgtggacccacgacctggtctacgacacccagcgccaggacaacgaggccgccagcgccgccagcaccgagcactggctcgaccaggccgggctggcggcgctgcggccggccctgcgcgaactgatcatggccacctgtcaccaggcgccgccgggagacgccgacgcagccctggtggtggatatcgatctcgccatcctcgccgcgccggcgccggtctacgcacgctacgaggcggacgtccgcgccgaatacgcctgggtgccggaaccgctgttccgcgccgggcgcggcaagttgctgcgccagttgctggagcaaccggcgctgtaccactgcgaaccgctgcggcaacgctgggaggccgccgcccgcgccaacctgcgcggtgccctggagcgcctggaacagccggcctga

SEQ ID NO: 322800 - DNA, 1656 bp, Pseudomonas aeruginosa
gtgaatcgactcgccgcctctccgctcctgttcgccggcctgttcgccagcgctccgttgctggccgcgccacaagcggtcgacagccgcatcagcgcggtcaccgtctacgccgaccgtgccgtggtcacccgcaccgcccgcctgcaattgcccaagggccagcatgagatcgccctggagcaactgcccttccagctcgacgacgccagcctgcgcgcgtccctcggtgccagcgccgccgctaccctgctcgacgtcagcagcgccgcgcaacgggtcgagcgcccggacgacaaccgtgtgcagcagctcgaccagcaactgcgcgagatagaccggcaactgcgggaaatccatgaccgcggcagcgtgctcgaagcgcagaagaagttcctcgccgacatccagagcggcagcacccagcccggcaaggatcgccccatgcccggcatcgacgagctgaagagcctgctgcaactgaccgaaggcaacctcgaacgcctgctcgccgagcagcgccagctggacgaccgcgccgccgaactggaacagcgcaagcagcagttgcaggagcagcgcggcaccctcaacggcgacggcaagcgcttcaagcgcgcggtcctgcgggtcgccctggagcaaccggcacaggtcgaggtgaagctcgactacaccctgcgcgacgcctcctggcagccgacctacgacgcacgcctgcgcgacggcgcgaagaccatcgaactgacctaccagggcctggtccggcagagcagcggcgaagactggaccgacatcgacctgaccctctccaccgcccgtccggccctgggcggcaacgtaccgcggctgaatccctggatcgtcgacatcgacgcgcccaacgcctactacggtgccgagatggccatgcaggacgctccggcgcccatgccgcaagccgcgcccatcgccaggacctcggcgaagatggccatgccggcctcggcgccgaagctggccgaggcgcggctcgccaccgcggaggtcagcagcggagccgccagcgcctctttccacatccccgtgccggcgaccctgaacagcgacggcagcgcgcagaaggtcaccatcgcccgcctggaaatgccggccaagctgcgctacctggcggccccggccctgcgcgaaaccgcctacctggaggcggaaacccgcaacgacagcgactacccgctgctccccggcaccctgaatacctttctcggcaacagcttcgtcgccagcggccatctgcgcggggtgatgcccggggaaagcttcgaactggcactgggcgccgacgagggcatcggcatcgaacgcaagctggtcaagcgctacaccgacagcagcggcctgatcggcaaccgcacgcgggtcaactacgaattccgcatcgacgtgcgcaacaaccacaagaacgccgaacgcgtgcagttcgaggaccagttgccggtctcgcgcaacgagcagatccaggtcaccttgctggaacccaaggcgcaggaagtcaagcgcgaggacgacggcaagctgaagtgggactggaccctgcaacccggcgagaaacgcagcgccaccctgaagttcagcgtggagtatcccaaggacctggcggtcagcggcctcgactag

SEQ ID NO: 322801 - DNA, 999 bp, Pseudomonas aeruginosa
gtgaaacgactgttcagcgcctccctgctggccgccggcctggcgctcggcggcgccgctcacgccgcccagcccctgctcaacgtctcctacgacgtgatgcgcgacttctacaaggaatacaacccggccttccagaaatactggaaagcggagaaaggcgagaacatcaccatccagatgtcccatggcggttccagcaagcaggcgcgctcggtgatcgacggtctgcccgccgacgtcatcaccatgaaccaggccaccgacatcgacgccctcgccgacaacggcggcctggtgccgaaggactgggcgacccgcctgccgaacaacagcgcgccgttcacctcggccactgtgttcatcgttcgcaagggcaaccccaaggccctgaaggactggccggacctgctcaaggacggcgtccaggtagtggtgccgaaccccaagacctccggcaatggccgctacacctatctctccgcctggggctacgtgctgaagaacggcggtgacgagaacaaggccaaggaattcgtcggcaagctgttcaagcaggtaccggtgctcgacaccggcggccgcgccgccaccactaccttcatgcagaaccagatcggcgacgtactggtgaccttcgagaacgaagccgagatgatcgcccgcgaattcggccgaggcggcttcgaggtggtctacccgagcgtgtccgccgaggccgagccccccgtggcggtggtcgacaaggtggtcgagaagaaaggcagccgcgccctggccgaggcctacctgaagtacctgtggtcggacgagggccagaccatcgccgccaacaactacctgcgcccgcgcaacccggagatcctcgccaagttcgccgaccgcttcccgaaagtcgacttcttctcggtggagaggaccttcggcgactggcgcagcgtgcagaagacccacttcatcgacggcggcgtattcgaccagatctacagccccaactga

SEQ ID NO: 322802 - DNA, 357 bp, Pseudomonas aeruginosa
atgcgcaagatattcctagcctgtccctacagccatgccgacgccgaggtggtcgagcagcgcttccgtgcctgcaacgaggtcgcggcgaccatcgtccgcgccggccacgtggtattcagccaggtctccatgtcccacccgatcaacctgtgcctggccgagctcgaccgcgcggcgatcggcaggttgtgggcgccggtggacgccttctacatggatcacctggaagagctgatcgtcctcgacctgccgggctggcgagacagcgccggcatccgccgcgagatggagttcttcgaggccggcggacagcgggtcagcctctggtccgaggtggagcacgagtttcgctga

SEQ ID NO: 322803 - DNA, 1236 bp, Pseudomonas aeruginosa
atggccgagttcggaaactatgtgatttacctgatcatgctgggtgcggtacttggcgcgctggcttccatcctgcgcccggaaagcggtctgggccgcgagttcgtcaacggcatccacgccatcggtccggtgttcctcgcccaggccggcatcatggtagccattccctatctgtcgaaggcgatttcccatgccctcggcccgttcttccagaccctcggttccgacgtatccatcgccgcgctgtcgatcatcgcggtggacatgggcggctaccagttggccgatgccctgaccgccaaccgcgacatgtggattactgccatgctggtgggctacacctccggcgcgaccatcgtctacctgatcccggtcggcctgaccatgctcgagcgcaaggaccacaagtacctggcgctgggggcgatggccgggttgatcagcattccgttcgcggtgctggcggcgttgctgctgattaccctcaaccacatcccggtgcgcgaactggtatcgaccggttcgccggccctgcactacctgtcgctggacttcctcgacatgcttcggctgctggcgccgctgttcgtcttctgcttcctgctggccgccggcctgaagtaccgggcgacggcgatggtcaccgggttcctggtattcggcaaggtgatggacgcgttcatcaagatggccctggcgctttccatcgtccagcacttcaccggagtcttcaccaaggtcttcggcggctggggcttcgacccgatgttcgccgacgagaaagagttgttccgcgccatcgagatcgctggctacatcggcatcatgctggccgggaccttccccatctgctacctgttccagcgctactgcaagcgcccgatggcggtcctcggccgttacctggggctgtcccagccgggcgccaccgcctttgtcatggtactggcgaacatcatcgccacctaccacctgttcaaatacatgaatgctcgcgacaaggtgctttgcgtggccctgggcgtctgcgcccaggccaccatcggcgatcacctggcattcaccgccaacttccagccgacgctgatcctgccgatcctgctcggcaaattgttcggcggcctgctggcggtattcatcgccatccgcatctcggtgcctgccgccgagcgctatgcgcggcaggagcaggagcatgacgaggcggaaaaaagcgccctgcacgcagcctga

SEQ ID NO: 322804 - DNA, 777 bp, Pseudomonas aeruginosa
atgcgccccgaggaacgccgccgccacattctcgaattgctgcgccagcgcgagcggatctcggtggacgaactggcgcggaccctttccacctctcaggaaaccattcgccgcgacctcgccgcgctggccgaacaaggcctggtcagcaaattccacggaggggccgccctgccgcccagcggcgagcacgagaacgccttccagacgcgaatgaacgagcacgcccaggaaaaacgcgcagtcgcccgctacgccgccggcctgttcgggcccggtgacagcatcttcatcgacaccggcaccaccaccctgctgttcgcccgcgaactggcgcgccagagccatctgacggtgatcaccaactcgctgttgatcgccggcagcgtcggcgcctccggcaaccgtgcattcatgatcggcggcgagtaccgcccggaatccgaacagaacgtcggcgccctggccatcgagcagatcgcccggttcaacgccgagcatgcggtgatcaccgtcggcgcgctgaacggcgatggcgccatggatttttccatcgaggaagccgagatcgcccgtgccatgatcgcccaggcccgccaactgacggttatcgccgactcctcgaagctcggccggcgcgccctgttccaggtcttcccgctgagccggatcaaccgcctggtggtcgaccgcaagcctaccggggaactctgggaggccctgcaacaggcgcgggtggaagtccacgaagcccccctgcgcaccccgcaggcctga

SEQ ID NO: 322805 - DNA, 1410 bp, Pseudomonas aeruginosa
atgactgagccgcttgcgacaaagaccgcgatcttcgacgttgcagtgatcggcgctggcgtggtgggttgcgccatggcccgccgcttcgccctggaaggtgcgcgggtggtcctgctggaaaaaagcaccgacatcctctccggtgccagcaagggcaacagcgcgatcctccataccggtttcgacgcgccgcccggcagcatcgaactggcctgcatgcaggagggctatcgcgaataccgcgacatccatgcgcgcctcaacctgccgctgctggaaaccggcgccctggtggcggcatggagcgacgaggatctggcgcgcctgccggctatcgtcgagcaggcccacggcaacggtgtcgatgacgtccgccaggtcggtcgcgacgaggtcctggcgctggagccgcagttggccggcaacgtgctcggcgcggtgcgggtccccggggaacatctggtcgacccttggtccgcgccgctcgcctatctgcaacaggcgctggcccatggcgccgaggcctgtttcgacgtcgaggtgctggacggcgccttcgacggcggcgaatggctgttgcatacccgccgcggcgatctgcgcgcgcgccaggtaatcaactgcgccggactcttcggtgaccaactggaacagcgcctgctcggcgcggcgagcttcgccatccatccgcgcaagggccagttcgtggtcttcgacaaggccgccgcggcgctgctgcggcacatcctgctaccggtacccaacgagcggaccaagggggtggtattcacccgtactgtcttcggcaacctgctcgccggccccaccgccgaggaacaggacgaccgcgaacaggcacgggtcgacagcgacaccctgcagcgactgatcgacgccgccgtcgagcggatccccggcctgcgcggcatgccggtcaccgccacctacgcaggattgcgaccggccagcgaaaagaaggaataccgcatccgccaggtcgacggacgcaactggatcagtgtcggcggcatccgttccaccggtctcaccgcggcgctgggcatcgcacgccacgtctatcgtctctaccagggcgagcgcttccacgaagcggttcgcgagccgctctggccacaggtaccgaacctcgccgaacacctgccgcgcgactggcagcgtcccggctacgacgagatcgtctgccactgcgagatggtcacccgccgggaaatcctcgccgccctggaaggcccgctgccagccggcgacttcggcggcctgaagcgtcgcactcgcgcctgcatgggacgttgccagggtttctactgcaacgcgcgggtcgccgagctgagcgccggccgcctcgcccagcccctcgccaccgggagttgccatgagcatcactga

SEQ ID NO: 322806 - DNA, 1239 bp, Pseudomonas aeruginosa
atgagcatcactgaacaggtcgacgtcgccatcgtcggcagcggtcccgccggattggcagccgccatcgaactacgccgccagggcgtcgcccgggtctgcgtgctggagcgcgacggcgaggccggcggtataccccggcattgcgcgcatccgccgttcggcctgcgcgaacacggccgcctgttgaccggcccggcctatgcacagcgtaacgtcgaacaggccgaacgggccggggtggatatccgcctgcgccatagcgtggttgctctcgccgccgccggcctgctgcaactggccaccccggaaggcccgcgcagtctgcgcgcgacacgcgtgctgctggccaccggcgcacgcgagacgccgcgctcggcgcgcctgctgggcggcgaccggccactgggcgtgatcaataccggcgcgctgcaagcctatctctatctgcaaggcctgaagccgttcgaacggccgctgatcgtcggcaccgagctggtcagcctgtccgccgtgatgagttgccggcgtgccggcatccgcccggtggccatgctcgaacgcaacgcacgggccactgcgcgttggccgctatcgttgtttcccaggctgtgcggagtaccgatgcacttctccagcgagctgctggagatcgaaggccgcggccgggtcgaggcggcgcgggtacgcctgggcgacgggcgcgtcgaacggatcgcctgtgacggcatcctcctcagcggacgcttcgttcccgaatcgagcctggtccgcctcagccacctggaactggacccggccagcggcggcccgcgcatcgatcagttcggccgctgctccgaccccgcctatttcgccgccggcaacctgctccggccgatcgagaccgccggctggtcgttccgcgagggacgaaggatcgccggcctgctggccgccgacctgcgggccgaactgccgagtgccgcacctggcatagccatcgattgcagtggtccgctcaagctgtgcgtgccgcagcggctgctggccgacccgacacccggcctggcgcatctgcagctacgcgtaagcgaggccgccagcggccgcctgcggatcctggccgatggtcgcccggtgtgggagcgtgccctgtcctgcctgccggagcgccgcctgctggtgccgctggccgccctgcgcctgccgccggacacccggcgcctggaagtcgctttcctcacctccggccactga

SEQ ID NO: 322807 - DNA, 1416 bp, Pseudomonas aeruginosa
atgcgaatcgccgccctcgaccagggaaccaccagtacccgcgtgctggtcgccagccaggacggcagcgccgatattcagttggcgctgcgtcaccagcaacaccatccgcagtccggctgggtcgagcacgatccgctggaactgctggccaacctgcaacgctgcctggaggccagcggccgggtcgacgccatcggcctcgccaaccagggcgaaagctgcatggcctgggacgcccgcagcggcgagccgttgtcgccgctgatcgtctggcaggacaaccgcaccaccccgcacatcgagcgtctacgcgccagcggcgccgaggcgctggtcctggaacgcagcggcctgccgctcgatgcctatttctcggccagcaagctgggctggatcgtcgagcaccttcctgccgctcgccgggctttgaaggcaggccgcctgcgcctgggaaccagcgatgcctggtttctcgaccgcttgtgcggaaccttcgccaccgacgtcaccaccgcctcgcgtaccgcattgatgaacctcgccgagggccgctgggaccccgacctgtgcgccctgttcggcgtgccgatcgagtgcctgccggaaatccgcgataccgtcggccatttcggggtgatcggcaacaccccgctgacggcctcggtggtcgaccagcaggcctcgctctacggtcacggctgccgccagcccggtgatgcgaagatcaccttcggcaccggcgccttcgccctgactctcagcggcgagcggatcatccgctcgccggagacaggcctgctcgccaccatcgcctggcagatcgatggcaaaccggtgtacgccatggacggcggggtctacgacgccagcgccgcggtcgagtgggccgggcgtctcggcctgttcagcgacttctcggaactggccggcttcgaccggccgccggccatcgagcgcggcctggccttcgtcccggccctgtcgggactcgcatgcccgcactgggaccgcagcgccggcgcgatgtggctgggaatggacgccggcacccgccgcgaggacctctgccaggccctgctcgaaggcgtggtgctgcgcagcgccgaggtgatccaggcgatggacggctacctgaaggtcaccgaccgcctgtccatcgacggcggcctggcgcgcagcccctacttcgcccagttcctcgccgacagcctgcaacggcgcatcgtcacccagcgcttcgacgaactcaccgccttcggttgcgccgcccttgccgcacgtggcctcggccacgaactggcggagccgcgcaacactcgcacggagttccagccgcgggtcgacgccggcaccgcccggcgctggcaggtgcgtttcagcgaagcggtggcgcgcacccgcggctggcgctga

SEQ ID NO: 322808 - DNA, 1101 bp, Pseudomonas aeruginosa
atgcgcgctcgacaacttggcatcaccctcggcctgggcactcccggcccgttcaacgcgatcaccgacgttcccggcgtgcgcgtcggccacagcaccctgaaccagcggatcgacggcaggcaggttcgcaccggcgtcaccctggtccagccgcgcgccggtgcggcgcgcctgcaaccctgcttcgccggctgccatgtgctcaacggcaacggcgacgccacgggcctggagtggatccgcgaagccggcctgctgaccaccccgatcgccatcaccaatacccacagcgtcggcgcggtgcgcgacgcgctgatcgccgaggagcgcgccgaactcggcgacagcgggctgtactggtgcatgccggtggtgatggagaccttcgacggcctgctcaacgatatctggggccagcacgtcggcgcccgccaggtcggcgaggcgctggcctgcgccgagtccggaccggtccgcgaaggttcggtgggcggcggtaccgggatgatctgccacgagttcaagggtggcatcggtagcgcatcgcggcggcttccggcggagcagggcggctggacggtgggcgcgctggtccaggccaaccacggccagcgccgcgagctgcgggtcgacggctatcctgtcggccgccggttgggcgacatcccctcgccgttcagcgaggaaggcaccccgggtatgggctccatcgtggtgatcctggccaccgatgcgccgctgttgccgcaccagtgccagcgcctggcgcagcgcgcctcgatcggcgtcgcgcgcaccggcggcggtaccgaggactccagcggcgacgtgttcctcgctttcgccaccggcaaccaggacctgccgccagccgactatgcgcgcaaggacctgccgcagagcacgccgctgcggatgctcaacaacgaccacatctcgccgctgttcgccgcggcggcggaggcggtggaagaagccatcgtcaacgtgctgctggccggcgaggacatgcgcaccgaggacggccggctggtgccggcgctgaagggggagaggctcctggcggcgctgcgcgagaccggctggccgggacgctga

SEQ ID NO: 322809 - DNA, 1368 bp, Pseudomonas aeruginosa
atgagctcttcccccgcgcccgaaagtgcgctgaaacccacgctgggcgtgttcgacgtggtcgccatcaccgtttccgcggtcactcccgccagttccgtcttcgtcatcgcccccttcgccatccagcaggccggcaccggcgctttctgggccttcgccctggccggggtgctggcgctgatgttcgcctggtgctatgccgagctgggcagggcgcacagcaccgccggcggcgagtatgtctacgccaagcgggtgttcggcggcttggccggctacgccaccttcctcacggtgctggcgatgctgctgttcatcccgccggtgctcgccaccggcgcggcgacttacctgaacgctgccctcggcacccacttcgatgcgcagaccgtggccctggcgatcgttgccttcagctacctgctgggcatcctcaacatccgcgtcaacgcctgggtcacgggtacctgcctgctgctggaagtggcggcgctgctggtgatcgtcggcctcggtttcggccatgcacagcaaccggcgagcgtccttctgcagccgcaggtagtcggcgacggcgggctgctggcgatcgcaccctgggcattggtgatcggagcggtcggtaccgcgctgttctcctacaacggtttcggcggcgcggtgctgctcgccgaggacatgaaggacggcggccacagcgtgcatcgcgcggtgctctggtcgctggcgctggtggtgctgatcgagatcgtcccgctcgccgcgctgctgatcggcgcgccgtcgcttccggcgatgctcgccagccccgatccgatcggctacctgttgaacagccatggcaacgagacgctgtcgcgcctggtcagcgcgggaatcttcctctcggtgttcaacgccatcgtcgccatcgtcatccagagcgcccgggtgatcttcagcagcggtcgcgacgcgctctggatgccagcgttgaaccgtgccttcacccgtatccatccgcgctgggaatcgccctggctggccacgctgttcctcgccattccctcggcggcgctgagcttcagctccaacctggccgaactgacctcgttcaccgtgttgctgatcgtcatggtctacctgctcgtcgccctctgcgcgctgttcagccgggtgctgcggcgcgaccgcgagcatccctaccggatgccgctgtggccgctgccggcgctgctggcggtgagcggcgcgggatacctgctgctcaacctgttcctggcggcctcggccagggacgtgatgatcattgtcggactgctggcggtgtcggtgattctctactgcacctacggcaagctcagtccggcgttccagaagctttga

SEQ ID NO: 322810 - DNA, 807 bp, Pseudomonas aeruginosa
atgcacaccctgttccgggacatcggcatgcacgccagcctgggccgcgccatcgaacagatcggcggcaaccgtttctggaagcaattgatcctgctgctgcgccagcacctgccgttcgacaacgccctggcgatcttctaccccgccaacggcgtgccggtggccctggaggaatacgacgccgaaccgcacgccgggccggcctcgatgctcgcctacctgaacgggctgtacctgctcgaccccttctaccaggcttgccgggaaggcctggccagcggcctgtaccgcctcgaggagatcgccccggaccatttccggcagagcgagtactacctcagctacttccacgacaacgttctggaggacgaggtgcagttcatcctacaggtgcccggccagggcgcgctgtcgctgtcgctgggcatgcagaggatgttcgccgacgaggaatgcgggatgctcggcttgctctcgagctgggtcctggcgctgatgcagcagcactggcagcaacgcagccagcgcctgttgccggctgcaccgcaggaagagatggccacgcagatacgcgacgccctcagccacttcggcgccagcgtgctatcggaacgggaactggagatcgcccgcctgatccttcgcggctactcgtcgaaggccatggccgagcgcctggcgatctcgccggagacgatcaaggtccatcggcgccacctgtacgccaagctggacatttcctcgcaaccggagctgttctcgctgttcatacagtcgctcgggcacgacccggagaacccctag

SEQ ID NO: 322811 - DNA, 417 bp, Pseudomonas aeruginosa
gtgaaggcgaagtatctgggtctggcgattctcctgggcggtctcggcgggtgcgtggtgcatccgccgcagaccagcgaaccgccggcctcgctgccgccgcagagccagccgcagcccggtccgtccagcgcgcccggcgccaccccgccgcgcatcaccccgcaaccgcagactccggcgcagcccagccgctcgcgtccgcagttcgccccgccgccaggcggcaagggcgtctgggacggcagcctgggggtctacgtgatccgtggcgagcgcgatctctactaccgccagcgcacctactaccggtgggacggcggctggttctggtccaccagcccgcagggtccatggaccgagaccgacgctcgcggcatcccgcccggtctcagccggcgctacgccaatccatga

SEQ ID NO: 322812 - DNA, 1224 bp, Pseudomonas aeruginosa
atgatcgatttctggctcgctgccggcctgctgctgctggcggccctggcattcctgctgattccgctgctgcgtggccgtcgcgcccaggccgaggaagaccgtaccgccctgaacgtcgcgctttatcaggagcggatcgccgagctggccggccagcaggccgccggcacgctgaccgccgagcaactggagaatggccgcgccgaggctgcccgcgaactgctcgccgacaccgagggcagcggcgaagagcgtagctcgcgcctgggccgggcggtcccgctggtcgcggcgctgctggtgccgttggtcgcgctcggcctgtacctgcattggggcgccagcgacaaggtcgagctggcccgcgaattcgcccaggcgccgcactccatggaagagatgaccgcgcgcctggagcgcgcggtacaggcccagccggattccgcccagggctggtacttcctcggtcgcacctacatgacccaggaacgcggcgccgatgcggcgcgggccttcgaacgcgccgccgaactcagcgggcggcagccggaagtgctcggccagtgggcgcaggcactgtatttctccggcggcaagaaaatgaccgcgcagatcaaggccctggctgacgaggcgctgaagggcgacccggccgaagtgaccacccttggcctgctcggcatcgccgccttcgaagagcagcgctacgccgacgccatcggcttctgggagcgcctggtgtcggtgttgccgaacgaggacccggcacgctcggcgatccagggcggcatccagcgcgcccgcgagcgcatgaccgaggccgggcagactccgccggcgccggccgcgcccgctgccgccggggtgaccctgacggtgaaggtggatatcagcgacgcggtgaagggccaggtcaaggccgacgacagcgtgttcgtcttcgcccgcgccgtcggcggcccgccgatgccgttggcagtgaagcgcctgaccgtcgccgacctgccggccgaggtcagcctgagcgatgccgacgccatgatgccgcagctcaagctcagcggtttcccgcaggtcgagctggtggcacgggtatcccgcgccggcaacgccatctccggcgagtggatcggacgcggcaaaccgttgtctactgcccagtcgtcggcgcaagcgctgaccatcgacggcccggaccagccccaggcggcccggccataa

SEQ ID NO: 322813 - DNA, 468 bp, Pseudomonas aeruginosa
atgaagcgtttcctcgtcaccgcgctgctcggtctcgccctctgcggcgtggcccgggccgccatcgacacctacgagttcgccagcgacgccgagcgcgaacgcttccgcaacctgacccaggaactgcgctgcccgaagtgccagaaccaggacatcgccgactccaacgcaccgatcgccgccgacctgcgcaagcagatctacggccagttgcagcagggcaagagcgacggcgagatcgtcgactacatggttgcccgctacggtgatttcgttcgctacaagccgccggtcaacgagcgtacctggctgctctggttcggtccgggcgccttgctgctgttcggcgtgctggtgatcggcgtgatcgtcctgcgccgccggcgcaccgctgccaaggtgcaaaccaccctgtccgccgaggagcaagcgcgcctcgccaacctgttgaagaacgacaaatga

SEQ ID NO: 322814 - DNA, 543 bp, Pseudomonas aeruginosa
ttgaaacgagcgattctgctgctgccgctggggatcttcctgatcgtcgcggtgttcctcttccgcggcctctggctggaccccagcgagctgccctcggcgctgatcggcaagccgttcccggccttcgacctgcccagcgtgcaggacccggcccggcgcctgaccgaggccgacctcaagggcaagccggcgctggtcaacgtctggggcacctggtgcccgtcgtgccgggtcgagcacccggaactgacccgactggccgagcagggtgtggtgatctacgggatcaactacaaggacgacaacgccgccgccatcaagtggctgaacgagctgcacaatccctacctgctgagcatcagcgacgccgacggcaccctgggcctggacctgggcgtgtacggtgcgccggaaacctacctgatcgacaaacagggcatcatccgccacaagatcgtcggggtggtcgaccagaaagtctggcgcgagcaactggcgccgctgtaccagcaactgctggacgagccggaggcccgatga

SEQ ID NO: 322815 - DNA, 1974 bp, Pseudomonas aeruginosa
atgatccccgaactcggccacctggccctgatcctcgccctctgcctggccctggtgcagtcgagcttgccgctggtcggcgcctggcgcggcgaccgccagtggatgagcctggcgcgcccggcggcctgggggcagttcgccttcctcgccttcgccttcggttgcctgacctgggccttcctgcgcgacgacttctcggtggcctacgtggccggcaactccaacagcgcgctgccctggtactacaagttcagcgccgtttggggcgcccacgaaggttcgctgctgctctgggcgctgatcctcggtggctggaccttcgccgtgtcgatcttctcccggcaactgccggaggtcatgctggcccgcgtgctggcggtgatgggcatgatcagcaccggcttcctgctgttcctgatcatcacctccaacccgttcagccgcctgctgccgcagaccccgatggacggcaacgacctcaacccgctgctgcaggacgtcggcctgatcgtccacccgccgatgctctacatgggttacgtcggattctcggtggccttcgccttcgccatcgccgcactgctcggcggccgcctggacgccgcctgggcgcgctggtcgcggccctggaccctggtagcctgggccttcctcggtatcggcatcgtgctcggctcctggtgggcctactacgagctgggctgggggggctggtggttctgggatccggtggaaaacgcctccttcatgccctggctggtcggcactgcactgatccactcgctggcggtgaccgagaagcgcggcgtgttcaagagctggaccgtgctgctggcgatcgccgctttctccctgagcctgctgggcaccttcctggtccgctccggcgtgctcacctcggtgcacgccttcgcctccgacccggagcgcggggtgttcatcctcgccttcctgctgctggtggtcggcggctcgctgaccctgttcgccctgcgcgcgccggtggtcaagagccaggtcggcttcgccctgtggtcgcgcgagaccctgctgctgctgaacaacctgatgctggtggtggcggcctcgatgatcctcctcgggaccctctacccgctgctgctcgatgccctcagcggcgccaagctgtcggtcggcccgccgtacttcaacgccatgttcctgccgctgatggcggcgctgatggcggccctggcggtcggcgtgctggtgcgctggaaggacaccccgagccgctggctgctcggcatgctgaccccggtgctggtggccagcgcggtcctggcggcggccggttcgatgtacttcggcgatttcaactgggcggtgctggcggtgttcctgctatccgcctgggtggtcctggccggtttccgcgacttcctcgacaagacccggcacaagggcgtgctggccggcgcccgcagcctgacccgcagctactggggcatgcaactggcgcacctgggcatcgccgtgtgcgccatcggcatcgtcctcagcagccagtacagcgcccagcgtgacctgcgcatgtcgcccggcgacaccgtcgaactgggcggctaccacttcctcttcgacggcgcgaagcaccacgaagggccgaactacacctcggacaagggcagcatccacgtcagccgcgacggcaaggagatcgccaccctgcatccggagaagcgcctgtacaccgtgcagagttcgatgatgaccgaggcagggatcgatgccggctttacccgcgacctctacgtggcgctcggcgagccgctggagaacggtgcctgggcggtgcgcgtgcacgtcaagccgttcgtccgctggatctggttcggtggcctgctgatgggcctcggcggcgccctggcggcgctcgaccggcgctaccgggtgaaggtgaaaacacgtgtgcgcgaggccctgggcctcgccggtcagggagcctga

SEQ ID NO: 322816 - DNA, 489 bp, Pseudomonas aeruginosa
gtgaatccggtccgcaagaaacgtctgatcatcgtcctcgccatcgtggtgggcgtcggcgccgcggtgggcctggcgctgtcggccctgcaacagaacatcaacctgttctacaccccgacccagatcgccaacggcgaagcgccgaccgacacccgcatacgcgccggcggcctggtggaaaagggttctctgcaacgcagcgaggattcgctgaacgtgcgtttcgtagtcaccgacggcgccaaggaagtgaccatcgcctaccatggcatccttcccgacctgttccgcgaggggcagggcatcgtcgccctcggcaagctgggcggcgacggcgtgctggtggccgatgaagtgctggccaagcacgacgagaactacatgccgccggaagtcaccaaggcgctcaaggacagcggccaactgaagcactacgagaacggcaaggccgccggcgagacctcgtacaaccaggagggcaagtag

SEQ ID NO: 322817 - DNA, 177 bp, Pseudomonas aeruginosa
atgagcttcgaatcgttcggcgacttcctcgccatgggccatcacggcccctacgtctggttggcctacggcatcagcctgctggtgctggcgatcaatgtcgccgagccgctgctggcccggcgccgctacctgcaagaagaggcgcgtcgtctgcgccgggaggcccagcagtga

SEQ ID NO: 322818 - DNA, 756 bp, Pseudomonas aeruginosa
atgaattggacatggtttcacaagcttgggtcgcccaagtggttctacgagatcagcggccgctggctgccctggttcgccgtggcggcggcgctgctgatcgtcaccggctgcgtctgggggctggccttcgcgccgccggactaccagcagggcaatagcttccgcatcatctatatccatgtgccggcggccttcctcgcccagtcctgctacgtcatgctggccgtggccggtgccgtcgggctgatctggaagatgaagatcgccgacgtggcggtgcagtgcgccgctcccatcggcgcctggatgaccttcgtcgcgctgcttaccggggccgtctggggcaagccgacctggggcgcctggtgggtctgggacgcgcgcctgacggcgatgctgatcctgcttttcctctatttcggcatcatcgccctcggccaggcgatcagtaaccgcgacagcgcggccaaggcctgtgccgtactggccatcgtcggcgtggtgaacatcccgatcatcaaatactcggtggagtggtggaacaccctgcaccagccggccaccttcaccatcaccgagaaaccggcgatgccggtggagatgtggttgccgttgctgatcatggtcctcggcttctattgcttcttcgcggccatgctgctggtgcgcatgcgcctggaagtgctcaagcgcgagtcccgcaccgcctgggcgaaagccgaggtgaaggccctggtggagaaggcacgatga

SEQ ID NO: 322819 - DNA, 672 bp, Pseudomonas aeruginosa
atgagcaacgtcttcagcctgctcctggcgcgcgaggcgcgcctgctgttccgccgaccggcggagctggccaatccgctggtgttcttcgccatcgtcatcgccctgttccccctggcggtcgggccggagagccaattgctacaaaccttgtcgcccggcctggtctgggtggcggcgctattggccgtgctgctctcgctggaagggctgttccgcagcgatttcgaggacggttctctggagcagtgggtcctttcgccgcaccccctggctcttctggtgctggccaaggtgctggcacactggctgttttccgggctggccctggtcctgatgtcgccgctgttcgcgctgatgctgggcctgccggcccgttgcataccggtgctgctgctttccctgttgctcggtacaccggtgctgagcctgctcggcgccgtcggcgcggccttgaccgtgggcctcaagcgcggcggcctgttgctggcgctgctgatcctgccgctgtacatcccggtgctgattctcggtagcggggcgctgcaggcttcgctgcagggactgcccagcagcggacatttattgtggctggcgagcctgacggcgctagcattgacactcacgccattcgccatcgctgccggcctgaagatcagcgtaggcgagtga

SEQ ID NO: 322820 - DNA, 702 bp, Pseudomonas aeruginosa
atgtccgatcctgctgaagtccccacagccagccccttgctggaaaccgtcgggctcgcctgcgagcgcgactggcgcatgctgttcgagcgcctcgacctgcgcctggccgccggtgagatgttgcaggtggtgggtcccaacggcagcggcaagaccagcctgctgcgcctgctgtccggactgatgcagccgaccgccggggaagtccgcctgaacggccggccgctcgccgaacagcgcggcgaactggcccgcagcctgttgtggatcggccacgccgcgggaatcaagggcctgctcagcgccgaggagaacctcacctggctctgcgcgctgcaccagccggccagccgcgaggcgatctggcaggccctggccgacgtcggcctgcgtggcttcgaggacgttccctgccacaccctttccgccggccagcaacgccgcgtggcgctggcccgcctgtacctggacgcaccgcccttgtggatcctcgatgaacccttcaccgccctcgacaaacagggggtggcgcaactggaaacgcacctggccgggcattgccagcgcggcgggatggtggtgctgaccacccaccacagcctgcagcagatgcccgccggctaccgcgagctggacctcggtgcgctcaaggcggccagcggcgcgacggtcgagccggcgctgggcgacccggcatga

SEQ ID NO: 322821 - DNA, 1428 bp, Pseudomonas aeruginosa
atgaacaaagcaacgacggaacctgcctacaactacaaggtggttcgccagttcgccatcatgaccgtggtatggggcgtgatcggcatggggttgggtgtactgatcgcctcgcaactggtctggccccagatgaacttcgacctgccctggaccagcttcggccgcctgcggccgctgcataccaacctggtgatcttcgccttcggcggctgcgcgctgttcgccaccagctactacacggtgcagcgtacctgccaggtgcgactgttctccgacaccctggccgccttcaccttctggggctggcaggcggtggcggtgatcctgctggtcagcctgccgctgggcaacaccaccaccaaggaatacgccgagatcgagttcaccggcgcgatctggctggcgatcgtctgggtcgcctacgcggtagtgttcttcggcaccctgatcaagcgcaaggtcaagcacatctatgtcggcaactggttcttcggctcgttcatcctgaccaccgcgatgctgcacatcgtcaaccacatgtcgctgccggtgagctggttcaagtcctactcgatgtactccggcgccaccgatgccatggtccagtggtggtacgggcacaacgccgtaggcttcttcctgaccaccggcttcctcggcatgatgtactacttcgtgcccaagcaagccgggcgcccggtctactcctaccggctgtccatcgtccacttctgggcgctgatcaccctgtacatctgggccggcccgcaccacctgcactacaccgcgctgccggactgggcgcagtcgctgggcatggtgatgtcgctgatcctcctggcaccgagctggggcggcatgatcaacggcatgatgaccctctccggcgcctggcataagctgcgcaccgacccgatcctgcgcttcctggtggtgtccctggccttctacggcatgtccaccttcgaaggcccgatgatggcgatcaagaccgtcaacgccctctcccactacaccgactggaccatcggccacgtgcacgccggcgccctcggctgggtggcgatgatctccatcggctcgctctaccacctgatcccgaaagtcttcggtcgcccgcagatgcacagcatcggcctgatcaacgcgcacttctggctggccaccatcggcaccgtgctgtacatcgcctcgatgtgggtcaacggcatcacccagggcctgatgtggcgcgcggtcaacgaggacggcaccctgacctactccttcgttgaagcactggtcgcaagccacccgggcttcatcgtgcgcatgatcggcggtggtttcttcctcaccggcatgctgctgatggcctacaacacctggcgcaccgtgcgtgctgccaagccggccgaatacgaagccgccgcgcagatcgcctga

SEQ ID NO: 322822 - DNA, 612 bp, Pseudomonas aeruginosa
atgaagaaccacgaaatactcgagaagaacgtcggcctgctggccatcttcatggtgatcgccgtcagcatcggcggcctgacccagatcgttccgctgttcttccaggacgtgaccaataccccggtcgaaggcatgaagccgcgtaccgccctggaactggaaggtcgcgacatctacatccgcgaaggctgcgtcggctgccactcgcagatggtccgtccgttccgtgccgagaccgaacgctacggccattactcggtcgccggtgaaagcgtctgggaccacccgttcctgtggggttccaagcgtaccggcccggacctggcccgcgtcggcggccgttactccgacgactggcaccgcgcgcacctgtacaacccgcgcaacgtggtgcccgagtcgaagatgcctgcctacccgtggctggtagagaacaagcttgatggcaaggacaccgccaccaagatggaagtcctgcgcaagctgggcgtgccttacaccgacgaggacatcgccggtgcacgtgaagccgtgaagggcaagaccgagatggacgccctggtggcgttccttcaaggcctgggaacctctatcaagagcaaacggtga

SEQ ID NO: 322823 - DNA, 186 bp, Pseudomonas aeruginosa
atggatatcgggactctgcgtggactgggcaccgtggtgatcatggtcgccttcatcggcctggtgatctgggcctacagcggcaagcgcaagaagagcttcgacgaagcgacgatgctgcccttcgcagacgatcccgaagccaaaaagcacgtcgagcaagcttctaggagtaacaaagaatga

SEQ ID NO: 322824 - DNA, 957 bp, Pseudomonas aeruginosa
atgacgaccttctggagtctgtacattacagctctcaccctcggcaccctgctggcgctgacctggctgatcttcgccacccgcaagggccagcgcagcagcaccaccgacgagaccgtgggccactcctacgacggcatcgaggagtacgacaacccgctgccgaagtggtggttcatgctgttcgtcggcaccctggtgttcgccgtgggctacctggccctgtacccgggcctgggcacctggaaaggcctgatgccgggctaccagtccgccgacgaattcgccgacaaggaaaaaggctggaccggcgtccaccagtgggaaaaggaaatggccaaggccgacgagaaatacggcccgatcttcgccaagttcgccgcgatgcccatcgaggaagtcgccaaggatccgcaggcggtgaaaatgggcggtcgcctgttcgcctccaactgctcgatctgccacggctccgacgccaagggcgcctacggcttccccaacctgaccgacgccgactggcgctggggcggcgagccggaaaccatcaagaccaccatcatggctggccgccacgccgccatgccggcctggggtgaagtgatcggcgaggaaggcgtgaagaacgtcgccgctttcgtcctcacccagatggatggccgtaagctgccggaaggcgccaaggcggacatcgaggccggcaagcaggtcttcgctactacctgcgtcgcctgccacggtccggaaggcaagggcaccccggcgatgggcgctcccgatctgacccaccccggcgcgttcatctacggctccagcttcgcgcaactgcagcagaccatccgctacggtcgccagggtgtgatgccggcgcaacaggaacacctgggcaacgacaaggtgcacctgctggccgcctacgtatacagcctgtcgcacggcgagaagagcgccgaataa

SEQ ID NO: 322825 - DNA, 1416 bp, Pseudomonas aeruginosa
atgagcaaacagattcccgttcaagacgtcaccccgcctgccaagggcgacaccaataacaacgatctctacgccaagcgcgagaagatctacacccgggccttcaccggtatcttccgccgactgcgcatggtgggcggtgcggcgctcttcctcctctacttcggtaccgtctggctcaactggagcggccgccaggccgtctggtgggacctacccgagcgcaagttctacatcttcggcgccaccttctggccgcaggacttcatgctgctgtcctggctgctgatcgtctgcgccttcggcctgttcttcatcaccgtgttcgccggtcgcgtctggtgtggctatacctgcccgcagagcgtgtggacctggatctacatgtggtgcgagaaggtcaccgaaggcgaccgcaaccagcgcatcaagctggacaaggctccgatgagcggcaacaagctgctgcgcaagaccgccaagcacagcctgtggctgctgatcggcctggtcaccggcctgaccttcgtcggctacttctcgccgatccgcgagctgattcccgagctgctcaccggccaggccgacggctgggcctacttctgggtcggcttcttcaccctggccacctacggcaacgccggctggctgcgcgagcaggtgtgcatctacatgtgcccctacgcgcgcttccagagcgtgatgttcgacaaggacaccctgatcgtctcctacgatccgcgtcgcggcgagaagcgcggcccgcgcaagaagtccctcgactacaaggcccagggcctgggcgactgcatcgactgcacgatgtgcgtgcaggtctgcccgaccggcatcgacatccgcgacggcctgcagatcgagtgcatcggctgcgccgcgtgcatcgacgcctgcgacagcatcatggagaagatgaactacccgaaagggctgatcagctacaccaccgagcacaacctcaacggccagaagacccacctggcccggccgcgcctgatcggctacgccatcgccctggtgctgatgatttccgccctgatcaccgcggtggtcctgcgcccgctggtcggcttcgacgtcagcaaggaccgcgtgctctaccgcgagaacgaactcggccgcatcgagaacgtgtacagcctgaagatcatgaacaaggatcagcaggaccacacctacatcctcggcgccaagggcctcgaaggcctgaccctggaaggccggcgcgagctgaaggtggcggcgggcgacatcctcaacctgccgatggaactgtccatcgagccggagaagctgccttcgaccaccaacgagatcgtcttcaccatcgagtcggccgacgacccgagcatccataaagaagcgaagagtcgcttcattggcccacgcacccgttga

SEQ ID NO: 322826 - DNA, 540 bp, Pseudomonas aeruginosa
atgcagtccgagacccaccctcaaccctggtacaaacacttctgggcctggttcatcgtggccctcctggcgacctcggtggtgctcgggctgagcctggtcaccatcgcggtgcgcaaccaggacaccctggtcaccgacaactactacgaggccggcaagggcatcaaccgctccctggaacgcgagaacctggccgtacgcctgcaagtccacgccaaggtcaaggtcgacgacctgaccggcgaagtcgaagtgcgcctgaccggcaacagccgtccggatcagctcaccctcaacctgatctcgccgacccagccggagaaggaccgccgcgtggagctgctgcgcagcaactccgaccgcgagcgctacgtcgggcaactgaccgacgccgtcgagggccgtcgcttcgtcgaactgctcggccaggaaggcagcggccagtggcgcctgttcgaggaagaggtggtatcgccgaccgtggtcatggagctgggtgacgaaccgctccagggagcagaagcgaagcgcccatga

SEQ ID NO: 322827 - DNA, 2436 bp, Pseudomonas aeruginosa
atgagcgcccccctgccctgctaccactgcggcttgccggtccccgccggcagccgcttcgaggcccgcgtgctcggcgagacgcgggccatgtgctgtccgggctgccaggcggtggccgaggccatcgtcgccggcggcctggaaagctactaccggcaccgcagcgaaaacgccgccaaccccgaagccttgcccaaggcgctcagcgaagagttgcagctctacgaccgcccggacgtacagggcggcttcgtccgccatgagggcgagctggcggaaaccagcctgatgatcgaaggcatcagttgcgccgcctgcggctggctgatcgagaagcacctgcgccagttgcctggcgtggccgaggcgcggctcaacctgtccaaccatcgcctgcacgtgcgctggcaggacagccagttgccgctcagccagttgctcggcgaactgcgccagatcggctatgccggccatccctaccaacccgaccacgccaccgagcgcctggccatggagaaccgccgcgccctgcgccagctcggtgtcgccgggctgctgtggatccaggtgatgatggcggtgatggcgacctggccggaattcaacctcgacctttccgccggcatggaccgcatcctgcgctgggtcagcctgatcctcaccacgccgatcgtcttctactgctgcggccagttcttccgtggcgccctgcgcgacctgcgcacccgccacctgaccatggacgtctcggtgtcgctggcgatcggcggcgcctacgtcgccggcatctggtcgacgatcaccggccagggcgagctgtatttcgacgcggtcggcatgttcgccctgttcctcctcgccggccgctacctcgaacgccgcgcgcgggagcgcaccgccgcctccaccgcgcaactggtcaacctgctgccggcgtcctgcctgcgcctggacgccgccaaccagggcgagcgcatcctgctcagcgaactgcgcgtcggcgaccgcgtgctggtaccgccaggcgccgtgctgccggccgacggagtgatcctcgacggccagtccagcgtcgacgagtcgctgctcaccggcgagtacctgccccatccacgccaggccggcgacgccgtcaccggcggcaccctgaacgtcgaggggccgctgaccgtcgaggtcggcgcccttggcgacgacagccgcctgtcggccatcgtccgcctgctggaacgcgcccaggcggacaagccgcgcctggcggaactggccgacaaggtggcgcagtggttcctgctcatcgtcctgctggtcgccgcagcggtcggcgcgctgtggtggcaggtcgaccaccagcgcgccttctgggtggtgctgtcgctgctggtcgccacctgcccctgcgccctgtcgctggccacgcccaccgcgctcaccgcggccaccggcagcctgcacaagctcggcctgctgatcacgcgcgggcacgtgctggaagggctgaaccacatcgacacggtaatcttcgacaagaccggcaccctcaccgaaggccgcctgacgctcaagcaggtgctacccctgcgcgatctcgacgcggatcgctgcctggccctcgccgccgccctcgagaaccgttccgaacaccccatcgcccgcgccttcggccgtgcgccggaggccgccgacagcgtcgcaagccatccgggactgggcctcgaaggcctggtggaaggccgccgcctgcgcatcggccaggccgccttcgtcagcaacctgggcggcagcgccacgcccgcgatgcccggcgactccggacagtggctgctgctcggcgacgagcagggaccgctggcctggttcggtctcgacgaccgcctgcgcagcgacgcccccgccctgctcgccgcctgcaaggcgcgcggctggcgcaccctcctgctatccggtgacgcctcgccgatggtcgccagcgtcgctgccgaactgggcatcgacgaagcccgcggcggcctgaccccggacgacaagctggccatgctcgaacgcctgcacggcgagggccgccgggtgctgatgctcggcgacggagtcaacgacgtaccggtgctcgccggtgccgacatcagcgtcgccatgggcagcgccaccgacctggccaagaccagcgccgacgcggtgctcctgtccaaccgcctggacagcctggtgcaggctttccggctggcgcgccgcacccgccatatcatcatcgagaacctggcctgggccagcctgtacaatggcctggtcctgcccttcgccgcgctcggctggatcaccccgggctgggcggcgatcggcatgtcggtcagttcgctgctggtggtggtcaacgccctgcggctgacccgaatcccttcgccgaggtccgtatggccgcgctctacatcctga

SEQ ID NO: 322828 - DNA, 210 bp, Pseudomonas aeruginosa
atggccgcgctctacatcctgatccccgtcgcgatcgtcatcgtcgccatcgccatctacgtgttcttctgggcggtggacagcggccagtacgacgatctcgacggccccgcccacagcattctcttcgacgacgaagacccgaagcaccaggccggcgtcgacgaagcggagaagccgtcgaaacccgaggaccgaccgcgtggctga

SEQ ID NO: 322829 - DNA, 684 bp, Pseudomonas aeruginosa
gtggctgaactggcgccgctgctggtttccgcgctgatcctcggcctgctcgggggaggccactgcctgggcatgtgcggcggcctgatgggcgccctgaccctggccattcccgccgaacagcgcggccgtcgtctgcgcctgctgctggcctacaacctcggccgcatcctcagctacgcctgcgccggcctgctgctcggcctggccggctgggcggtggcgcgcaccccgttggccggcgcgctgcgggtggtcgccgggctgctgctgatcgccatgggactctacctggccggctggtggagcggcctgacccgcgtcgaggcgctcggtcgcggcctctggcgccacctggaacccttcgcccggcgcctgctgccggtctccagtctgccacgggccctgctgctcggagcgatctggggctggctgccctgcgggctggtctacagcaccctgctctgggccaccagccagggatcggcactggacagcgcgctgctgatgctggcgttcggcctcggcacctggccggttctgctggccaccggcatggccgccgaacgggtgaccgccctgctgcgccgtcgcggcgtacgcatcgtgggcggcctgatggtcatcctcttcggcctctggaccctcccaggaccgcaccaggcctggctgatggggcattga

SEQ ID NO: 322830 - DNA, 1383 bp, Pseudomonas aeruginosa
atgctcgacaccattcgctgggacgctgacctgattcggcgctacgacctttccggcccgcgttacacctcctatccgaccgccgtgcagttccacgaaggcatcggcccgttcgaccagttgcacgccctgcgcgacagccggaaggccggacaccccctgtcgctctacgtgcacatcccgttctgcgccaacatctgctactactgcgcctgcaacaaggtgatcaccaaggatcgcgggcgcagcgcgccgtacctcgcgcgcctggtccgcgagatcgagatcgtcagccgccacctctcccgcgagcaggtggtcgagcaactgcacttcggtggcggaacccctaccttcctcagtcccggccagttgcgcgaactcatgtcgcaattgcgcacccacctcaacctgctggacgacgattcgggcgactacggcatcgagatcgacccgcgcgaggccgactggtcgaccatgggcctgctccgcgaactcggtttcaaccgcgtcagcctcggcgtacaggacttcgacatggaggtgcagaaggcggtcaaccgcatgcagaccccggaggagacccgtaccatcgtcgaggccgcgcgcaccctgcagtaccgctcgatcaacctcgacctgatctacggactgccgaaacagacgccggacagcttcgcccgcacggtcgacgaagtgatcgcgctacagccggatcgcctctcggtgttcaactacgcccacctgcccgagcgtttcatgccgcagcggcggatcaacgccgacgacctgccgagcccgggccagaagctggaaatgctccagcgcaccaccgagcaactcgccgcggcgggctaccgctatatcggcatggatcacttcgccctgcccgacgacgagctggccagcgcccaggaagacggcaccctgcaacgcaatttccagggctacaccacgcacgggcactgtgacctggtaggtctcggggtctcggcgatcagccagatcggcgacctctacagccagaacagcagcgacatcaacgactaccagaccagcctcgacaacggccagttggcgatccgtcgcggcctgcactgcaacagcgacgaccgggtgcggcgcgcggtgatccagcaactgatctgccacttcgaactggccttcgaggatatcgagacagagttcggcatcgacttccgcagttacttcgccgagctgtggcccgatctcgaacgcttcgccgccgacggcctgatccgcctggacgccaagggcatcgacatcacgtcttccggacgtctgctggtgcgttcgatctgcatgctgttcgaccgctacctgcccagcctcaaccggcagcgcttctcccgggtgatctga

SEQ ID NO: 322831 - DNA, 468 bp, Pseudomonas aeruginosa
atgttgaccctcagtggctggatcaccacccaggtgccaccctcgtcgcgcgccgccgcggacgccaaggccgcgcggaccggcaccgccgagcaggcggaagacccggccgccggcaccgacgccgccgatcagcatgtacggctttcccaggcagggcgcgagctggccgccaccatgggggtgccggtggaggaggaggacgaggatatcccgcaggagttgcggccgatggtgaagatgatccgccagttgaagaagaagatcgaagagaagctcagggagctgcaggaggccatgaggtcgtccgatccgggggcgaaggaggctcgcgtgcctgagttgcagaaggagttgcaacaactcaactccgccctgcagacggcgacggcagcgatggcatcggccatcaaggagatgggtatcagcgacccggcgctgatcatgaaggtcatgggcagccggtag

SEQ ID NO: 322832 - DNA, 735 bp, Pseudomonas aeruginosa
atggccgaaaccatcaaggtgcgcgcactgccccaagcacactgcaaggattgcagtctggccccgctgtgcctccccctgtcgctgaccgtggaagacatggattcgctggacgagatcgtcaagcgcggtcgtcccctgaagaaaggcgaattcctgttccgccagggtgatcctttcggctcggtctttgccgtgcgctccggcgccctgaaaaccttcagcatcaccgatgccggcgaagagcagatcaccggcttccacctgcccagcgagctggtcggcctgtccgggatggataccgagacctatccggtatccgcccaggccctggaaaccacctcggtctgcgagattcccttcgagcgcctggacgaactgtccgagcagctgccgcaactgcgccgccaactgatgcgcctgatgagccgggaaatccgcgatgaccagcagatgatgctgctgctgtcgaagaagactgccgacgagcgcatcgccactttcctggtcaacctgtcggcgcgcttccgtgcccgtggcttctccgcccagcagttccgcctggccatgtcgcgcaacgagatcggcaactatctcggcctggccgtggaaaccgtgtcgcgggtcttcacccgcttccagcagaacggcctgatcagcgcggaaggcaaggaagtgcacatcctcgactccatcgagctgtgcgccctcgccggcggccagctggaaggctga

SEQ ID NO: 322833 - DNA, 549 bp, Pseudomonas aeruginosa
atgattttcgacgagttcaccctcaagtcgcagatccgcgccgtgccggactttccaaagcccggcgtggtgttccgcgacatcaccccgctgttccagtcgccacgcgcgctgcgcatgaccgtggacagcttcgtccagcgctacatcgaggccgatttcagccacatcggcgccatggatgcccgcggcttcctcatcggctcggcggtggcctatgcgctgaacaagccgctggtcctgttccgcaagcagggcaagctacccgccgacgtactcgccgagggctaccagaccgaatacggcgaggccttcctcgaagtacatgccgacagcctctgcgaaggcgacagcgtactgatcttcgacgacctcatcgccaccggcgggaccctgctggcggccgcgagcctggtacgacgcctcggggccagggtcttcgaggccgcggcgatcatcgacctgccggaactcggcggctccactcgcctgcaggacgccggcatctccaccttcagtctcaccgcgttcgctctcgacgagcgttga

SEQ ID NO: 322834 - DNA, 837 bp, Pseudomonas aeruginosa
atgactgccactggcaccgcctccccggttcgcgccaatttccccgtgcggcggatggatttcagcttcagcgaaaccccgaagtactggtgggacggccaacccttcatgacccagttcatgaacaacctgtcttcgcttttcccctacggcgaaaaattcttcgtcgatagcgtgcgcgcggtgcgcgaccgcctggaggatccgcaactgaagaaggacgtcagcgccttcatcggccaggaggcgatgcactcgaaggagcatgccgcctacaacgaatatgccgaggagcacggggtcgacctggagtgcctcgaactgcggatcaaggtcctgctggaaaacgtcagcaaggtcaccaccaggaaacaccagttggcgatcacctgcgccctcgagcatttcaccgcgaccatggccgcgcagctgctcaagcgcgaagacctgaccatccagatgcagtcgccgaagatgtacaagctgtggatgtggcatgccatcgaggagaacgaacacaagaacgtcgcctacgatgtgtaccagaaagtctacggcggctacttcacccgggttctggtgatgatgctgaccaccctgatgttcttcggcgtcatcggctggttccagctcgacctgctacgcaaggacggccaattgttcaactggcgctcctggaagcatggcctgggcaccctgttcggcctgcgcaagggcttcttcacccgcctgctgctgccctacctggactactaccggccgggcttccaccccagcgaccacgacaccgcgaaactggagaaatactggaaggacaaactggccttcgccgattga

SEQ ID NO: 322835 - DNA, 369 bp, Pseudomonas aeruginosa
atgcgttcctggatctatctgttactggctatcggcgccgaagtgatcggcaccacctcgatgaaactggccgccacccacgcccctgtcgcaggcatgctgctgatgtacgggatgatcggcctgtcctatttcttcctcgccctggcggtcaagcgtgtccccgtcggagtcgcctacgccctttgggaaggcattggcatcgtcctgatcacggcggtcagcgtcgcctggctgggcgaaagcatcggcctgtacaaggccgtcggcctcggcgtgatgatcgccggcatcctgctgatcaagtccggcacccgcaacgccagcggcacgccggcgcagtcccgtggggaggccgtcacatgctga

SEQ ID NO: 322836 - DNA, 330 bp, Pseudomonas aeruginosa
atgctgaccctgaactggattcccttcgcctggctcggcctggcaatcgcccttgaggtcgtcgccaacctgctgttgaaatactccgacggtttccgcaggcgcggcctcgggatcgcctcgatcctctgcgtgatggccgccttcaccgcgctggcgcaggcggtgaaggacatcgagctgtcactcgcctatgcgatctggggcggcttcggcatcctcgccaccgtcgccatgggctgggcgctgttcggccagcgcctggcctggcgcggctggctcggcctgttgctgctgctggccggcatgagcctgctcaagctggcctga

SEQ ID NO: 322837 - DNA, 849 bp, Pseudomonas aeruginosa
atgagcgatatgaacgaaacgaaggacagggttgccgacgctcccggcaaacgcgccttgctggaggcggccttgcgcctgggcagcagcagccgcagcctgggggccatcggcttgcgcgagctggcgcgcgaggcgggcctgaatccgaacaccttctatcggcatttccgcgatatcgacgatcttggcctgaccatgatccgcgacatctctacccagctgcgccagccgctgcgccagcttcgccgcgaggccgcgactcgtgcggcgcccggcgcccgagcgcagacgacgccgttcgggctggacctggaaagggggcggcgggtctgccgggagacggtgcggctgttcttcgacttcgtggagagcaatcccgccgcgttcatcgtcggcgtgcgtgaactgcatggggcttcgccggtgctgcgtggtgccctgcgtcagatcatggatgagttcgccgaggacatgtcggaggacatcatcgaattcaggttgttgccggcggtgagcgaggcgaccatccgtcgcctctccagcctgatcggccgccagctgtttcagttgtcgctggactatatcggccagccggagcggcgtcgggaaatctgcgccctgggtgaggaacagatactgctgttgttcaccggcgccgcggtcctgcagatgatgggcgtttcgttggacgccgaggcgtcaggccagcttgagcaggctcatgccggccagcagcagcaacaggccgagccagccgcgccaggccaggcgctggccgaacagcgcccagcccatggcgacggtggcgaggatgccgaagccgccccagatcgcataggcgagtga

SEQ ID NO: 322838 - DNA, 1545 bp, Pseudomonas aeruginosa
atgagtacccaacccacccctgccgccgcccggcactgcaaggtcgccatcatcggcaccggtttctccgggctggggatggcgatccgtctccgccaggaaggcgaggacgacttcctgatcttcgaaaaggacgccggcgtcggcggcacctggagagtcaacaactaccctggttgcgcctgcgacgtgcaatcccacgtctattccttctccttcgaagcgaacccggagtggacgcggatgttcgcccgccagccggaaatccgcgcctatctggagaagtgctgggaaaaataccgcttgcaggaaaagaccctgctgaacaccgagatcggcaaactggcctgggacgagcggcaaagcctctggcacctgcatgacgcccagggcaaccattacaccgcgaacgccgtggtttccggcatgggcggcctgtccaccccggcctatccacgcctcgatggcctggagaacttccagggcaaggtcttccattcccagcagtgggaccatgactacgacctcaagggcaagcgcgtggcggtgatcggcaccggcgcctcggcgatccagttcgtcccggagatccagccgctggtggccgcgcttgatctctaccagcgcactccgccatggatcctgcccaaacccgaccgggcaatcagcgaaaccgagcgccggcgcttccggcgcttcccgctggtgcagaagctctggcgcggcggcctctacagcctgctcgaagggcgggtgctgggcttcaccttcgccccgcaggtaatgaagctggtgcagcgcctggcgatccgccacatccacaagcagatcaaggatccggaactgcgccgcaaggtcacgccggactacaccatcggctgcaagcgcatcctcatgtcgcacaactactaccctgccctggctgccgccaactccacggtgatcaccgaaggcatccgcgccgtcaccgccaatggaatcgtcgacggcaacggccgggaacgcgaggtcgacgcgatcatcttcggtaccggcttcaccgccaacgaccctatcccccgcggagtggtcttcggtcgcgacggccgcgacctactggacagctggaccaagggcccggaagcctacaagggcactaccaccgccggcttccccaacctgttcttcctgatgggaccgaacaccggcctcggccacaactcgatggtctacatgatcgagtcgcagatcgcctacgtcctcgatgcgctgaagctgatgaagcgccgcgaactgctcagtctcgaggtcaaggccccggtgcaggaacgctacaacgaatacctccagcgcaagctggaccgcagcgtctggagcgtgggcggttgcaagagctggtacctgcatccggtcagcggccgcaactgcaccctgtggccgggattcacctggcgcttccgtgccctgacccggcagttcgacgcctccgcctaccacctcaccacgacaccgctcgccgccctgagcaacgaagcccgccaacaggccgaaggggtacccgcatga

SEQ ID NO: 322839 - DNA, 888 bp, Pseudomonas aeruginosa
atgaagtcgttcgaaaacaaagtcgccgccatcaccggcgcaggctcgggcatcggtcgcgccctggccgtggagctgggcaggcagggttgtcacctggccctggccgacgtcaatgccgcagctctcgaggaaacccgccaattgctcgccagcagcggggtacgcgtctccaccgcggtcgtcgacgtggccgaccgcgagcaggtgcaggcctgggccgacaaggcggccagcgaacatggccgggtgaacctgatcttcaacaacgcgggcgtcgcccacgcaggtaccgtggaaggcagcgactactcggaatacgagtggatcatgaacatcaacttctggggcgtggtgaacggtaccaaggcgttccttccgcacctgaaggcctccggcaacggccacgtggtcaatgtctccagcgtcttcgggctgttcgcccagcccggcatgagcgcctacaacgccaccaagtacgcggtgcgcggcttcaccgagtcgttgcgccaggaactggacatggaggactccggcgtctccgccagttgcgtgcatcccggcgggatcaagaccaacatcgccaagaccgcgcgaatgaacgagagcatggccaaggtcaccggccaggctccggacaaggctcgcgagcaattcaacgaccagttgctgcggaccaccccggagaaggccgcccaggtcatcctgcgcggcgtgcagcgcgacagccggcgcatcctgatcggcaccgacgcccacgcgatcgacgtgatgctgcgcctggcaccagtgctctaccagcgcctggtcaccgccagcatgcgcctggcagcgcgcttcgcgccgcgcccgaagagcccccagggcgcccgcgaagccagcgagtga

SEQ ID NO: 322840 - DNA, 540 bp, Pseudomonas aeruginosa
atgaaccctccccttcctcacttccgctaccatcccgaaccgctcgccagcggcagcatcgaggcttccgccaccacctgccagtgctgtggcaaggctcgtggctacgtctacaccggttcgccctattcccgccacgagttgccgcccggcagcctttgcccctggtgcatagccgacggcagcgcggccgcgcgctacgaagcgagcttttccgacgactatccgctgctcgacgccggcgtcgccgcggatatcgtcaccgaagtctgcgagcgcacgcccggctacacctcctggcagcaggagcgctggctggtttgctgcgaggatgcctgcgcctttcgcggcgacgcggggcgtgaggaaatcgggcaactgggagccgagggcctggcgcagcgcttcgccgatttcgcctggccggctatcacctggcaacgcctcgtcgacgcctatacgcccggcggcaatccggccatctaccgcttcgactgcctgcactgtggccaggcgcattacgacctggacttcacctga

SEQ ID NO: 322841 - DNA, 1149 bp, Pseudomonas aeruginosa
atgactgacttccagcagtacttcgacgagtcccatcaactgatccgggattcggtgcgccgtttcgtcgagcgcgaggtgttgccgtacatcgatgaatgggaggaggccgaggaatttccccgcgaactctatctcaaggccggcgcggccgggatcctcggcatcggctacccggaagcctacggtggcagttgcgaaggcgatctgttcgccaaggtggcggccagcgaagagctcatgcgctgcggttccggcggcttggtcgccgggttgggatcgctggatatcggcttgcctccggtggtcaagtgggcccgtcccgaggtgcgcgagcgggtagtgccggcggtgctgcgcggcgagaagatcatggccctggcggtcaccgagccctctggcggctccgacgtggccaacctgaagacccgtgcggtgcgcgatggcgatcactatcgcgtcagcggcagcaagaccttcatcaccagcggcgtgcgcgcggactactacacggtggcggtgcgtaccggcggcgagggtttcgccggcatcagcctgctgctggtggagaagggcactgccgggttcagtgtcggccgcaagctgaagaagatgggctggtgggcgtcggataccgccgaactgttcttcgacgactgccgggtgcctgcggaaaacctcatcggcgtggagaatgccggcttcgcctgcatcatggccaatttccagagcgagcgcctggccctggcggtgatggccaacatgaccgcgcaactggctctggaggagtcgctgcgctgggcgcgcgagcgagaagcgttcggcaagccgatcggcaagttccaggtgctgcgccatcgtctcgcggaaatggccacgcaactggaggtttcccgggagttcacctatcgccaggcagcgaagatggccgccggcaagagcgtgatcaaggagatatcgatggccaagaacttcgctaccgatgtcgccgatcgcctgacctatgatgccgtgcaggtgctcggcggcatgggctacatgcgcgaaagcctggtggagcggctgtatcgcgacaaccggattctctccatcggcggcggttcgcgggaaatcatgaacgagatcatcggcaagcagatggggttgtag

SEQ ID NO: 322842 - DNA, 597 bp, Pseudomonas aeruginosa
atgagtttcagcccgctgatccgccaactgatcgagtccctgcgcattcttcccggtgtcgggcagaagtcggcccagcgcatggcgctgatgctgctggagcgcgatcgcagcggcggcctgaagctggcccaggcgttgaccgccgcgatggaaggggtcggtcattgccggcagtgccgtaccctcagcgaggaggagttgtgcccgcagtgcgccgacccgcgacgcgacgactcgctgctctgcgtggtggaaggcccgctggacgtattcgcggtggagcagaccggctaccgcggccgctatttcgtgctcaagggacacctgtcgccgctcgacggcctggggccggaggcgatcggcattcccgaactggaagcgcggatcagggacggagccttcagcgaggtgatcctcgccaccaaccccaccgtggaaggcgaggccaccgcccactatatcgcccagctactggccggccgcggcctgaccttgtcgcgtatcgcccatggcgtgccgctgggtggcgagctggagctggtcgatggcggcaccttggcccacgccctggccggacggcggccgatctcctga

SEQ ID NO: 322843 - DNA, 327 bp, Pseudomonas aeruginosa
atgatgaaaggtggcatggccggcctgatgaagcaggcgcagcagatgcaggaaaagatgcagaagatgcaggaagaactggccaacgccgaagtgaccgggcaatccggcgccggtctggtcagcgtggtgatgaccgggcgccacgacgtcaagcgcgtcagcctggacgacagcctgatgcaggaagacaaggaaatcctcgaagacctgatcgcggccgcggtcaacgatgcggtgcgcaagatcgagcagaacaaccaggaaaagatgtccggcttcacctcgggcatgcaactgccgcccggcttcaagatgcccttctga

SEQ ID NO: 322844 - DNA, 1995 bp, Pseudomonas aeruginosa
atggtcggccagacccatgtgctcaaggctctgatcaacgccctggacaaccagcggctgcaccatgcctacctgttcaccggtacccgcggggtcggcaagaccaccatcgcgcggatcctggccaagtgcctgaactgcgagaccggggtcagctccacgccgtgcggcgaatgctcggtctgtcgcgaaatcgacgaaggccgcttcgtcgacctgatcgaagtggacgccgcgagccggaccaaggtcgaggatacccgcgagctgctcgacaacgtgcagtactcgccgacccgcggacgctacaaggtctacctgatcgacgaagtgcacatgctctcgtcgcacagtttcaatgcgctgctcaagaccctcgaggagccgccgccgcacgtcaagttcctgctggccaccaccgacccgcagaagttgccggtgaccatcctctcgcgctgtctgcagttctccctgaagaacatgccgccggagcgggtggtcgagcacctgacccacgtgctcggagccgagaacgtgcccttcgaggatgacgccctgtggttgctcgggcgcgccgccgacggctcgatgcgtgacgccatgagcctgaccgaccaggccatcgccttcggcgagggcaaggtgctggccgcagacgtgcgggcgatgctcggtaccctcgatcacggccaggtctatggcgtgctccaggccttgctggagggcgatgcgcgcgccctgctcgaagcggtgcgccacctggccgagcaggggccggactggggcggcgtgcttgccgaaatactcaacgtgctgcaccgcgtcgcgatcgcccaggccctgccggaagcgatcgacaatggccagggcgaccgcgagcgggtgctggccctggcccaggcgttgccggcggaagacgtacagttctattaccagatgggcctgatcggccgccgcgacctgccgctggcgcccgatccgcgtagcggcttcgagatggtgttgctgcggatgctcgcgttccgcccggcggacgccgacggcgcgccgaggacgccgctaaaggacctggggatcagcaaggccacgactgatcccgccaactcccccgtggccggcgcggcctcgcctgcgccggtcgctaccgttgctcccgcgcctgtcgtggctgcgcccgtcgaagccccggctgccccgccggcagcgccatccgcgccgccggtggcggtcgaggcgcgcgtcacggaagcggttgtcgaagagcccgccgccgcggcagaggtcgtcgacttgccctgggaagagccggcgccgagcctcgctgccgagcccgagcccgagcccgagcccgagccgctagccgtggaggctccctcgatccctccggcagtggcggtcgaggcggtggtggaaaccgttctggaagccctgccggctgcgttgccggtagcacctgacgagcaggacgagcaggacgacgagccaccgcccgcagacgactactacgaagtcgacatggataccctggcctacctggatgccgcgcccgagcctgacgtggtcgtggtggaggagccgctgccggcggcgaagccggccaccggcctggccgcggagtggctggagctgttcccgcggctcggcctcggcggcctgaccgccagcatcggtgccaactgtacgctggtagctgccgacggcgaccactggcatctgcatctcgatccgggccagagcgcgctgttcaacgccacccagcagcggcggctgaacgatgcgctgaaccagcacctggggcgcaccctcaaactggaggtgaccctgcagaagcctgagcaggagaccccggcccaggcagcggcacgccggcgtgccgagcgccagcgggcggccgaggcatcgatcgatgccgacccgttggtccggcagttgcgcgagcagttcgccgcggtggtccgtgacggtaccatcgaacctttggaagccaaggcctga

SEQ ID NO: 322845 - DNA, 747 bp, Pseudomonas aeruginosa
atgcctcatttcggcgcacctgcgctgctcctgctgcagttgctcgcggccctgccagcgacggccgcggagaccgacgcgacgccattgcgcttctcggtgatggaaagctggagcatgccgttggtccgcctgcaacggggccagccgatcgacggcatcgtctacgacatcacccgctcccttgcccggcaggtcggccgcaaggcgctctaccacccctacccgcgcgggcgcatcgagcaggcgatgaacgctggcgaaatcgatgtccgctgctacatcagccccgcctggctcagccacgacttccccggctatcgctggagcgtcgcgctgctggtgcaacgcgacatcctggtcgcccgcgaaggcttcgcgccgattcccgaggcgctgccggcccagcgtatcggtaccgtccttggctacagctatccccgcttgcaagcgctgttcgacatcggccgactgcgccgcgacgatgcgcgcacccaggatctggtgctggaaaagctgcgcgccggccgctaccgctacgcggtcagccatcaactgtcgctgcactggagcaaccgccaggcgccggggcagccgccactccaggaagccgcgcagctcgaagagacggcggtgagctgcatggtgcgggactccgcagaggttccggtggaagcgatactgaagacgttcgaggaaatgaagcgcagcggagagatcgaggagatactgcagcgctaccgataa

SEQ ID NO: 322846 - DNA, 378 bp, Pseudomonas aeruginosa
atggacaaggcaagaaagcagcggttgctgggcgtgctcgcattggtgatgctgttcggcgcctacgtgggttggagcgagcggccgcgcatcctgctgcattacagtggccaggcttcggcgccgatcgcctacagctacaaggagcagggcgtggaaaccttctccggggagatccggcccggccaggtccgcgagtttccggtgaagctgttcggcggcagcgattaccggatcgccttctccttccatcgcggtgaggagaagtatgcgtcgttcagcaccaagccgggctggggcgccctggacctgtatgtcgataccgagctgagcgtatcgacccagccgccgccggagggtctgatccagcagcaatga

SEQ ID NO: 322847 - DNA, 2385 bp, Pseudomonas aeruginosa
atgaccgacacccaggctgccgccgaacgcatcgcgcaactgcgaaccgaactggacacccacaattaccgttactacgtgctcgacgaaccgagcattcccgacgccgaatacgatcgcctgttccgcgagttgcaggcgctggaggccgagtacccgcaactgctgacgcccgactcgccgacccagcgggtcagcggcacgccggcctcggcgttcggcgaagtgcgccatgagatccccatgctcagcctcggcaacgccttcgaggaacaggacctgctggacttcgaccgccgcgtacgcgaaggactggccgacctgttgcctggcggcgacctgctcggcggtggcgcggaggtcgagtacagttgcgagccgaagctggacggcctggccgtcagcctgctctacgaacgcggccaactggtgcgcggcgccacccgcggcgatggcagcaccggcgaggacatcaccagcaacgtacgcaccattcgcaacgtaccgctgaagctgcacggcgaaggctggccggagatcctcgaagtgcgcggcgaggtgttcatgtccaaggccggtttcgaggcgctcaacgccaaggccgtggaaaccggcggcaagaccttcgccaacccgcgcaacgcggcggccggcagcctgcgccagctggattcaaagatcaccgccagtcgcccgctggaattctgtgcctacggcttcggccaggtcagcgggacgctgccggacacccaggtgggcatcctcgaggcgttccgcggctggggtatccccatcagtcgcgagctgcgcctggtcaagggcgcccaggcctgccgcgactactacgacgacatcggtcgccgacgcgatgcgctggcctacgagatcgacggcgtggtgttcaaggtcaaccgcatcgccttccagcgcgaactgggcttccgcgcgcgcgagccgcgttgggcgatcgcccacaagttccccgcgcgcgaggagctgaccgagctgctgggtgtcgagttccaggtcggccgcaccggcgccgtgaccccggtggcacgcctcaagccggtgcaggtggccggcgtcacggtgtccaatgcgaccctgcacaacatggatgaagtcgcccgcctgggcctgcgcatcggcgatacggtggtgatccgccgtgctggcgatgtgattccgcaggtcatgcaggtggtgctcgagcgccgcccggcggatgcgcaggctatcgaggtgcccgagcattgcccggtctgcggctcggccgtggagcggacccagttggtcaagcgcagcaagggcaaggagtcgatcagcgagggcgccatctatcgctgcgtcggccgcctctcctgtcaggcgcagttgaagcaggcgatcatccatttcgtatcgcgccgggcaatggacatcgacggtcttggcgacaagatcgtcgagcaactggtggatcgcgggttggtcgcctcgccggcggatctctataccctgacctatgaacaggtgttcgagctggaagggttcgccgagctgtccaccaacaacctgctgacggccatcgccgatagccgcaagccttcgctggcgcgcttcatcttcgctctggggattcccgacgtcggcgaggaaaccgccaagctgctggcgcgttcgctgggttcgctcgagcggatcggcaaggcgctcccggaagtgttgacctacctgccggacgtcggcgccgaggtagcctacgagatccacaacttcttcgccgacgagcacaaccgccaggtgatcgcccagttgcgcgatgccgaacatggcgtgcagttgcaggaagagggcgaggtcgccgcggagttcgccgcttgtgcctcgctggccggtttcatcgacaagctgaacattcccttcatcgccgccaccggcgcggaaaagctggccagccgcttcggttcgctcgacggcatcatccgcgccgactggctcgatctacgccaggtggagcgtctgcccgagcgagcggcgaaaagcttgcgcgatttcttcgacgagccggccaacgtgcagcgtgccctggccatcgaggcgcagttgcgtgagttcggcatgcattggcagagcgagcgcaaggcggtcgaaggcctgcctctggccgggcagacctgggtgctgaccggcaccttggaggcgatgagccgggacgtggccaaggacaagctggaagggctcggcgccaaggtggccggctcggtgtcggccaagacccactgcgtggtcgccgggcccggcgccggctcgaagctggccaaggccaacgagctgggcgtgaaggtgctcgacgaagacggcctgctgaaactgttcgacgagcacggcgtcgcccgctga

SEQ ID NO: 322848 - DNA, 870 bp, Pseudomonas aeruginosa
atggatatcggtctgcgcgaatggcttatcgttatcgggcttatcgtgatcgccggcattctcttcgacggttggcggcggatgcggggcggcaagggcaagttgaagttcaagctcgaccgcagtttcgccaatctgccggacgacgacggcgactcggctgaactgctggggccggcgcgcgtggtcgagcatcgcgagccatccttcgacgaacaggacctgcccagcgtcagcgcccgcgaagccaaggaacgcaagggcggcaagcgccaggaagagccgcgccagggcgatctggacctcgacgaggggctggccctggaggcggacccgagcgatgccgccgagacggtggagccgcgcaagggcaagtcgaagggccgcaaggagaaagagcgggagaaagcccctgcggttgctgccgaacctgccccggtcgacgaggtgctgatcatcaacgtcatcgcccgcgacgagagcggcttcaaggggccggcattgttgcagaacatcctcgagagcggcctgcgcttcggcgacatggacatcttccatcgccacgaaagcatggccggcaatggcgagatcctgttctccatggccaatgcggtgaaaccgggcactttcgacctggacgacatcgacaacttcagcacccgcgccgtgagcttcttcctcggcctgccggggccgcgccatccgaagcaggccttcgacgtgatggtcgccgccgcgcgcaagctggcccacgagctgaacggcgagctgaaggacgagcagcgcagcgtgttgaccgcccagaccatcgagcactaccgccagcgcatcatcgaccatgagcgtcgcagcctgatgcagaagcgctga

SEQ ID NO: 322849 - DNA, 3489 bp, Pseudomonas aeruginosa
atgcgcctgaagagcatcaagctggcggggttcaagtccttcgtcgatccgaccacggtgaacttccccagcaacatggcggcagtggtagggccgaacggctgcggcaagtcgaacatcatcgacgcggtgcgctgggtgatgggcgaaagctcggcgaagaacctgcgcggcgagtcgatgaccgatgtcatcttcaacggctcgaatacccgcaagccggtgagccaggcgagcatcgagctgatcttcgacaacgccgagaccacactggtgggcgaatacgcccagtacgccgagatatccattcgccggcgggtctcgcgggatgggcagaacacctatttcctcaacggcaccaagtgccggcggcgcgacatcaccgacatcttcctcggcaccggcctggggccgcgcagctactcgatcatcgaacagggcatgatctccaagctgatcgaggcgcgtccggaagacctgcgcaacttcatcgaggaagccgcgggcatttccaagtacaaggagcgccgccgcgaaaccgaaagccgcatccgtcggacccaggaaaacctggcacgcctcaccgacctgcgcgaagagctggggcggcaactggaacgcctgcaccggcaggcccagtcggcggaaaaataccaggagcacaaggccgaggagcgccagctcaaggcccagctgggtgccgtgcgctggcgcgacctgaacgagcaggtcggtcagcgcgagcgggtcatcggcgaccaggagatcgccttcgaggccctggtggccgagcagcgcggtgccgatgccggcatcgaacggctgcgcgacggccatcacgagttgtccgaacgcttcaaccaggtgcaggcacgcttctattcggtcggcggcgacatcgcccgggtcgagcagagcatccagcatggccagcagcgccagcgccagttgcaggacgacttgcgcgaagccgaacggacccgccaggaaaccgaatcgcacctcgggcatgaccgtaccttgctcgcgaccctggccgaggaaatggccatgctcgcaccggaacaggaactcagcgcggccgccgcggaagaagcgggcatcgccctggaacaggccgagcagggcatgcaggcctggcagcagcagtgggatgccttcaaccagcagagcgccgaaccccgccgccaggccgaggtgcagcagtcgcgcatccagcacctggagcagagcctggagcgcctgcaggatcgcgagcggcgcctgcaggaggagcgtggccagttggcggccgaccccgaggacgcggcgatcctcgaactcaacgaacaggtggcgatcgccgaactggccctggaagaactgcaattgcaggagcagggccaagccgagcgactcgaacaattgcgccaggaattgcagcaactggccgccgaacagcaccaggcgcagggcgagttgcagcgcctgaacgggcgcatcgcttcgctggaggccctgcagcaggccgctctcgatcccggacagggcgccttggagtggttgcgcgagcagggcctggaacaacgtccgcgcctcgccgaaggcttgcgtgtcgagccgggttgggagctggcggtggagaccgtgctcggcgcggatctgcaggcggtcttgctggacggcttcgacgggctcgccctggccggcttcggcaagggcgagctgcgcctgctcagccccgctcgcggagccgcgacggcggccggttcgctgctggacaaggtccgcgccgacgccgacctgagtccctggttggcccgggtgaaaccggtggagaccctggaacaggcgctcgcccagcgcggcgccctggacgacggcgagagcctgatcagtcgcgatggctactgggtcggccggcacttcctgcgggtccggcgcagcgacgaggcccagggcggcatgctcgcccgcgcccaggaactggaggcgttgcaggagcggcgggaggccctggaaacccgtgtcgccgaaggcgaggagcgtctggctgcggcccgcgacgagcagcgcgagctggaaggcgcgcgcgagcaggtgcggcgccaggtccaggaggaggggcgccggcacggcgagctgaaggcgcagttgtccgcgcagcaggccaaggtcgagcaactggtactgcgtcgccgccgtctcgacgaagaagtggcggaactggccgagcagcgcgcgctggaacaggagcaactgagcgaggcgcgcctgaccctgcaggaagcgctggatagcatggcgctggacaccgagcgccgggaaaccctgctggcggagcgtgacgccctgcgcgaacggctcgaccggattcgccaggatgcccgcacccacaaggaccatgcgcaccagttggcggtgcgggtcggctcgctgaaggcgcagcacaattccacccagcaggccctggagcgcctcgaccagcagtcggcgcgcctcaacgagcgttgcgaacagctcaacctcaatctggaggagggggcggcaccgctggaagagctgcgcatgaagctcgaggagttgctggagcggcggatggccgtcgaggacgaactcaagcaggcgcggctggccctggaagacgccgatcgcgaactgcgcgaggtggagaagcgccgcggccaggccgagcagcaatcgcaactgctgcgtggccagctggagcagcagcgcctggagtggcaggggctggtggtgcggcgcaaagccttgcaggagcagctcgccgaagacggctacgacctgcatacggtactggccaacctgcccctggatgccagcgaacgcgattgggaggagcgtctcgagagtctcgcggcgcgcatccagcgtctggggccgatcaacctggcggcgatcgaggagtaccagcagcagtccgagcgcaagcgctacctggactcgcagaacgacgacctggccgaagcgctggagacgctggaaaacgtcatccgcaagatcgaccgggaaacccgcaatcgtttcaaggaaaccttcgaccagatcaatgctggccttcaggcattgttcccgaaggtattcggcggcggtacggcatatctggaacttaccggcgaagatctactcgataccggtgtggcgatcatggcgcgcccgccgggcaagaagaacagcaccatccacttgttgtccggcggggaaaaggcgctgaccgcgctggcgctggtattcgccatcttccagttgaacccggcgccgttctgcatgctcgacgaagtcgatgcgccattggacgatgccaacgtcggacgttatgcgcgattggtgaaggagatgtcggaaaaggtgcagttcatctatatcacccacaacaagatcgccatggaaatggccgatcagttgatgggcgtgaccatgcatgagccgggctgttcacggcttgttgcagttgacgtggaagaggcggtcgcattggctgaagcctga

SEQ ID NO: 322850 - DNA, 660 bp, Pseudomonas aeruginosa
atgacgttcaaggccccggacagcctggcagagcagatcgcccaccacctcgcggaacgcatcatccggggagaactcaaggaacgggaacgtatccaggagcagaaggtcacccagaccctcaacgtcagtcgcggctcggtccgcgaggcgctgctgattctcgaacgccgccacctggtgaacatcctgccgcgccgcggcgcccaggtgtccgaactgtccccgcaacatgtggaaagcctctacgcgctgatcgtgcagctctacatcctgctggcggaaagcgtcgcccggcgctggcgcagcgaagccgagctggcaccgttcctggtcatccagcagcgcctgctgaacaacctggcgcaaagcgatatcgacggcttcgtcgaggccagcttcgacatcatgcgcgcggcctttcctttcgcgaacaatccctacctgcaggagaccgtcgaaaacctgctgccggcggtgagtcgcgcctaccacctggcgctggaacggcgcaaggcggaaatgaaccagttcctcggcagttttgctcagctcctgcaagcggtgatcgcccgtgacgaggcgaggatccgcgaggtcctgctggaatacggccgccacaactgccagctggtgctggccgcgctcgccgaacgctga

SEQ ID NO: 322851 - DNA, 1134 bp, Pseudomonas aeruginosa
atgtttgcctcgctttcctctgcctggatgctgcgtctgaaaaagtacggctactggatctggctgatcgcggtgctcggcatcccgctcagctactggtggtcgctcggtagcgactaccccaacgcctggccctggctggtgatcagcgtggtgttcgggctgatcccgatcctcgatgccatcgtcggccgcgatccggccaaccccgaggaagccagcgaagtgccggagatggaagcacagggctactaccgcgtactgtccctggccaccgtcccgctgttgctgggcatgctcgtctggtccggctggatcctcgcccacgagacccgctgggactgggtcggccaactgggctggatcctgtcggtgggcaccgtgatgggcgccatcggcatcaccgtctcccacgaactgatccacaaggacccgcaactggaacagaacgccggcggcctgctgctggcggcggtgtgctatgccggcttcaaggtcgaacacgtgcgcggccaccatgtacacgtctcgaccccggaagatgcctcgtcctcgcgctacggccagagcctctactcgttcctcccgcacgcctacaagcacaacttcctcaacgcctggcgcctggaggccgagcgcctgaagcgcaagggcctgccggccctgcactggcgcaacgagctgatctggtggtacgccatcagcgccctcttcctgctcggcttcagcctggccttcggctggctgggagcgatcttcttcctcggccagtcggtgatggccttcaccctgctggagatcgtcaactacgtcgagcactacggcctgcatcggcggcgcctggacaacggccgctacgaacgcaccacgccggaacactcgtggaacagcaatttcctcctgaccaacctgttccttttccacctgcagcgccattccgaccaccatgcctacgccaagcgccgctaccaggtgctgcgccactacgacagcagcccgcaactgcccaacggctacgccgggatgatcgtcctcgccctgttcccaccgctctggcgcgcggtgatggacccgaaggtgcgcgcctactatgccggcgaggaataccagcttaccgacacccagcgcatctga

SEQ ID NO: 322852 - DNA, 1455 bp, Pseudomonas aeruginosa
ttgatcaggttcctgctcaaccgggagatccgcgtcgaagaacgcctggaccccaacctcaccgtcctcgactacctgcgccggcacctcggcaagaccggcaccaaggaaggctgcgcctccggcgattgcggcgcctgcaccgtggtggtcggcgaactggtcaccggcgaggatggtgccgaacgcatccgctatcgcagcctgaactcctgcctgaccttcgtttccgcccttcacggcaagcaattgatcaccgtcgaggacctcaagcaccaggaccgcctgcacgacgtgcagcaggcgatggtcgactgccatggctcgcagtgcgggttctgcacgccgggtttcgtcatgtcgctgttcgccctgcagaagaacagcgccggcgccgatccggccaaggcccacgaggcgctcgccggcaacctctgccgctgcaccggctaccggccgatcctcgacgccgccgagcaggcctgctgccacaagcgcgcagaccagttcgacgcccgggaagccgccaccatcgagcaattgcgcgccatcgctccgcgcgaaaccgccgagctgaacagcggtgaccggcgctgcctgctgccgctcaccgtcgccgacctggccgacctctacggcgccaatccgcaggcacgcctgctggccggcggcaccgacctggcgctggaggtcacccagttccatcgcgaactgccggtgatgatctatgtcggccacatccgcgaaatgaaacgcatcgaagtgggcgccaactgcctggaaatcggcgccgccaccccgctgaccgactgctaccaggcgctggccgcggactacccggacttcggcgagttgctgcagcgtttcgcgtccctgcagatccgcaaccagggcactctcggcggcaatatcggcaacgcctcgccgatcggcgacgccccgccgctgctgatcgccctcggcgcgaagatcgtcctgcgccgcggcgaacggcgccgcgagctgccgctggaggagtacttcctcgactacaaggtcaccgcccgcgaagaaggcgagttcatcgagaagatcctggtcccgcgtgcccggcccagccaggcgttcaaggcctacaaggtctccaagcgcatcgacgacgatatttccgcggtctgcgccgccatcagcctcgacctggaagatggccggatcgcccgcgccagggtcgccttcggcggcatggcggcgattcccaagcgcgccgccgcctgcgaagcggcgctgcaaggcgcccgcctggaagccgccagcttcgaacgcgccgcggccgccctggcgaacgacttcaccccgctcagcgacttccgcgcgagcaaggaatatcgcctgctgaccgcgcagaacctgctgcgcaaatgcttcctggagctgcacgctcccgccgtcgaaacccgggtgaccgcctatgtctaa

SEQ ID NO: 322853 - DNA, 2400 bp, Pseudomonas aeruginosa
atgtctaaccatcgcaagccgcacaagagccaggaagagctggccgacctgttccgcgccgagttgaccaccggagtcggccgcagcgtcaagcacgaaagcgcccccaagcacgtcagcggcgaggcgatctacatcgacgatcgcctggagtttcccaaccagttgcacgtctatgcgcgcctgagcgagcgcgcccacgcccgcatcacccgcctcgacgtgacgccctgctaccagttccccggcgtcgccatcgccctcaccgccgccgacgttcccggccagctcgacatcggcccggtggtggccggcgacccgctgctggccgatggcaaggtggagtatgtcggacagatggtcctggcggtcgccgccgacagcctggaaaccgcgcgcaaggcggccatggcggcgatcgtcgagtacgaagacctggaaccggtgctcgacgtggtcgaggccctgcgcaagcgccatttcgtcctcgacagccaccagcaccgcatcggcgactccgccgccgcgctggccggcgcgccgcatcgcctgcaaggcacgctgcacatcggcggccaggagcatttctacctggaaacgcagatttcctcggtaatgcccagcgaagacggcggcatgatcgtctattgctcgacgcagaaccccaccgaagtgcagaagctggtggccgaggtcctcggggtttccttcaaccgcatcgtcatcgacatgcgccgcatgggcggcggcttcggcggcaaggaaacccaggccgcggcgccggcctgcctgtgcgcggtggtcgcctaccacaccgggcgtccggcgaagatgcgcctgccgcgcatggaggacatgcagatcaccggcaagcgtcacccgttctacgtcgaatacgacgtcggcttcgacgacgatggccgcctgcacggcatccagatcgacctggccggcaattgcggctattcgccggacctctccggctcgatcgtcgaccgcgccatgttccactcggacaacgcctacttcctgggtaacgccaccatcaacggccaccgttgcaagaccaacaccgcctcgaacaccgcctaccgcggtttcggcgggccccagggaatggtcgccatcgaggagatcatggacgccgtggcccgcagcctgggcaaggacccgctggaggtgcgcaagctcaactactacggcaagaacgagcgcaacgtcacccattaccaccagaccgtcgagcacaacctgttggcggagatgaccgccgagctggaagcgagcagcgagtacgcccgccgccgcgaggaaatccgtgccttcaatgccgccagcccggccctgaagaaaggcctggcgctgaccccggtgaagttcggcatttcgttcaccgcgaccttcctcaaccaggcaggtgcgctgatccacatctataccgacggcagcatccacctgaaccatggcggcaccgagatgggccagggcctcaataccaaggtcgcccaggtggtcgccgaggtcttccaggtcgacgtggagcgcatccagatcaccgccaccaataccgacaaggtacccaatacctcccccaccgccgcctcctcgggcaccgacctgaacggcaaggccgcgcagaatgccgccgaaaccatcaagcggcgcctggtggagttcgccgcgcggcactggaaggtcagcgaggaagacgtcgagttccgcaacaaccaggtgcgtatccgcgagctgatcctgccgttcgaggaactgatccagcaggcctacttcggccaggtctcgttgtccagcaccggcttctaccgcacgccgaagatcttctacgaccgcgagcaggcccgtggccggcccttctattatttcgcctacggcgccgcctgctcggaggtgatagtcgataccctcaccggcgaataccgcatgctgcgcaccgacatcctgcatgacgtcggcgactcgctgaacccggccatcgacatcggccaggtcgaaggcggcttcgtccagggcatgggctggctgaccatggaggaactggtctggaacgccaagggcaagctgatgaccagcggcccggccagctacaagattcccgccgtcgccgacatgccgctggacctgcgggtgaaactgctggagaaccgcaagaatccggagcagaccgtgttccattccaaggccgtgggcgagccgccgttcatgctcggcatctcggtctggtgcgcgatcaaggacgccgtggccagcctcgccgactaccgcgcgcaacccgccatcgacgcgccggcgacgcccgagcgggtgctctggggcgtggaacagatgcgccggctgaaggccgcccaggcgcaagcggcggacgccgcggtcgaaccggcctga

SEQ ID NO: 322854 - DNA, 840 bp, Pseudomonas aeruginosa
atgaactggatcagcgccctggccgagttgcagcgtagcggcgaaccttgcgtcctggtgaccatcatcgaggagcgcggctcgaccccgcgcaacgccggctcgaagatggtggtcagcgccgagcggctctacgacaccatcggcggcggccacctggaatacagggcccaggccattgcccgggaaatgctcgccgcgcggacccaggacacccgcctggagcgcttcagcctgggcgccagtctcggccagtgctgcggcggcgccacggtgctgctgttcgagccgatgggccagccgcaggcacacatcgccgtgttcggcgcgggccacgtcggtcgcgccctggtacccttgctcgccagcctgccctgccgggtgcgctggatcgattcgcgggaacacgaatttcccgcgctcctgcccgacggcgtggagaaagtggtgaacgacgaagtgctcgacgaggtcgagcggatgccgcccggcagccacttcatcgtcatgacccacaatcacccgctggacctggagcttaccgcggcgatcctggcgcgcaacgacttcgcctacttcggcctgatcggctcgaagaccaagcgcgtcaagttcgagcaccgcctgcgcgaacgtggcgtcgacgccgaacgcctgcaacggatgcgctgcccgatgggcctggagcaggtgaaaggcaagctgccggcggagatcgccatctccatcgccggcgaggtgatcgccacctacaacgccgccttcggcctggaacgcaagcaggggccgtcgagcgtcacccggctgaccccggagtcgcgccgcgcccacgaatcctga

SEQ ID NO: 322855 - DNA, 1305 bp, Pseudomonas aeruginosa
atgacccgcaacgccaaagcctaccgcgccgccatcctgcacagcatcgccgaccccgcggaggtcggcgtcgaacgctcctacgaatacttcgaggacggcctgttgctggtggaggacggcaaggtcgctcgcctcggtgacgccgaaaccctgctcggcgagatcggcgaggtcgaggtcttcgagtaccgcgacgcgctgatcacccccggcttcatcgatacccacatccatttcccgcagaccgggatgatcgcctcctacggcgaacaactgctggactggctgaacacctataccttccccaccgagcgccaattcggtgaccaggcccatgccgaccaggtcgccgagatcttcctgcaggaactgctgcgcaacggcaccaccaccgcgctggtcttcggcagcgtgcaccggcaatcggtggaatcgctgttcgaggccgcccggcgcctggacctgcgcctgatcgccggcaaggtgatgatggaccgcaacgcgccggactacctgaccgacaccgccgagagcagctaccgcgacagcaaggcgctgatcgagcgctggcacggccagggccgtctgctctacgcggtgaccccgcgcttcgccccgaccagcaccgcggaacagctggacatggcggcgcggctgctgcgcgagcatcccggcgtatacctgcacacccacctgtcggagaacctcaaggaaatcgagtgggtgaaggagctgttccccgagcgcagcggctacctggacgtctacgaccaccacggcctgctcgggccgcgctcggtgttcgcccatggcgtgcacctgtgcgacggcgaatgccagcgcctggcggagactggctcggcagtggcgttctgcccgacctccaacctgttcctcggcagcggtctgttcgacctgccgaagctggagcgctacaaggtcaaggtcggcctcggcaccgatgtcggcgccggcaccagcttctcccagttgcagtccctgaacgaggcgtacaaggtcatgcagttgcagggcgcccgcctcgatccgttcaagtcgctctacctcgccaccctcggcggcgcccgtgcgctggagctggacgaccggatcggcagcttcgccaccggcaacgaggcggacttcgtggtcctcgactaccacgccaccccgctgctctcctaccgcctgagccaggccggcagcctggccgaacggctgttcgcgctgaccatcctcggcgacgaccgcacggtgaaggaaaccttcgccgccggtcgctcggtgcatcgccgcgactga

SEQ ID NO: 322856 - DNA, 1230 bp, Pseudomonas aeruginosa
atgcgcctcatacatacctccgactggcacctgggccagaccctgcacggccaggaccgcgatcatgagcatgcgcgcttcctcgactggctgctgcgccagctggaagagcagcgcgccgatgtcctgctgatcgcgggcgatatcttcgacacgatcaatccaccgctcaaagcccaggagcgcctctacgacttcatcgtcagcgcccatcgacggctgccgcggctggagatcgtgatgatcgcaggcaaccacgactccggcgcgcgcatcgaactgcccgctccgctgatgaaacgactgaacgcccatgccatcggccgaatcggctggatagacgaaagcctcgatagcgatcgcctgctgctgcccctgcacgacgcggatggccaggtcgccgcctggtgcctggccctgcccttcctgcgtcccgccgaagtcaccggaggcgggctcggcgacgattacctggccggtatccgccaggtgcacgaacgcctggttgccgccgcgcacgcccgtcgcacgccgggacaggcactggtcgccgtcagccacgcacacatggccggcggctcggtttccgaagactccgagcgaaacctgatcatcggcaacgtcgaagcgctgcccgccagcctgtttccggagcagatcgcctacgtagccctcggtcatctgcacaagccacagaaagtcgccggacaggagcgcattcgctatagcggctcgccgctgccgctgtccttcgccgaagtgaactatcgccaccaggtcctcctcgtcaccctggaaggtgagcgcctgaaggatgtacagagtcttccggtgccacgcgcggtggaactgttgcgcatcggccccgcgcctcttggcgaggtgctcgatcgaatcggcgaactggccgaggccgacctgctgaacgaacagcggccctggctggaggtccgcgtcatgctggatcagccgcaaccagacctgcgccagcaggtcgagagcgccctgctgggcaaggcttgccgtctggtgcgcatcgccagcgagtaccagcgccgcgacgaagagcaggcgccgctgctcgggctcgaccaactcaacccccaggaactgttcagccgcgcctgggaaagcgcctatggctccggcccggatgcgcaggcgctggatgacttcgccagcctgctgcaaagcgtcgaactggccaccgaagagcccccggggaaataa

SEQ ID NO: 322857 - DNA, 3636 bp, Pseudomonas aeruginosa
atgaagattctcgccatccgcctgaagaacctcgcctccctcgctggcgagcaggaaatcgacttcacccgcgaaccgctgtccagcgccggcctgttcgccatcaccggtccgaccggcgccggcaagagcaccgtgctggacgccctgtgcctggccctgttcggcagcacgccgcggctggaaagcacttcggccagcagcaaggttcccgatggccggaacgagctgtccagcaacgacgaacgcaacctgctgcgccgcggttgcgccagcggctacgccgaagtggatttcgtcggcatcgacggccaccgctatcgcgcccgctgggaaacccggcgctcccgggacaaggcggacggcgccttgcaaaagagccagcagagcctccaggacctggagacccagcaaatgctggcagcgaacaagaaaagcgagttccgcgaacagctggagcagaagctcggcctcaatttcgcccagttcactcgcgccgtgctgctggcccagagcgaattcagcgccttcctcaaggccagcgacaacgaccgcggcgcattgctggagaaactcaccgacaccggcctgtacagccaattgagcaaagccgcctaccagcgcgccagccaggccgacgagcagcgcaagcaactcgagcagcgcctggaaggcagcctgcccctggccgagcaggcccgggccgggctcgaggcggcgctggaatcccacgcccaggcgcgtctccaggagcaacaggcactgcaacgtctggaaggccagcaacaatggttcaccgaggagcagcggctgctgcaatcctgcgagcacgcacaaggccaactggccgaggccaggcaggcctgggacgccctggcgacggagcgggaaaccctgcaatggctggagcgcctggctccggttcgcggactgatcgaacgcctgaagcaactcgagcaggaactccggcactccgagcagcagcagcggcagcgcaccgagcagcaagccgcgggcgccgagcgcttgcaaggattgcaggcccgcttgcaggaggcgcgcgagcgccaggcccaggccgacaaccatctgcgtcaggcccaggcgccgttgcgcgaggctttccagctggagagcgaggccaggcgcctggagcgaacgctggccgagcgacaggaactccatcggcaatcgaaccagcgccacgcccagcaaagcgacgccgctcggcaactggatatggagcagcagcgccatgtcgcggaacaggcgcaactgcaggcggcattgcgcgacagccaggctctcgccgcgctcggcgacgcctgggcgacccaccagggccagctcgccgccttcgtgcaacgtcgccagcgcgcgctcgaaagccaggcgcagctccccgagctggaaaaatccctggcccacgccggggaaccgctcgaacgcttgcaggggcaatggaccgccctccatggcagcgagccggacgacctggcggcacgcctggacgaattgcgccggcagaccgatagcctggaacgacaacaagcgctccacaaggaatggcaacaggtcctcgaccaacgcgccggtctggctcgacgcctgggcgaactcgaccagcgtatggtcgagcaggagcaggcattgctcgacctgaaacgacaaggcagccaatgcgccgaggaggtgaaggcggcggagcaggccctgcaggtcacccgcgagttgctccagcgccagcgtctggcccgcagcgccagcgtcgagcaactgcgtgccggcctggtggacggcgaggcctgcccggtctgcggcagccaggagcatccctatcaccattccgagcaactgctcgccgccctcggtgaacacgacgaccaggagcaggtccgcgccgagcagtccctcgagcggctgcgacagaccctggccggtctgcgcgagggctattccagccagcgggaaagactcaaccagagtcgccaggagcagcaggaactgactggccaactggccgcgctcgatcggcaactggaccaatggacgctgccggaagaactgcgactcctgcagccgtccgcgcagttggagtggctggcacaacgcctggacgacctggcagggcagcgccagcagtgccaacgagacttcgaccggctgatcgcccgccagcgccagacccagcaattgcagcaggaactgcgggccgccgagacgatcctgcaacagcgccagcaggcgctgacggaacaacggcagcgctacgaacatttgcagcagcaggtcgaggaggacagccagcaattgcgtccattgctctccgacgagcactggcagcactggcaggcagatccgctgcggactttccaggccctcggcgagtccatcgagcaacgccggcagcaacaggcgcggcttcagcaggtcgaacagcgtctgcaggagctcaagcagcgctgcgatgaatcgagctggcaactgaagcaaagcgacgagcaacgcaacgaagcccgccaggcagaggaaagggcccaggcggaactcgccgagctgaacggacgcctcggcgctcacctgggccagcacgcctgcgcccaggactggcagctatcgctggagcacgccgcgcaagcggcgcagagtgccgtcgagacgctccaggcgcccctggattcgctgcgcgaggaacaactgcgactcgccgaagccctggaacacctgcagcagcaacggcagcgccaacagaatgagttccagcgccttcaggccgactggcaggcctggcgcgaacgccaggacaacctcgacgacagccgcctcgacgccctgctcggcctttccgaggaacaggcgacgcaatggcgggagcaattgcagcgactgcaagaggagatcacccgccagcagacgctggaagcggagcgccaggcgcaactgctccagcatcgccggcagcggccggaaaccgaccgcgaggcgctggaagacaacctgcggcaacagcgcgaacgcctggccgccagcgaacaggcctacctggatacctacagccagttgcaggccgacaaccagcgccgcgagcagagccaggcgctgcttgccgaactggagcgagcccgcgccgagttccgcagatggggccgcctgaacgaactgatcggttcgtccagcggcgacaagttccgccgcatcgcccagggctacaacctcgacctgctggtgcagcacagcaacgtgcagttgcgccagttggcgcggcgctaccgcctgcagcgcggcggcagcgaactgggcctgctggtggtggacaccgagatgggcgacgaactgcgctcggtgtattcgctctccggcggcgagaccttcctgatttccctggccctggcgctcggcctggcctcgatggcatcgagcaagctgcgcatcgagtcgctgttcatcgacgaaggcttcggcagcctcgacccggaatccctgcaactggcgatggatgccctggacaacctgcaggcccagggacgcaaggtggcggtgatttcccacgtccaggaaatgcacgaacggatcccggtccaggtgcgggtccagcgcgagggcaacggcatgagcagcctgaaggtggtcggctga

SEQ ID NO: 322858 - DNA, 2166 bp, Pseudomonas aeruginosa
atgaatccgaccctcaagcaactggccggcgaagtccgcgatggccgcgacgaccaggtagcgcaaccgctggcggcacgccacgacctgctgcgccagctcgacctgtgggtggcgcgcggctggctacgggcgctggaccgggcgttcgtcgccttcctcgtcgagttgcagccgcaggccgatccccgggtgctgctggcggcggcgctgaccagccaccaactgggccacggtcacgtctgcctggacctggaggcgaccctcggcgcgcccgacgcggcactgtcgctgccgccggaaggcgacgaaggccgcgatgtgctgttgccgtcgcaactgctgcacggcgtgcgcctcgacgcctggcgcgaggccctggcggcgtcaccgttggtggaggtggtcgacgagcgcccaggcgatcccgagccgagcgagacggcgacctcgccgctggtgctttgcgcccagcgtctctacctgcgtcgttattggcggcacgaactggagatcgccctggccctgcgcgagcgcctgggtcggcaggcgcccctggccgccgacctggcgccgcgcctggccgcgctgttcgcgcaggcgccgacggaagacggccagcgcgtcaccgactggcagaagctggcctgcgccctggcggcccgcggctatttcagcctgatcaccggcggtcccggtaccggcaagaccaccaccgtggtgcgcctgctcggtctgctccaggcaccggcggtagccgccggccagccgctgcgcatccgcctcgcggcgcccaccggcaaggccgcggcgcgtctctccgaatccatcggccagcaggtccgggccctgccgctggcggaagacgtgttgcaggcgatccccgccgaggtcactaccctgcaccgtctgcttggcagccgtccggatacccggcacttccgccaccaccgggacaaccctttggcgctggacgtgctggtggtggacgaggcctcgatgatcgacctggaaatgatggccagcctgctcgatgcgctaccgccgcaggcgcgcctgatcctgctcggcgacaaggaccagttggcctcggtagaggccggcgcggtgctcggcgatctctgccgggatgccgaggagggctggtacagcaccgagacccgcgcctggttacagcgggtcagcggcgaaacctggcagggcttgcgcgaaggttcggcgcaggcgcatccgctggcgcaacagaccgtcatgctgcggcattcccggcgcttcggcgcgagcagcgggatcgggcgcctggcgcggttggtcaaccggcaacaggccggcgacgcgcgcgcgctgctggacagtccgcccgccgacctcttcgacctgcgcctgcgcggggagcgcgatgcagccttcgcccggctgttcgtcgacggtcatccgcaggcgccgggcacgccgtacggctaccggcactacctgcaacgcctggccgagggccgcccggccgccggactggcgctggaggatggcgcctgggagcgctgggcgcagtcggtactgacggctttcgacgccttccgcctgctctgcgcgctgcgccgcggcccatggggcgtggaaggactgaaccagcgggtagcggcagaactgctgcgccttggcctgatcgaggccgatcacggctggtacgaggggcggccggtactggtgacgcgcaacgactacagcctggggctgatgaacggcgatatcggcatcgccctgcgcctgcccgagcgcaacgacgacggcagcctgcgcttcgcgctgcgcgtggccttcccgcgcaacgacggtagcggcggcgtgcgcttcgtcctgccgagccgcctggtcgaggtggacaccgtgttcgccatgaccgtgcacaagtcgcagggttcggagttcgcccataccgcgctggtcctgccggacgcgctgaacccggtgctgaccaaggagctggtgtacaccggtatcacccgcgcccgcgactggttcagcctggtggaaagcctgcccggggtgttcgaggaagcagtgcggcgcaaggtgcgccggctcagcgggctgatgctgcatctgcggccggaaagggaagagcagccgccgcatgctccgggtgaacagaccgagctgccgttctga

SEQ ID NO: 322859 - DNA, 3738 bp, Pseudomonas aeruginosa
atgagccagcagcagatgcccgtggccctcgatccgctggacttcccgttgcacggcagccgcctgatcgaggccagcgccggtaccggcaagacgttcaccatcgccctgctatacgtacgcctggtcctcgaccatggcggcgagaacgctttcggccggccgctgagcccgccggaaatcctcgtggtgaccttcaccgatgcggcgacccaggaactccgcgagcgtatccgcagccgcctgggcgaagcggcgcgttgtttcgccgagccgcaggagcgccacgacggcctgctggtcgcgttgcgccagcagtatcccgccgagcgctggccgggctgcgcgcgcctgctgcgcctggccgcggagtggatggacgaggccgcggtatcgaccatccacagttggtgctaccggatgctgcgcgagcacgccttcgacagcggcagcctgttcacccagaacctggaaaccgaccagagcgaattgctcgccgaagtggtacgggactactggcggcgtaacttctacggcctgacggctccggcggcgcaagccgtggccagttgctacagcgggccggagacgctgggcaaggccttgcagccgctgctggcgcggcaggacgccgacttccgctacgccgaccaggcgctgagtgcgcccgagtcactggcagccttgctggagcagggcggcgactggtatcgccagctcgaccaactggacgcgcaggcccgcgccgcctggcgcgcagcgcgcgtcgaactggaagcgctgctgcgcgacctgcgtccctacctgaacggcaacagctatcgcggcaaggacagcgacgagaccttcgacgcctggctgcaagcgttggcggactggagcgagggcggcgagcagccggccaacctcggcaagttcggccagacccggatcaagctcaccgccaagcgcgtggcgcccgagcatgccgcgctaagggccatcgacgcctgggccgcgcatcaggaagagcgtcccgatctcgctccccacctgttgttgcacgcgttgggcgaagtcgggcacgaactggagatcgagaagcagcggcgtgccgagatcggcttcgacgacctgctcagccgcctcgaccgcgccttgcaggggcctggtggcgagcgcctggcgcaattgatccgcgagcagttcccggtggcgctgatcgacgagttccaggataccgacccggtgcagtaccggatcttcgagcgcatctaccggatcgccgccgatcccgacgagccccaggcgcgggaaaccggcctgttcatgatcggcgaccccaagcaggcgatctacgccttccgcggtgccgacatccatacctacctgcgcgcccgcgaggccactcgcgggcggcattacacccttggcaagaacttccgctcgaccgccgccatggtggcggccgccaaccgctgcttcgccttcgccgaagagcatccgcgcggcgccttccgtttcgcccgcgaggggctggaaaacccggtgccgttccatgcggtggacgcccaggggcgcgccgaacgtttgttgatcgacggtgccgaggcgccagcgatgacgttctggaaccttgatgtcgaagccggcgtgctcggctccgcggcgtatcgccaggaaatggccgagcgcagcgccagcgccatccgccgctggctgagcctggccgacctgggccgcgccggcttcgccgacgagcagggcggctggcgggcgttgcgcccggcggatattgccatcctcgtccgcggtcgcgccgaggccgaggcgatccgcagcgcgttggcggcgcgacgactggccagcgtctacctgtccgaccgcgactcggtgttcgacagccaggaagccgccgacctgctgcattggctgcgtgcctgcgccgaccccggcgccgatgcgctgctgcgggtcgccctggctacccgcagcctgcacctggactgggcgaccctggaacgattgaaccaggacgaactgttctgggaacggatggtcctgcgcttccgcgactatcgccggtcctggcaggcccagggcgtattgccgatgctgcggcgcctgctcgccgacttcgaactgccggcgcgcctgctgcggcatgccgatggcgagcgcagcctgaccaacctgctgcacctggccgagtggctgcagcgcgcggcggtggaactggacggtgagcacgcgctgatccgccatctggccgagcaggtgcagagtccggggagcgaagagatcctccgcctggaaagcgacgccgacctgatcaaggtggtgaccatccacaagtccaaggggctggaataccccttggtgctgctgcccttcatctgcagctggagggagctggacggcaacagcggcgcgccggcgagtttccacgaggatggcgctgcagggcgggtcatcgagctggcgcggcgcaaggagcaggctgcgcgggcctacgagcaggccaacgacgagcgcctcggcgaagacatgcgcctgctctacgtggccctgacccgcgcccgccattcggtgtggctgggcatcgcgccgctggtggcgagcaacagcaagtcgccggagttgcacaagggggccctgggctacctgcttgccggcggcgcgaccatcggcagcgatggcctcggacaatgcctcgccgcgttgcgcggcgagtgccgggagattgtcgtcgagccggcccccgaggcggacgccgaacgctatgtcgcagggcgcggccagggccttgggcaggcccgcgaaacccgccgcagcagccgcgagaagtggtgggtcgccagctattccggcctgcaattgcaggcctccgccgggctggacgatgacgaggtgttggagagcgacgaatcgcaggagccgatcagcgccgaggaagccaccttccacgaagaaggccgttccgccgaacagccgccggtcgcgcacaccagcgagatgcgcgacgacctgcatcgcttcccgcgcggaccggctcccggcaccttcctccacgggctgctcgaatgggccggccgcgaaggcttcgatgtggcgcgcgccgatgcccagcggcgccgcgaactggtcgcgcgacgctgcgatctgcgtggctggaaggactgggccgaaccgctcgacctgtggctggaacagtatctcgccgaaccgctgcgctggcccggtggcgaaaccagcctggccgggctcgtcgcctaccaggtggaaatggagttctggttcgccacccaccaggtccaggccgaggcgatcgacgccctggtccggcgccataccctcggcggcgcggcgcgtccggcgctggcgccgaccctgctgaacggcatgttcaagggcttcgtcgacctggtcttcgagcaccaggggcgtttctacgtggccgactacaagtccaactggctgggcgccgacgatggcgcctacagcccggaagcgatgaccgccgcggtgctggagaaccgttatgacctgcagtacgtgttgtacctgctggccctgcaccggcagttgaaggcgcgcctgcccgactacgactacgaccgccacatgggcggcgccgtgtacctgttcctccgcggcgcccgcgcggcgacccagggcctgcacttcgagcgcccgctgcgggaactgatcgaacgcctggacgcgctgttcagcggccagccgggagccgagcgatga

SEQ ID NO: 322860 - DNA, 3516 bp, Pseudomonas aeruginosa
atgccagaacccttgggaaccaccgccctcacgcccggattcatgatcgtccacggcaatcgcctggacgacctgcgcgacctcgccgtttcctggatgcgccgctatccgctggcgccgctggaaagcgagcgggtcctggtgcacagcaacggcatcgcccaatggttgaagctggcattggccgaagatccccgcgaggacggcggcggcggtggcggcatcgccgcggcgctggaggtgcagttgccggcgcagttcctctggcaggcctatcgcgcggtgctgggccgcgaaagcattcccgaggtttccgaactggacaaggcgccgctgacctggcgcctgatgcgtctgcttcccggattgctggagcgtcccgagttccgcaccctgcaacgtttcctcgccgacgatgccgacctgcgcaagcgtcatcaactggccgagcgcctggccgacctgttcgaccagtaccaggtctatcgcggcgactggctcgacgactggagccagggccgcgaccagttgcgcacggcgaacgggcaggcgcgcccgctcggtgccgacgagcgctggcaggccgaattgtggcgcgcgctgctcgccgacgtcggtgccgatagcctggcccgcagccgctccggcgtgcaccggcgcttcatcgaggcgctgcgctccgccagcgcggcgccgcgcgcgttgccgcgacgagtggtggtgttcgggatttcctcgatgccggcgcagaccctcgaggcgctggccgccctggccaggttcagccaggtgctgctctgcgtgcacaacccctgtcgccaccactgggccgacatcgtcgccgacaaggacctgttgcgccacgagtaccgccgccagcagcgccgcgccggcgtccccgccgacctcgacgaggaccgccagcaccagcatgcccagccgttgctggcggcctggggcaagcagggccgcgactacatcaacctgctcgacagctacgacgacccggacagctatcggaacctgttcggcgaggtcaacggcgggcgcatcgacctgttcagcgaggaggccccgcacgggctgctcggccagttgcaggacgatatcctcgaactgcgcccgttggcggaaacccgcgagcactggccgccggtggcgccgcggagcgacgcctcgatccgcttccatgtggcccacagcgcgcagcgcgaagtggagatcctccacgaccagttgctcgcccgcttcaacgccgatccgagcctgaagccgcgcgacgtgatcgtcatggtccccgacatcaacgcctatgcaccgcacatcgaggcggtgttcggccaggtgccgcgcgacgaccagcgcttcattccctataccctggccgaccagggacagcgcggtcgcgagccgctgctgatcgccctggagcacctgctgaaactgcccgacagccgtttcgccgtgagcgagatcctcgacctgctggacgtcccggcattgcgccggcgtttcggcgtcgacgaggccgacctggcgaccctgcaccgctggatcgaaggcgccggcgtgcgctgggggctggatgccgcgcagcgcgagcgtctcggcctgccagcgggactggagggcaacagttggcgcttcggtctgcggcgcatgctgctcggctacgcggtcggcgaaggcgcggccctgcaaggcatccagccctacgatgaggtcggtggcctggacgccgccctggcaggcccgctggctgtgctgctggagcgcctcgaggtggcctacgccgagctggccgaaccggccaccccggcgcagtggggcgagcgcctgcaagccctgctcacggtgttcttcgaggcccacgacgagcgcgacgaactgctcctcacccagctcctgcaactgctcgagcgctggcaggaacactgcgcctgtgcggccttcgccgagccgctgccgatcagcgtgatacgcgaggcctggctcggcggcctggaccagggcggcctgaaccagcgcttcctggctggcgcggtgagtttctgcacgttgatgccgatgcgcgcgatcccgttccggctggtctgcctgcttggcatgaacgatggcgactacccccgccagcagtcgccgctggatttcgacctgatgcgcaacgactaccgccccggcgaccgctcgcggcgcgaggacgaccgctacctgctgctcgaggcgctgctctcggcgcgcgagcagctctacgtgagctgggtggggcggagtatccgcgacaatggcgagcggccgccctcggtgctgatcggccagttgcgcgatcacctggcggccggctggcgcctggacccggacggcgacggcgaggcgctgctgcgtgccctgacccaggagcatccgctgcagccgttcagccgtcggtattttcacgatgcgccggagcagggcgtcgatggcctgttcacctacgcccgcgagtggcgcgaggtccatagcgaggacgacatcgccgttcccgacgccgaagcgtccctgccgccgcttgaactggagggcgcactggggctgcgagcgctggcggagttcctcgccaacccggtgaatgcgttcttccagcagcggctcaaggtgcgtttcgacgacgagcaattgaccggcaacgacgaagaacctttcgaactggacgcgctggacaactggaagctgcaattcgagctgaccgaacgcatgaagcgctgggtcgagcgggactgggatgccgagggcctgccggcgcagttgcaggcccaggtcgagcgactgcggcgacagggtcgcctgccgctggcggcgttcggcgagttctccgcgcgccatttgctgcaaccgctgcccgacctgctctggcgctaccgccaggaaatcgagcgctggccggaggcggtcgagcagcagcaggagttgcgccatcgccatccgtccgggctggagctggaggactggctcggcggcttgcgtcgcgacgcttccgggcgcctggcgcgcctgcagttgctcagcggcaagctccatgaagggcgcggcttcaagtggcacagcctggtgcgccactggttgcagcacctcgccctccaacgtctaggccagccggtgagcagcgtgctggtgagccagaccggcaccctggagattccgccgttgccgagcgagcgtgccggcgagtacctcgaccagttgatcgatgcctggcgccagggcatgcgccagccgttgccgctggcctgccggaccgctttcgcctggctcgccagtggtggcgccgcagagcccgagaaagccatgcgcgaggcgcgcaagcgctacgagggagggttcggcatggggggcgaggtggacgcctcgccggcgctggctcgggtctatccggacttcgacaggctgctcgccagcggtgagttcgcgcactgggccgagcagctctacgcgccgctgctggctgccctgggacgtggcgcggaggagcaggcatga

SEQ ID NO: 322861 - DNA, 684 bp, Pseudomonas aeruginosa
gtggtcgaagtgttttccgtgcaggatgggctggacgccgagcgcgccctgctcgacgaggtgtgtggcggtgcccgcgagcatggcctgttgctctggcagccctgcgatcgggcgctggtcatgccgcgccggatggagcgcctggaaggattcgcgccggccagcgcagcggtcgccgaacgcggctggccggtgctgctgcgcgataccggcggcgagccggtgccgcaatcgccgggcgtgctgaacatcgccctgtcctatgcgctggggcccggcgacaacgagcagacccgtatcgaaaccgcctacctgcggctgtgccagccgatctgcgactggctccgcgagcgcggcctggacgccggcgtgggcgccgtggccggttccttctgcgacggccgctacaatgtcaccctggatgggcgcaagctcgccgggaccgcgcaacgctggcggcgcaacggcgccggccggccggtggtgctggcgcacgcggcgctgctggtcggcgccgagcgcgaggagatggtcgaggtggtcaacaccttcacccgccgttgcgccagtgccccggattgccaggcggacagccatctcggcctgagcgagcgctggagcgatttccgcatggccgacagcctcgaactggaacgacgcttcgtcgccgcccgatcctga

SEQ ID NO: 322862 - DNA, 891 bp, Pseudomonas aeruginosa
atgcaatacctgtttcccctgctggccgtgttcatctgggccggcaacaccgtcgtcaacaagctcgccgtggggatcatccagcccgccgagatcggtttcttccgctggctgctggtcggcctggcgctgacgcccttcatgctcggcccggtgctgcgcaaccgccgctacattctcgccaacctcggcaagttcgtggtcctcggcctgctcggcatggccgtctaccagagcctggcctactacgcggcggcgctgaccagcgccaccaacatgggcatcatcctgtcgctgatgcccctgatgtcgctgggcctggccagcagcatcctggcccaccggctgaacgccggggcgctgctcggcgcgctggtgtcgctggccggcgtggtgctggtgatttcccagggccatctcggcgctttgctggagcatggagtgaacctcggcgacgcgatgatgatcgtcgccaccctggcctatgcggtgtacagcgtgctgctgaagaaatggagcctgaagctgccggccatgcaactgctctacctgcaggtgctggtggcgatcctcgccctgctgccgctgtacctgctgtcgccgcgcaccggcctgaacgccgccaacctgccgctggtgctgtacgccgcgctgttcgcctcgatcgtcgccgcgctggcctggatgcacggtgtcgcccgtctcgggccgagccggatggccctgttcttcaacctgctgccgatcatcaccgcctgcatcgccaccctggtgctcggcgagcgcctgaccgtccatcacctggtcggcggcgcgctgaccctggccggggtcctgctggccgagttctggcagcgccgcccggcccgtctgcgctcggcaacctgctga

SEQ ID NO: 322863 - DNA, 804 bp, Pseudomonas aeruginosa
atgtcgaccaccaccctgctgcgccttcccgatctccaggggcagtctttcgacgtctatttccgctatgacgagttcggcgccgacacccattcgccgccgcacacccacgcctggggccagctcaactatgcagcccatggcgtgatgcagctggagatcgacggccagcgcttcctctcgcctccgcaatacgcggtatggataccaccggagcgggtgcacagctgctacaacagccaggccatcgtctaccgctcgctgtacctctccgccgaactgtcacgacgcctgccggcgacaccttgcaccctggcgatcagcgcgatcctcaaggcgatcctctcggacttcgccgagcgcggggtcaacctgccgacctcggcgcaggacctgcgcctggcccgggtcgtcatggaccagctggaatgcgcccagccccacgacgactacctgccctacagccgtaccccggcgctgcgcgaggtgctcgacgcactgcaggccgagccgggcgacaaccgctcgctggcgcaatgggcgcagcaggtgcacagcaccgagcgaaccctggcccgacactgccagcgcgaactgggcatgaccttcggcgaatggcgccaacgcctgcgcttcctcgcggccatcgaggcgctggaagccggcagggggatccagcagatcgccttcgacctcggctacagcagcccctcggcgttcatctcgatgttccgccggctggccggcaccacgccggaacaataccgcctggccagccgcgcccaggacatgccgatgctgtaa

SEQ ID NO: 322864 - DNA, 1206 bp, Pseudomonas aeruginosa
atgccaaccgccagccgccattccgacactgccctcgcggtgttcctcgcctttctcaagctgggctgcagcgccttcggcgggcccatcgcccacctcggctatttccgcgacgagttcgtccgccgccgcggctggctgagcgaaagcagctacgccgacctggtcgccctctgccagttcctccccggccccgccagcagccaggtcggcatggccctcggcctggcccgcgccggctaccccggcgccctcgccgcctggctcggtttcaccctgccctcggcgctgctgctggtactcttcgctctcggcctgggacgctggggcgcgctgttgcccgagggcgtgctgcatggcctgaagatcgccgcggtggcggtggtggcccaggcggtctggggcatgggtcgcagcctgtgcccggatcgcccgcgcctgacgctgatggcgctgtcctgcgcgagcgtgctggcctggcccacggcctggacccaggtcgcggtgatcgccggtgccggcctggccggcctcgccctgttgaaaacggaagcagtggaaggccacgagcggctgccgatcgccattggctaccgcggcgcgctgctgttcctcaccttgttcgccgtgctgctggtctgcctgccgctggccgcgcgcctctggccggaacactggctgcgcctgctcgacgcgttctaccgggctggctcgctggtattcggcggtggccatgtggtgctgccgctgctgcaggcggaagtggtacccaagggctgggtcgacggcgataccttcctcgccggctacgcggccgcccaggcggtaccgggcccgctcttcaccttcgccgcgttcctcggcgcagcctcgggcccggcgccgaacggctggagcggcgcgctgctgtgcctgctggcgatcttcctgccatcgttcctgctggtcgccggtgccttgccattctgggaacgcctgcgccacgaacgccgggtacgggcaacgctggccggggtcaacgcggcggtggtcggcctgctgctggcggcgctgtaccagccgctctggaccgaaggcatcctgcgcccggccgacttcgccctgctgctcttcgccctgctggccctgctcgcctggaagacgccgccctggcaagtggtgctcgcctgcgccgtggccggcggcctgatcgccacagccggctag

SEQ ID NO: 322865 - DNA, 1617 bp, Pseudomonas aeruginosa
atgcagcccgctcgttcccgcatcctcttcgtctgcctgttgcagagcctggccctggttctcctgctggtcggcgcccggcatggctggctgccgctgtacctggccctgccgctcggcgtggcgctgctctggttgccctggctgcttcccggcaaccgcacggcggtggcgaccgtcggcgagcccgacatcgcccggctggctcgcgacctgtcccataacaccagccagaacgccttgtcggccgccggcgtggcgttctcggtgaagcgcctggcggagaagctgcaatcccagctcgacgccgccgaacagatcgtcggcagcgccgaagtgatgatccacaccgagcgcgccacctccaatctggcgcgccaggccatggacgccgccacccgggcgcgcgccggcagcgacgaaggccaggtgctgctggcctcgaccatcgagcgcatgcatcggctcagcgagcggatgggcgccagccgcgaggcgatcgaggcgctgaaccagcgcagcgaggacatccagcgggtcaccctggtgatccagggcatcgccagccagaccaacctgctggccctcaacgcggccatcgaggcggcccgcgccggcgagcatgggcgcggcttcgcggtggttgccgaagaggtgcgcggcctggccggacgtaccgccgaggccaccgaggaagtcggccagatggtcgccgagatccagcgccagaccagcgaggtggtcgagcagatccgccagctttccgaagagttgggggaaggggtcggccaggtcgagctgaccggtcggcaactggaaggcattgccgaactggcggccggggtggaaagccagattaccgagatcgcccagggcgccgagatcaaccgcagccaactcgccagcctgttcgccgcggtcgagcaggtgcgcggcgacctcagcgccagcgaggaacagaccctgcgcctcggcgaagctgccagccagttggagaaccaggccgaggtgatcagcgagcgcctcgccgaggtcagcctggacgcctaccaccagtcggtctacgacctcgcccgggagggcgcggcggctatcgccgctcgcttcgaggaggacgtgcgcagcgggcgcatcgacctcgacgacctgttcgaccgcagctaccagccgttgcccaatacccagccgaccaagtaccggacccgcttcgacagctacaccgaccaggtcctgccgggcatccaggagcagttgctggagcgcaaccgcaacctggtattcgccatcgcctgtacccccgaaggctacgtgcccacccacaatcgcgccttcgcccatccgcccagcggcgacccgcagacggacgcgttgcgcagccgcagcaagcgcctgttcaacgaccgcaccgggattcgctgcggcagccaccagcagccgctgttgctacagacctacacccgtgacaccggcgagctgatgcacgatctttcggtgccgatcttcatccacggcaagcactggggcggcctgcgcctcggctaccggccggagggcgcggagccgggcaaggcggccgcgccgacggcgcaggggctgagcctggccttgaacggctag

SEQ ID NO: 322866 - DNA, 252 bp, Pseudomonas aeruginosa
gtgacgaaagacgaattgcgtgccgcgctggcgcgcgaggaacagcgttacaaggacgtgtacggcggcgaagtgacgctttatgccgcccagccggaacccgaccgcaagccctggcgcaaacgcccaaccgttcaggagcaggcgttcgacagagaactgcagaagatcgaagaagagcgtctcaaggccgggcaggaagcagcgaaccccattccatttacctccaaccgacaggagagcgacggataa

SEQ ID NO: 322867 - DNA, 1470 bp, Pseudomonas aeruginosa
atgttcgatcttttcagcgggctcgatgcctgggtgggtatcagcctggtgctggccctggccttcgtcctcaccttcgagttcatcaacggcttccacgacactgccaacgcggtggccaccgtcatctacaccaaagcgatgtccccctaccgggcggtgatgctctccggtgtgttcaacttcctcggcgtgctgctcggcggtgtcggcgtggcctacgccatcgttcacctgctgccggtggagctgctgatcaacgtgaacaccggccatggcctggcgatggtcttctccctgctcgccgccgccatcgcctggaacctcggcacctggtacttcggcatcccggcctccagctcgcacaccctgatcggctcgatcctcggtgtcggcctggccaatgcgctgatcaccgacgtgccgctggccgaagggatcaactggcagaaggcgatcgacatcggcctgtcgctgatcttctcgccgctggccggcttcatggtcgccgcgctggtcctgctcggactgaaatggtggcgtccgctgtcgaagatgcacaagaccccggaaacccgtcgcgaactcgacgagaagaagcacccgccgttctggaaccgcctggtgctggtgctttccgccatggcggtaagcttcgtccatggctccaacgacggccagaagggtatcggcctgatcatgctggtactgatcggcatcgtcccggccaagttcgtcctcgacctgaacagcaccacctaccagatcgagcgcacccgcgacgccgccctgcacctcagtcagttctaccagcgccataccgataccctcggcgacatgctggccctgggcaagagcaatggcagcgagatgccgcagttctaccgctgcgatccgaaacagaccgagccgaccatcaacgcgctgctccgcgacttgcgcggcgtgcccagctacaacgacctggacgccgacgagcgcgtgcaggtgcgtcgctacctgctgtgcctggacgacaccgcgaagaaggtcggcaagctgtccgacctgccggcgcgggagaaggccgacctcgagaagctacgcaaggacctgaccgcgaccaccgaatacgcgccgttctgggtcatcatcgcggtggccctggctctcggcatcggcaccatggtcggctggaagcgcgtagtgctcaccgtcggcgagaagatcggcaagcagggcatgacctacgcccagggcatgagcgcgcagatcaccgccgccgccgccatcggcatggccaacatctacagcctgccggtgtccaccacccatgtactgtcctccggcgtggccgggaccatggtggcgaacaagagcggcctgcacggcggcaccgtgcgcaacatcctgatggcctgggtgctcaccctgccgacttcgatggcgctgtccgccggcctgttctggctggcctcgcaattcatctga

SEQ ID NO: 322868 - DNA, 2772 bp, Pseudomonas aeruginosa
atgttcgaattttcccgctcgtcgtccgccgaggccgagaggccggaacccttttcgcaggaaggcccctccctctggagcgcttcgctgaggagttgggacctgtgtttcgagatggacgaacaggaccgcgtgatccgggtcggcgggcggcaggcgcatcgtctgcagtgcgcccatgggcttggcgaacagccgcggcctttcgccgagtatctggagcggcgcgcccccggagcgccgacgctggccggcctgcgccggggcgagcgtctcgacctgacgctgcgcagcgatgccgccgcgccattgacctgtcgtttccagccgatgcagccgctcgacggcctgggacgctcgctgctgctgggcatggacatctccgacctcaactggcagtccgacagccagcagcaccagttgcagagcctgagcctgggcaagctgatcctttcgcgtctgcgccatgtctcccacgggcacctggcggaggcggtccaggagattctcgaatcgctctccggcgcgttccagatgcaggctatcgccctgctgctgggcgacggcaagggtttctgcacggtcttcgccagtcatgtgcggcctggcagcgacagtttgctgcgaccgaccctgcaactcgccgacgacgacctgcgcgaaggggcgggcgcgcgcttgctacgccgtggcgaaggcgcctcgacgctgctccggcagatcggcgaggacgcgctctacctggtgccggcggcgatgcgcggtggccgcctgggggcattgctggtgcggccgatgtcgctggagcagctcgcccaggggcccgcgccgcaggactggcaatacctcgcggaactgctggcgaaccaggtggcggaccgctgcgaactccacgagcagcacgacagttcgcgcaagctggggctgttgcaggagatgatcggcggcggctggtggcgttactgggcggagcaggaactcttcgaactggcgccggccttgcacgatagcctggggttgaccggcgagtatcgtcgggtgccgctggaacacctgcagggcctgctgcaaccggcggacgccgacgagctcggcctgcgcctgcgtgccagcctgcgcagcggccaggcgctggcccaggacctttgcctgcgtcagccggatagccgcggcgagcgccgctggctgcgcatcgagggccggccgctgggacgcggcagtgccctggggctgtccggcgtgctgctcgacatcagcgaaggccggcgccaggaggaacgggcacaggcggcccacgcgcggttgcgcagcctgatcgacagtgcgccggtggtgatctatgtccagcgggtcgagcaggggcacctggtgccggagttctacagcgaaagcgcgagcaacctgctcggcctcgacctgcagggacagagttggcaggcgctcgccgagcgggtgcatccggatgatctggaggcctttttcgcccgcggccgcgagctgcttcgcgagggccgggtgaagacccgctatcgcctcgccgatggccagggcaactggcactggctctacgacgaagccaagctgctgcgcgatgcccagggcctgcccagcgaggcggtgggcctgtggctggacgtgaccgagcagcacctggcggcacagcgtatcgccgagagcgaggaacgctaccgggtcctggtggaggattcgccggcgctgatctgtcgctataccgccgacctggtgctgacctacgtgaaccggaccttcgccgatagcctcgcgaccagcccggagcgcctggtcggtcgccggctcgacgagtggctggcggcggaagacgccagcgccttgcgcgcgcgtctgctgggttcgccgcgggagggcgccagcgaggtgccggaactgcgcttcaacctgccggggcaacgttttctctggctggtgtgggccgagcgaccgttgttcgacgcccggggcgaattgtgcgaggtacaggcggtgggacgcgacaacacgccggtgcgtcgggcccagcagcaactggcgcaaggcgccaagatggccagcctgggggagatggtcagcggcctcgcccacgaggtgaagcagccgctgcacgtgctgcgcatgaccctgttcaacatgcgccagcggatgaacagcgtcggcctcgacggcgactacctgggcgagaaactggagcgcatggatgcccaggtcctgcgcgtcgaccgcctggtcagccacctcggcgtgttcagccgcaagtcggcgctggaggcgctgccgttcgacccctatgccgccttcgaaggcgccctgggcctgctcggcgaggggctgcgtcagcacgccatcgaggtggagtgcccggcgccgacgcagcggatggtggtgcgagggcaggcggaccagttggaacaggtgatcatcaacctgctcgccaacgcccgcgatgccctgcttggcaatcccggcctggccagccggcgcgttcgcctggagcaggtggcctgccgcgaaccgggctgggtcgaattgcacgtgcacgacaacggcggcgggatcgaaccgctcctgctggagcggatattcgaacccttcttcaccaccaaggcggagggcaagggtaccggcctgggtctctcggtcagccacgatctggtgcgcaacatgggcggtagcctgacggcggccaaccagggggagggcgcgttgttcgtggttcgcttgccgctggcggcgctgcccgccgaggcgggcggatga

SEQ ID NO: 322869 - DNA, 465 bp, Pseudomonas aeruginosa
atgctcggaaaagcttcccggcgacgccagcacggcgccgtcgccatcgaattcacagcgatcttcctgctgtttttcgcgctggtctacggcctgatcagctacagcattcctttgctcatgttgcagtctttcaacgatgccgctgccgtgggggcccgtgcggcgatcgctgtcgatccctccgatgcgggctacgagagcctcgccgaagcccgtgccagggacgagttgctcgcacgcctggactggatgccggcggcctggcgagcgaacctccagccttgtgccggtaacggccagtacgccgactacgtcagcgccacgtcgcggatcgaggtctgcgtgcagtacccgtacggcgatccgggcaaggcgatcatccccgtgctgagcttccccggcatcggcgcgattcccaacctgccgcagacgctgaaggcgagtgccaacctgttgctgtga

SEQ ID NO: 322870 - DNA, 483 bp, Pseudomonas aeruginosa
atggagcaattagcactggccttgtgggcaagcgtttgcggatatcaggacatcaaacgtttgcgcgtctccaactggcttatcctgggcggttttcttatttcctttgtttatttatatgtgaaagagtcaagcctgaccggcgctacggttaatatggcaatgaccgcactttttataggcgtctgcctcagccttcccggctaccttctcggcaggctcggcgccgccgacgtcaagtacctggccgcactggggctggccagcgacccacttacggtgctctatagcctggccttcggctgcctgctgtgcatcgcgctattcatcctcgtaaagttattcaaacgttcggtacaaaagtccgcaatgaatgaagaagttcgccttcgaagggcaccgtcaaaaaacaagtcattcccttttatattcgccatgagcgccggccttttggcacatctgattatcagtaaaattatctga

SEQ ID NO: 322871 - DNA, 828 bp, Pseudomonas aeruginosa
atggacaaaccggcctcgcggcatttcagcgtcttgatcatcgatgatgaaccccaggtgacctcggaactccgcgaactgctggaaaacagtggctaccgttgcgtaaccagcacccaccgggagtcggcgatcgccagcttccaggccgacccgaacatcggcctggtcatctgcgacctctacctggggcaggacaacggtatccgcctgatcgagagcctcaaggaagtcgccggcaacggcaggttcttcgaatcgatcatcctcaccggtcacgatggccgccaggaagtgatcgaggccatgcgggtcggcgccgccgactactaccagaaaccggtggcgccgcaggaactgctgcatggcctcgaacgcctggagaaccgcctgcacgagcgcgtccgcagccagttgagcctgagccacgtcaaccagcgcctggaatacctcgccgaatcgctgaactcgatctaccgcgatatccacaagatcaagtacgaggtacacggcaacagccagccgagtgccctcaagagcgaagacagccagccgtccgcgccgccggcgtcggtcgcggaaagccaggtgtccccgagcaatccgctgttcggcaagctgtcgccccgccagcaggcggtggcgcggctggtgagcaagggcctgaccaactaccagatcgcctacgaactgggcatcaccgagaacacggtgaagctgtacgtctcccaggtgctgcgcctgatgcatatgcacaaccgcacacagctggcgctggccctgtcgcctgcggcgatgcagcagggcagcggagcggtggtgcactga

SEQ ID NO: 322872 - DNA, 1671 bp, Pseudomonas aeruginosa
atgaacggatggcctgcaagacagcgcggggcgatcggcatcctggcggcgaccaccctgctgctggccttgatctgcctgttgctggtggtggataccgggcggctctacctggagcagcgcaacctgcagcgagtggcggacgtggcggcgctggagagtgcctcccagggagccttgtgcggcgaccagagttctgcccaggcgacgtctttcgccaaggccagcgcgatgctcaacgggttcgatgcggacgctgccggctccagcctgtcggcggaagtcggcggcgtgctgagtgccggcggcctgcgcagtttcatagccagcgcgtcgaacgcggctgccgccaacgaggcggtgcatgtcgaggtgaccaagagcgttcccggcagcctggtcgccaacctcgggggactgttcggcggcggcaatgccaacgtcgatctccgcgcagaggccgtggcgcgacgcctgccgaacgccacgatttccgcaggcacggggctggcgagcgtgaacagtggccaatcggcgttgctcaaccccatcctgagcggattgctgggcacccacatcgatctctcggcggcggcctacaacggtatcgccgacgcgaagctcagtgtgctggacattctcggcccgaatggaatgggcttggtcggggtcgataccagcctggggaccatcgaacagttgttgaataccaacgtcggcttgcagcaggtactcgccgccagcgtgaacgtcctggcgaagaacggcgtagcctcggtcgaggccctgagaacgcaattggtgggggtaaagtcggccacgttgaaactgggagacttgctggggctgagcgccggcgaggtgaacagcatgtcgcagctggatacggcgatcaatgcgctggatctcatcatggcggttgcccaggtcgccaacaagaattccgcggtcgccgtgaacctgggcatccccggattggccaatgcacggctcacggtcgtagagccgaagaggatcgtctccgggccgccagggcaggatgagagcggcgcctggcgcacggaggtgcgccagtcccaggtacgacttacggcggacatcgattccgggttcctgtccattctcgccaccacgaaactgcaactggccatcgaaggcgcgtcgggagccgtctggctgaaaagcatggcctgtacccgcccggataccgcgttggacttcggttggagaagcagcggagcgacgataaagatcggcagtccggccaacatcgatcaggtcggctcgattctggtgcttggcggcttggtgcgattggatctcaagctcgatacctcgatcgccggcagctcgggcgatacgcgattcaacgtgaaagccgacggttccgatctcgtccagagccgcaggttgccggaaagcggctttctcgccagtaccctgaaaaccagcatcaacgtcaatcccgtggtgctcggactgtgcttgcctttgctgtgcggctcgacggcgctcaccgacctcatcgtgaattccgtggtggcacctctggtcgatgggctgctgacgccgatcctgaatctggtcctgcccttgctgggggtacaacttggatacatcgacgcggagattctgaaggtcgatgtcggcagggcggaactgctgatctag

SEQ ID NO: 322873 - DNA, 285 bp, Pseudomonas aeruginosa
atgcacgagcgaatcctgttcggcgtcttgctgctcctgtccggcacggcctgggccgcggacacgccggcggtccgtcctgccgcgccagcgacggccgaaccgcagaccgccacccgcgcctggctggccatccaggcgagcggccgggccgccagcccggttcggcaaagcgcgaccgccgccgagcgccagcgtgcctaccagcgctacctgaaaagctatgagcacgagattcccgagtacctgctggaagatcgcggcttcggcgagagcaagaactga

SEQ ID NO: 322874 - DNA, 738 bp, Pseudomonas aeruginosa
atgaaagcactgatcggcattggcctgtgcgccgccctgctcggcggttgcgccgcgctgccggggcgggacggcccacgggagtgttcgcagcagctcggccaggagcaggaactgcagatgaacatggtccgcgacatgatccgcgagggccgcctgcatgcggccctggccaacctggaaagcatgccgccggggttgctcgacgtgcgcgaggaaagggcgctgatcctgcgccggatcggcgacccgcgggccagggccgagtaccaggcgctgctggaaacctgcaaggcagccgaggcgcaccacggcctcggcctgctcgccctgcgcaatggcgacagcgcccgggcggtcctcgagctgcgcgaggcggcgcgcctgcggccgaccgagagccgcttccgcaacgacctgggggtcgccctgctcaagcgcggcgaccgtgtcggcgcgcgcttcgaattcatcactgcgctggagttgcagcagggtggcaagctgccggcgaccaacctgctcggcctgctgtacctgcaaggcgaccgggaagatgcgcagcgcctgatcgagcgtttgcagctggatgcccgggacatccgcgcggccgaggcgcgggcgcgcagctggggtgccgtaccgacacccggcgcggcgccggcaagcgacgacccgctggcggaactgccggcggaggcgaatatgcataccgcgatggccaacgaggcgccctga

SEQ ID NO: 322875 - DNA, 912 bp, Pseudomonas aeruginosa
atgcaggcacagtggctgattttcgcggcgctcctgatggcggtcggcggtgccttgttgctgttgctccaggcgcgcaacggcagccgcgagcagcgcctgatcgagaggcgcctgggagcgctggccaaccctggcggctcgaccaggtggctggccggcatgaccgagcggatggacgacagcttctgggtgcggcgcctgcaactgatggacagcgaggcccgccagttgctgcaacaggccggctggcacgagagtcgctaccggaccctgtacctgatctcggtgttcctcacgccgctgctgttcgttctcctggtcttgctggtcaagctgctgcgcgccgagagcgaggcgtcctacgcggtgccgctgctgttcgccgccggcatcggtttcctcctgcccaagcaggtgctcaagcacttcgccaaggcgcgccgggcgctgatcgccgacgagatgatcctgttcgtgcaactgatccgcatcctcttcgacgccggcctgaccgtggagcagacgctgcgcgtggtctgcctggaaggccgcgggatcaccccgcaactggcccgcgagctggacctggcgctgacccgtgccgacaacggcatcgacctggcggaagagctggaggcgcttgcccggcgcctgcaggtggacccgctgaacgactgctgcggcgtgctacggcagatgttgcgccagggcggcagtgcgcgcagcaccctgctgacgctcaagcaactgttcgaagaccggcgcctgaccaccttgcaggaacgcatcggcaagctgtcggcgaagatgagcctggtgatgatggtgctgctgttcccggcgctgctgatcgtcctcgccggtccgggtgtcatcgcgatcaccaaggccttgggaggactgggatga

SEQ ID NO: 322876 - DNA, 885 bp, Pseudomonas aeruginosa
gtgaacggcgcgcaactgctggtgctgttcagcggcgtgctggctttcgccgcgctggccctggcgttcatgggctggcgcgccgggcgcaacgaactggtggttgaacggctgctgggacgccaggaggcggtcgcggtgcggccgcgcagcagtcactggctggctcgccagatgcgtcgcgccggtatccagcgcccgcgcccgtggttgttcggggcggcagtgctcgcgctgctgctggtctggagcggattgggcctgttcggcaccatcggcgcgctaggcggcctgctactggcggcgctgtcctgccgcgtcgccctgggcatgctctaccagcgccgcctgaagcgaatgatccggcagatgccgcgtttcctcgaccaggtggtgcgcagcctgcacgccgggcgcacgctgggcgacgcgctgatgcaggcagtggagaatgccgaggagccgctgcgcgacatcttcaccctggcgcgcaaccacgtgcttctcggcatccacctgccggaggcgttgcaggaagtcgccgaactctacgaggttgaggagctgcgcatcctcgccctgggcgtctcggtcaaccaccgttatggcggcaataccagcgacctgctggacagcatcgtcaagctcatccacgagcgcgagaagctcagccggcagttgcacgcgatgaccggcgagacacggatcagcgcctatgtcctggccggcgtgccgagcgccctgggcggctacatcctggcgagcaacccgggctatctgctgaacatgtgggccgacggcaccgggcgtttcctgctcctggcctcgctcgggctgcaactgctcggctgctatgcgctgtggcgcatgctcaagagcgtctag

SEQ ID NO: 322877 - DNA, 1266 bp, Pseudomonas aeruginosa
atgagcacgggattcggcgcgcgtcctgacggcggtgccttccactcccgccaggagcaggacatccaggcgctgaagctgcgcctgcaccgctacatcatcgacgagatcgacgaagacggcatgaacctgctggagggcgcgcgctccgccgtggtccagtacgtctcggaaaaggtctgcgaatacggctcgcgccatcaactggcgatctcccgctacgaactggaccgcctggccgaagaggtggtcgacgaactcaccggcttcggcccgctggagatcctcctgcgcgatcccggcgtctcggaaatcctcgtcaacgggccgggccgggtgttcgtcgagcgggaagggcggctctaccagagcgacctgcgcttcatcgacgaccaccatgtgctgcgggtgatccagcgtatcctcgcgcccctcggccgacgcctggacgagtccagcccgatggtcgacgcgcgcctgccggacggcagccgggtcaacgcgatcattcccccggtggcgctggacgggccgtgcatctcgatccgcaagttcagccaggagctgctgcgcagtgccgacctgctggcctaccagagcgtcgacgaagccttgctcgagttcctccgccaggcggtctcgcgccgctgcaacatcctcatcagcggcggcaccggcaccggcaagaccaccttgctcaacgtcatcagcggcttcatcgacgaacgcgagcggatcgtcaccatcgaggacaccgccgagctgcaactcggccacgaccacgtggtgcgcctggagacccgtccgccgaacgccgagggctacggcgaggtgaccgcccgcgacctgatccgcaacgccctgcggatgcgcccggaccggatcatcctcggcgagatccgcggcgtcgaggtgctcgacgtgctgcaggcgatgaacaccggccacgacggctcgatgagcacggtgcacgccaactcggcgatggattcgctgctgcgcatggagatgctggtcggcctgaccggcaacaggctgccggagcagaccttgcgcctgatgatctgcgccgcgctggacgtggtggtgcagatcacccgcctggccagcggtcggcgttgcatcagcgaagtgctggaggtgctggaggtgcgcgacggcgtgtacgtcaccaataccctgttcagtctcgaccggcgcggtagcgggcagttcgtccgccaggccgcgccggtcgggcagaaattccgccaggcgctgctgtga

SEQ ID NO: 322878 - DNA, 1185 bp, Pseudomonas aeruginosa
atgaaccagaacttcgtggcgctgacccagcatcccggcgaactcgactggttgcagaacagcctggcgtccgccggccaggtggttccggcaggcagcgccagcctggaggagctgctggcgctgctcgacgtcaccgccgccggggtgctgttcatcagcctcggcaaaagcaacctggtgtcccagggcgcgctggtcgagggattggtatcggcgcggccgatgctctcggtggtggccatcggcgacggcctggacaaccagttggtgctggcggcgatgcgcgccggcgcgcgcgacttcatcacctacggcgcccgcgccagcgagctgaccgggctgatccggcgcctcggcggacgcctgcccagcgtgccggtgagcgcggcgcgccagggcgagctgctgaccctggtcagcgcccgaccggacgccgacggcgccttcgtcgccttgcacctggccaaggcgttgcaggagcagacgccgaaccaggtcctgctgctggacgtcggccagcccaccggcgaggcgctggcgatcctcggcctggactcggccttcaccttcagcgatgccttgcgcaacctgcggcgcctcgaccagaccctgatcgacagcgccttcacccgcctcgacagcggcctgcggatactcagcctgaccgacgagcccggcgtgctggagcgagtcaccaccgccgaactctatctgttgctgggcaacctgcgcggggcgttcagccatgtggtggtcaacctcaccgggctgcccgagggcgagctgagcaaccagttgctggtgcaggccaaccgcgtgctgtggatggtcgaccagagcgtgccgtcctgcaagaagggcctggagcgcctgcgccgcctgcgcgagcgcaacctgccgttgccctccatcgagttgctgatcgagcgctacctgcccaatgtggcgccggaccagcaggccctgagccggatgttcgacctcgatctgttcggtgtcctgccgttgtccccggaatcgcgcctgcgcgcgaagaacctcggcaagagcctgttcgaggtggcgccgcgcgacccattggcggccaagctgcggcaactggcggacagcctgtgcgtgacacgcggcgagcgccgttcgctgctgtcctggctcggccgggccaaggcggcgctgctatga

SEQ ID NO: 322879 - DNA, 1251 bp, Pseudomonas aeruginosa
atgcatcggagcaccgggataggcgtgtcgcgctggctgggagggctgctgggggtggcgttggcgctgccggcactggctttgccgcagggctgcatcgagttgctggcgcaggcgccgcgggtcgacgtcgtccagggacaacagcgtgacctgcgcctggcggtgccgatcgaacggctggccatcggcgatccgaagatcgccgacgtacagttgctggatcgtcgcggcttactggtcaccggcaaggaacagggctccaccagcctgctgatctggaccggctgcagtccggagccgttgcgcagcctggtggaggtcgagggacgcggtagcgtcgatacccgcggtgctccagcgttcaccgccggtgccgcggaggagctaccgaaccaggtgcagaccgatatccgcttcgtcgaggtcagccgcagcaagctgaagcaggccagcacctcgttcgtccgccgcggcggcaacctctgggtgctcggtgcgccaggcagcctcggcgacatcaaggtcaatgccgacggcagcggcctgggcggcaccttcggcaccggcagctcgggattcaacctgatcttcggcggcggcaagtggttgagcttcatgaatgccctggagggcagcggcttcgcctataccctggcgcgcccgagcctggtggcgatgagcgggcagagcgcgtcgttcctcgccggcggcgagtttccgatcccggtgccgaacggcaccaacgacaacgtcaccatcgaatacaaggagttcggcatccgcctgaccctcaccccgacggtgatgaacaaccgccgcatcgctctcaaggtggcgccggaggtcagcgaactggactacagcgccggcatccagagcggcggggtggcggtgccggcactgcgcgtccggcgcaccgacaccagcgtgatgctggccgatggcgagagtttcgtgatcagcgggctgaccagcagcaactcggtgagcaacgtcgacaagtttccctggctgggcgacatcccgatcctcggtgcgttcttccgctcgaccaagctggacaaggacgaccgcgagctgctgatgatcgtcaccccgcacctggtccagccgctggccgccgacgcacagttgccggacctgcccggcgagggcctgcggcactacgatccggggttctcgcgcctgtacttcctcgagcgcggcgagtacgacggccagcagaacgacaccggtctgtcggattag

SEQ ID NO: 322880 - DNA, 912 bp, Pseudomonas aeruginosa
atgaatagcaaggtgctgatggccctggccggcctgctgctgctcggtgcggtgctgctcggatacctcggcgtatccatcggccgcgcaccatcgaacgcgcatgctccatccgtggcgccggcttcggcggcggtggacgcttcgctggaaaagctcgaacgcaagccggtgctggtggccagtcgcgatctcccggcgctggcggtgatcggcaaggacgacctgagcgtcgagctgttgcggaccgcaccggtcggtagctacgacaggcccgaggcgttgctcggcaagcgggtctgggtcgcggtgccggccggcagcattctttccgccgcgaccctagaacccggcggtccgctggcccggaccatccgtccggacgagcgggcgatggcgatcgctgtggacgaagtggtcggcggcggcggcttcgtcctgcccggcgactatgtcgacgtgatgctcttcgtgcgtgacgagcgggacggcgaatcgaccccgctggcgcaactggtgttgcccggcgtccgggtactgacctacggcgagcggatcgccgtgggcagcgatgggcaggaccgctcgaaccaggaaaaggacccgcgtccgccgcgtaccgcggtgctggcggtaccggaggacggcgtggcgcggctgatgctggcgagccaggccggttcgctgcgcctggccatccgcagcaaggacgaagaactctaccgcagggagcaggaaggcgcgctgctgcaagcgtcgctgggcgcgccgagcgcggcgctgagcctcgaccaactgctggagcgccgcaaaccgacggcgccgagcgtgcgcagcgcggctccgcgcgtgccggtggccaacggggtcacggtctaccgtggcagcgccatgacccatgaagcgccttga

SEQ ID NO: 322881 - DNA, 213 bp, Pseudomonas aeruginosa
atgaagaacctgaccctgttcgtgtattgcaaagttcgcgcattcctggcggacgaagaaggggcaaacgccatcgaatacgcggttatcgccggtttgatcgccgtggcgcttattgccgtcttgagcccggacgaaggcggtatcgtcggcggtctgaaagccttcttcgacggcgtcggcaccaaagtcggcggactggctccggactga

SEQ ID NO: 322882 - DNA, 1086 bp, Pseudomonas aeruginosa
atgctggcactgtgctacaaagccggccgttcaggcgctggatcatggctttcccccgcaagctccctacctggtggcctgggctccccgcccttcttgaggcttttgccaggacgcatcgctcatgcttcgctcgctgtcgtttgccaagaaaatccttctcgccgccgcattggtggtggttttcgccttcacctgcttcatcctctacaacgattaccgacagcgcgaggccgtgcgcacggacacggaaaactacctcggggaaatcggcaccctgaccgccagcaacatccagagctggctggaaggccgcatgcacctggtggaaggcctggcctcgcaactggcgctgctcgaccagcccgacgaggcgaatatcgcaaggcaactggaacagcccgtcttcagccgcaatttcgcgtcggtctatcttggcgaggcggccagcggcgccttcaccatgcgcccctacgacgccatgccggaaggttacgacccacgtacccgcgcctggtacaaggacgcgctggcggccgaccggcttatcgtcaccgaacccttcgtcgatgccggcaccggcgagcagatcctcgccatgtcgctgccggtgcggcacgccggtcaactgctgggcgtcgccgccggcgacatgaagctggagaccctgaccgcgatcctcaattccctgaagttcgatggtgccggctacgccttcctggtcagcgacgccggcaagatcctcctccaccccgactccgggctggtcctgaagtccctcgccgaagcctatcccaagggcgcaccgaacatcgaccccggggtccacgaggtggaactcgacggccgcagccagttcgtttccttcaccccggtgaagggactgcccggcgtgacctggtacgtcgccctggtcctcgaccgcgacaccgcctattcgatgctcagcgaattccgcacttcggcgatcgtcgccacgctgatcgcggtggtcggcatcatgcttctcctcggcatgctgatccgcgtactgatgcaaccgctcaccgacatgggccgcgccatgcaggacatcgcccagggtga

SEQ ID NO: 322883 - DNA, 744 bp, Pseudomonas aeruginosa
atgctcgggttgcgcgacgcggtgctcagcggctggttcaaccaggagaccgacgagctgttcagcggctttccgatttccgccgaggacaccgtgctcgacgtggggtgcggcgacggcggcaacgttcatttctgcgccatgcgcggcgctcgcatcatcatcgccgacatcgacgcggaaaagatcgccaggacccgcgagcgcctggccgataccccggcccgcgaactggaatgcctggtcagcgactgcgacccgttgcccctggctgacgccacggccacccgggtggtctccaccgaggtcatcgagcacgtcgacgatccgcggcagttcctcgccgagctggtacgggtcggccagcccggcgcactctatctgctcagcgtgccgcatcccacgtcggaagacctgcagaaagacttcgccgccgacgaatacttccgcaagcccaaccacatccgcgtgctcggcgaggagcagttcgccgcactggtgcgcgaagccggcctggaaatcctcagccacagccgctacggcttctactggtcgctgtggatgctgctgttctgggaggccaaggtcgatttcggcaatcccgaccatcccctcctcgaacactgggccaggacctggcaggcgctgctcgactcgccgcgcggcccggccatcaagcaggccctggacgccgtggtcgccaagagccaggtgatcatcgcgcgcaagcccgcccaggcgtag

SEQ ID NO: 322884 - DNA, 213 bp, Pseudomonas aeruginosa
atgaggacatccccgcacccgcacgccgggagttccagcggtctcccggccgcccatccacatctcgccgccctgctggaaaaattgaattcctggcgacaaaacgctcgatcgcgcaagcatcttgcacaaatgtccgaacacgacctcgccgacctggcgatcagcccgagcgaacgctacgtagagatttcgaaacctttctggcgctga

SEQ ID NO: 322885 - DNA, 318 bp, Pseudomonas aeruginosa
atgaaacgtctgcgcctgatcggtgccgctgccctgctcgcctgcgcctccagcgcgttcgccagcagcttcgtggtcaccacggataccctggtccgcgccaccggcatgacctccaatgccacttcggacatcaccaattccttccgcgacgacaagatcgtcctcgaagcgcgcgacgacgccgccagcttcgtcgccagccagggcgacatccgcggttcgcacctggaagccgcactgcgccacatccgtggcaagctgccgagcctggccgccaacgacatgcaactggcccaggcgatcctgaccatctga

SEQ ID NO: 322886 - DNA, 294 bp, Pseudomonas aeruginosa
atgcgttaccggttctcgttgctcttctgttgcctgctggcgcccgctgcgcacgccttcgataccacgacggcgttcaccgcgaagtccctttacgtcaccagcaagctgaccagcacgccgttcgagaacaaattgttacgcgatgcccggggcgatgcggccagcttcgtcgccagcgatggcagcatccgtggtgcgcgcctggaagcggcgctgcgctggttgcgtgtcgcgcaccccgagctggcggccagcgatcaggaactggccgaagcaattcttgcccaatag

SEQ ID NO: 322887 - DNA, 336 bp, Pseudomonas aeruginosa
atgcgccgtagctccatgcgtcatagccccctgttcgccgccctgctgctggcgctctgcgccacggccgcggaagcacgctcggtggtcgcgaccagcaatatcatcgtccgcgccctcgaccgcagcatcgacttcacttccgacaccaccacttccgtgcgcgacatgaaagtggtcaccgaggcgcgcgacgacgccgccagtttcgtcgccagcgacggcgccattcgcggcgcccagctggaagccgcgatgcggaccctgcgcagccgtctgccggaagcccgggaagcctccgaccaggtacttgccgaagccattctcgccctgtga

SEQ ID NO: 322888 - DNA, 1959 bp, Pseudomonas aeruginosa
gtgaggaaggcctgcgcctggctgctggcgctggccctctgcggagccggcaacgcgacggcggccctgcgcctgaaactcgacgcgcctgaactggaccctgcgcagcgcgaggccagccagcaactcttggacgaagccgcggacaagttgccgccggccttccgcgaacgcctggaccgcgagatcgaggtcgagtggcgcgacgacctgcccgccaacggcatgggccaggcccgtggcccgcagcgcatcgcgctgaaccgcaagtacctggccgatctcaccgacggcagcgccgccagccgccagaccgggcgcgtgcacggcaccgagcggcgcgagctgctggcgaccctgctgcacgagctgacccacgtctacgatcgcgcgcgcctgtggtcggcggaggaaaaacgcgagatccgccgctgcacgcgccaggaagaaaccctcggccggatcgcccagcccaccgattgccgcgggcagagcggtcgccgcttcacgctctccgacgacccgcgcctgctcgatctcgccggctggccgcaacgcgccggccagcgcgggcggcgcgaggcgcacaatggcttcgtactgcgcagcccggacgtctacgagctgagcaatccgcgcgagttcgtcgcggtgaacatggagtacttcctcctcgatcccagctacgcctgccgccgcccggcgctctaccgctactaccagcaacgcttcggctgggcgccggaacacagtgcctgtgcgcagagcttcgcctacctcaacgccggccgcgacttcggccagcagccgctgggccagctcgaccccgagcgggtctacgaggtcgactacctgctggccgaggccaacgacaacctggtcagccgctggggccacaccatgctccgcctggtgatctgcgcccccggccggccgcgtggtccggactgccggctggacctcgaccagcatctcgtgctgtcctaccgcgccttcgtcggcgacctgcaattgtccagctgggacggcctgaccggcgcctatccgtcgcgcctgttcgtcctgccgctgtcgcaggtgatcgaggaatacaccaaggtcgagctgcgcagcctcgcctcggtgccgctgaagctggaccgcgaggaggtcgccagcctggtcgagcgcgccgcgcagagtcactggagctacgacggccagtactacttcatctccaacaattgcgcggtggaaaccctcaagcttctgcgcagcggcatcccccggcgaccgctgcaaagcctggacagcatcaccccctacggcgtgctcgagatgctggagaaccgcaagctggccgatcccagtgtgctcgacgaccccaaggaagccctgcgcctgggctaccgcttcgactccttccgcgaccgctaccaggcgatgttcgacgtgctcaagcagcgcctgcacattccccaggacaaggtcgaggactggctggcgctgccggccagggagcgccagccctggttcgccaaggccgacctgcgcgccagcgcggcgctgctgctgctcgagcaggcctcgctgcggcgccagctgctgctcgcccaggacgagttgaagcgcctgtacctcggccacctggacaagccggccggcgaccagcgcctggaagtggccggcaagaccttccagcagatcctcgacgacagcggcttcctcagtcgtccggcggaactcctggagggcggctacggcctgccgcaggccgccgagtggaagcacctggaagagcagacccgcgaacgccaggcgcgcctgcgccggctcagcgacgacctcgaccgcgaggtccgcgccctgctcgatcccgagcgccgcgccgagctggaagccaacgaggccaacatcaaggaggtcggcgcgcacctgcgcgagctgcacaaggcggccggcgggctgatgctgccctga

SEQ ID NO: 322889 - DNA, 420 bp, Pseudomonas aeruginosa
atgcccgagacccataccggcggttgccattgcggctatctgcgctacgccgtcgccgcgccgctggacgatgtcgctcactgccactgctcgatctgccggcgcaccacaggcggcatcgtcaccacctgggccacggtgccgcgcgcggcgttccgctggctggcgggcgaaccggcggaatatgcctcgtcggccagctgcacgcgctacttctgcccgcgttgcggggccaacctggcgttgttcacccggctcagcgccgataccctggacttcaccgtggccagcctcgaccatcccgagcgcgcccccgccaaccggcacatctgggtcggcagccgcctgccatggctacacctcgacccgcagttgcccgaagaggacgaggagttcatcgccggagcggacgacccgtga

SEQ ID NO: 322890 - DNA, 945 bp, Pseudomonas aeruginosa
atgagcggattccactatccgggggtgcccgtgaccgctctgctctactccctctggccgctgttcgccctcatcgtcggcggttacgccctgcgccgctgggactttcccggcgaagccttctggcctgccgcagaacgcctgaactacttcatcctgtttcccgcgctgctgttcagcaacctggcgaccgcgccgctggacgaccccggcctggcccgccaggccctggccgtactgctcgggctcggcgtcgcctggctcgccctgctgctctgcaagcgctggcgcggctgggacgccgggcgcttcggcgccatcgcccagggcgtattgcgcttcaacacctatctcggcctggccgcggtcggcagcctgtacggcaagccgggcctgaccctggccgcgctgatgctggcgctgatggtgccgacggtgaacgtgatgtcggtctgggcgctgaccgccgagcgcggcatcagcctgcgcgcgctgctgctgccgatcctgaagaacccgctgatcctcgcctgcctcgccggcgcactggtcaacctggccggcgtcggcctgcccggcggcagcgatcgcctgctcaacctgctggcggtggccagcctgccgctgggcctgctgtgcgtcggcgcggcgctgaaaccccaggaactcggcggcgaagtcgcggcccttggctggaactgcgcggcgcggctgctggcgatgcccctgctggccttcgccatcgctcgcgggctgggcctgccgagcatggaaagcgccgtgctggtactgttcttcgccctgccgacggcgcccaccgcctatgtgctgacccgccaactgggcggcgacggccacctgatggcgggcatcattaccttgcaaacgctgctttccggcgccactctggtcggcgtactcctcgtgctgcaaggaagcccatga

SEQ ID NO: 322891 - DNA, 363 bp, Pseudomonas aeruginosa
atgacgacaggacgcgtcgccgccgccctcacggcgctctgcctgctctgccaaccggccttcggtttcatcaaggtgtttcccgaattcgacgacgaacccggcgccgccaccttcttctgggcggccgtcaccaccgtcggcccgttcatcggcagcaccgtcagcgcacaggagtccagcgctgacgagggcgacaagctcgtccaggcgcgggacgacgccgccagcttcgtcgccagcgacggtgcgatccgtggcgcgtacctccaggcagccttgcaggtcctgcgccaggccccggaatacgccgggtacagcgacctgcaactggccgcggcgctcctcgcgcggcagccctga

SEQ ID NO: 322892 - DNA, 1305 bp, Pseudomonas aeruginosa
atgctgaccctgctcgccttcgccatggtggcgaccttcatgttcctgatcatgaccaagcgcctgtccgcgctgatcgcgctgatcctggtcccgatcgccttcgccctgatcggcggtttcgccgccggcctcggcccgatgatgctcgacggcatccgcaccctggcgccgaccggcgtgatgctgatgttcgcgatcctctacttcgccatcatgatcgactccgggctgttcgacccggcggtgcgcaagatcctccggctggtcaagggcgacccgctgaaggtctcgctgggcaccgcggcgctggcgatgatcgtctccctcgacggcgacggctcgaccacctacatgatctgcgtggccgccgtactgccgttgtacagccgcctgggcatgagcccgctggtgatggcctgcctgatcatgctctccagcggcgtgctcaacatgaccccctggggtggccccaccgcccgcgcggcgagtgccctgcacgtcgacccggcggatatcttcgtgccgatgatcccggcgatgatcgccgggctgctggcgatcttcgccatcgcctggatctacggcaagcgcgagcgcgcccgcctcggcgagctgcacctgcccaccgaccatgaggacctggcggagatcagcgtgtcgcagtatccggaggcgcgccggcccaagctgctgtggttcaacgctattctcaccgtggtcctgatggcgaccctgatcgccggcctgctgccgatgccggtgctgttcatgatcgccttcggcatcgccatgatcgtcaactacccgtgcatccaggagcagaagaagcgcatcggcgcacacgccgagaacattctcgcagtggtctcgctgatcttcgccgccggggtgttcaccggcatcctctccggcaccgggatggtcgacgccatgtccaagagcctgctggcggtgatcccgccggcgctgggcccatacctggcgaccatcaccgcgctggtgagcatgccgttcaccttcttcatgtccaacgacgccttctactacggcgtcctgccgatcctcacccaggccgccgccgaatacggcatcaccccggtggaaatggcccgcgcctcgatcgtcggccagccggtgcacctgctcagcccgctggtgccctccacctacctgctggtggggctggccaagatcgacttcggcgaccaccagcgcttcaccctgaaatgggccgtgctggtgtgcctggcaatcctcgccatggccctgctgctgggcctgttccccctgttcagtaactga

SEQ ID NO: 322893 - DNA, 765 bp, Pseudomonas aeruginosa
atggaatggctgaccagcccggaaatctggattgcgttcttcaccctgaccgccctggagatcgtcctcggcatcgacaacatcatcatgatctcgatcctggtcgggcgcatgccgaagcacctgcagccacgcacccgcttcttcggcctggccctggcgatggtgacgcggatcctgctgttgctgtcgatcacctgggtcatgcgcctgaccgccgacctcttccacctgttcggccagggcatctccggacgcgacctgatcctgttcttcggcggcctgttcctgctctggaaaagcagctcggagatctaccagggcctggaaggcgaggaagaaagcggcgatgaaccgaaggggtcggcgggcggcttcatcggcaccatcatccagatcgcgatcatcgacatcgtcttttccctggactcggtgatcaccgccgtcggcatggtctcccacgtgccggtgatggtcgcggcgatcatcgtcgcggtactggtgatgatgctctgcgccggcgccatcagcgacttcatcgacaagcacccgtcgctgaagatgctcgccctgtcgttcctcatcgtggtcggcacggtgctgatcgccgaagccttcgaagtccatgtgccgaagggctacgtctacttcgccatggccttctccctggccgtggaggcgctgaacatccgcatgcgcggcgctgccgcgcgcaagcggggcgaagagccagtgaagctgcgcaaggaagtgctcggcgactga

SEQ ID NO: 322894 - DNA, 615 bp, Pseudomonas aeruginosa
atgatcctgctgcaactctccgcggcccagggcccggcggaatgctgcctggcggtggcgaaggcgttcgagcggctgtgcctcgaggcggcgcaagccggcgtcgaggtcgaggtaatcgaggaggtggccggcgagcgtccgcgcacctggcgttcgctgctcctggggctgcgcggcactgccgccgaagcgctcgccgagcgctggtgcggcggtatccagtggatctgccccagcccctaccgggcaaggcatgcgcgcaagaactggttcatcggcgcggagcgcttcgccgcgccgccggccagtctggagggcgagatccgtttcgagaccctgcgctcttccggccccggcggccagcatgtcaacaccaccgactcggcggtgcgcgccacccacctggccagcggcatcagcgtcagggtgcagagccagcgtagccagcacgccaacaaacgcctggcgatcctgctgatcgcccggcgcctcgcggaccaggcgagcagcgcggccgacgcgctgcgcgcggagcgccgccgggcccacggtcggatcagtcgcggcgcggctcgccgggtattccgcggcgagcgtttcgagccggcctga

SEQ ID NO: 322895 - DNA, 1140 bp, Pseudomonas aeruginosa
atgggcaactacatcaagcctttgtccgcgggcgtcgcactgatcgcctcggacagcacctggatcgaaggcaaggcgatccagcaactgcaaaccaccgccgagctggacggcatgtgccgcgtcgtcggtctcccggacctgcatcccggtcgcggctatccggtcggcgcggcgttcttctccgtcggccgcttctacccggcgctggtcggcaacgacatcggctgtggcatggccctgtgggaaaccggcctggcccccggcaagctgtcggcggacaaactggaaaagcgcctgggcaatctcgacctgccgctggacgagacctggaacgattgcatcgaagccctggagctgccggcccgcgagcactggcgcgcgctcggcacgatcggtggcggcaatcacttcgccgaactacagcaggtcgagacggtgttcgaccaggctgccctgcacgccctcggcctcgatgccgatcgcctgcaactgctggtgcacagcggctcgcgcgggctcggccaggcgatcctgcaagagcatgtcagcctgcacggccacgccggcctgctcgacggcagcctggaagcttccgcctacctggcgcggcacgccgatgcgttgcgcttcgccgagggtaaccgccagctcatcgcccggcgcattctcgaacgcttgcgctgcgacggcctggaactgctcgacgtcaaccacaacctggtggcgccggcacaggtcgatggcgtcgacggctggctgcaccgcaagggcgccaccccggccgaccagggtgtgctggtgatccccggctcgcgcggcgactacagctacctggtggagcccgtgccgagcgcgcagagcctgttctccctggcccacggcgccgggcgcaaatggcagcgcggcgagtgtcgggaacgcctggcggcgcgcttcagcgtcgaccagctgggccgcacgcgccttggtagccgggtgatctgcggcgaccgccagctgatctacgaggaagcgccggaagcctacaagggtatcgactcggtggtcggtgcgctgctcgaagccggcctgctgcgcctggtcgcccgcctgaagccggtgctgacctacaagacccgtggggagtgctgccgatga

SEQ ID NO: 322896 - DNA, 795 bp, Pseudomonas aeruginosa
atgcgattttcggggatcagtggctgcctctcggcagcggtgttggcgctcggggtagggggagcgccggtggttcaggccgatgcgctgggcgatagcctggagcaggcgcacatccgcaaggcgaccttcgccgcgccggcctgggaaggctataccaacgccgacggcagcggtctgtactgggacctgctgaagcaggtctatgcgccctacgggctcgacgtgaaattcatcaacatgccctggaaccgcgccaacaagctgatgaccgcgggctccatggtcgatggcgtgccgggcgagatccccggcgttgagggcaagctgtacgcccagttgccgatcgacatcgagtaccacggcgtgatgcatgcggcgaagacgcccttttccggccgcgccagcctcaccggcaagcgcgtcggctggcgccacagctacaacctgatccccgcggagcagcgcgacttcaccctggtcgagtgcgtccgccccgagcgttgcaccgagcaggtccagaacggcgagctggatttcttcctcgacgagccggacgaactggaaaagcagcgcagcgaagcgcatctgccggccgacgcctacccgatcgcgcaactgccgcccggcaaggagtccttcatgaccttcgccgacagcgccagcggccggctcctgcgcgaggtctacgacgcgcgggtacggcagatggcggcgtccggcgagctgcgggcgctctaccagcgctggaacagcgaggtgcccggcgccgtgcaggctctttcggcgcagtga

SEQ ID NO: 322897 - DNA, 1749 bp, Pseudomonas aeruginosa
atgctgaaactgctcgacctgctctctgccgtcgccctgctggtgtggggcacgcatatcgtccgcaccggaatcctccgggtctacggcgccgacctgcggcgcatcctcagtcgcagcgtggaaaaacgcccgctggcgttcgccgccggcatcggcgtcaccgccctggtgcaaagcagcaacgccaccgccctgctggccacctccttcgtcgcccagggcctgatggcactggcgccggcactggcgatcatgctcggcgccgatgtcggcaccgcgctgatggcgcgggtgctgaccctcgacctgtcgtggctttcgccattgctgatcttcttcggcgtgattttcttcctcagccgcaaacagacccgcctcggccagctcggccgggtattcatcggcctcggcctgatcatcctggcgctccagctgatcgtcgccgccgccgagccgatgacccaagccaagggcgtcaaggtactgttttccagcctgaccggcgacatcatgctcgacgcgctgaccggcgcgttgttcgccatgatttcctattccagcctggccgccgtgctgcttaccgcgaccctcgccgcgtccaaggtgatctcgctgaaagtcgcgctgtgcctggtggtcggcgccaacctcggcagcggcatcctggccatgctcagcgccaccgcgcaaaacgccgccggtcgccgggtggccctcggcagcctgttgttcaaggtcgccggctgcctgctggtgctgcccctggtggggccgctggcggactggatggatcattggcagttcagcacagccgaactggtgatcgccttccacgtgctctacaacgccgcgcgctgcctcgcctgcctgccgctgaccaacgccatggccagcttctgcacccgtgtgatgcccgaccgtgcccttcccgacgacgtcgcccggccgcgccatctcgaccccgccgccctcgacacgccgagcctggcgctggccaacgcggtgcgcgagaccctgcgcatgggcgacaccgtcgagcagatgctgaacaatctgatgcagatcatccgcggcggcgatccgctgctcggcaaggacatccgcaagctcgacgacgacgtcgacgccctctacaccgcgatcaagctgtatctggcaaggatgccgcgcgaggacctgtccgaacgcgacagccggcgctgggcggagatcatcgagctggcgatcaacctggagcaggccggcgacatcatcgagcacatgctcgccgccgtgcaggacaagaagacctcgcgcagccgctcgttctccgacaccggcctggaagagatcggcaccctgtaccagcagttggtctccaacctgcgcctgggtctctcggtgttcctcaacggcgacctcgacagcgccaagcgcctgcgccgggccaagcagcgcttccgtctgcaggaacggcgctacgcccatgcccatgtcgaccgcctgcaccagcaggtggtacagagcatcgagaccagctcgctgcacctggacctgatcagcgacatgaagcgtctcaactcgctgttctgcgccatcgcctacgctgtgctggacaatccagacgcgccgagcagcgcggccgacgagggcactcggcgggacgaggacgactgggccgacgaagtcgacgacatgacctcggcgccgctggccgagccagcgctcgccgaggagcgagcggaaacgcgccgttcgcgacattag

SEQ ID NO: 322898 - DNA, 1374 bp, Pseudomonas aeruginosa
atgcgttcgttgtccaccctgctgctgttctgcctgctctgcccctggtcgtacgccgaccagcgcagcgaggtcgaagccttccagctggaaaacggcatgggcgtgctgctcaagcccaccgagcagcgccggcacgtctcgatccggctggtggtgggggtcggtttcgccgacttctcgtgccgtgaaaagcagctgccgcacctgctcgagcacctgttcttcagcggcctggacggcggcgacgaggccgacctggaagcccgcatgcaggccctcggcgggcaatggaacgcctataccagcgaaggcgacaccaccttcgtcatcgaggcgcctgccgccacccagcggcaggtcctcgacctgttgctggacaccatcacccgcaccgaactggacgagccgcgcatcgccgccgccaagcgggtgatcgagcgcgaaggcggtggccattactcgcacctgcagcgctggctcgaccgcgagaacctgggccgtggcgccatggaccaactggcggtggaactgggcctggcctgctcccagcgcgcgccgctggcgccgcttggcgcggagcagctggagcggctgcgcagcgactggtacgtaccgggcaacatgaccctgatcctggtcggtgacctcgacccgcgcctgccggcctatctgacccggaccttcggcaccctggaagaccacgagctccccgagcgccgcgagctgccggcggccaacgggcatgccgaggccaggcgcaccctgatcacccggccattcggcgagggtgcgatgctgcactggatctatccggagccggacgacgccgacccggacgccatggtcctgctccaggcctatatgaacgacgcgctgtacgccgacctgcgtgtgcgtcgcggactcacctacgggccatcgaccgatcgccaggtgttcgccaaccagggcttcttcagcctcgacgcggatgtcgagcgcagcgacctacccgccaccgaggccgccctgcgcgagttgctcgacggcatccgccagcatggcctggacccggtgcgtttcaagcgggtgcaattcgccgagcgcgccaggctggcctggagcacccagggcaacgcggcgctggcggactattactggggctcgctggccgactacgaggacggccatttccccaatgaggagcgccgcctggcgaaggtcagcctgcaacaggcgaacgcgctggcgaagcggctgttcgacggcgaaggctacctgcgcatcgaaaagccgctgttcgacgacgacatgctctacccattgctgctcgccgccggtctcctggccagcggcctgctctggttcggcctgcgccgccggcgcgcctga

SEQ ID NO: 322899 - DNA, 561 bp, Pseudomonas aeruginosa
atgtccaatgtacaaaatgccagccggtcttccgcgttcgcggcggtagagggcgaccattgggtcgagtccctcgacgatggccgccacgtgctgatccgtcccctgcgcgaggaggaccgggagcgcgaacgccagttcatcaaccggctgtccccggcgacccgccacttccgcttcctcggcgagatcaaggaagccagcccggcgctgctcgaccaactgatggacatcgactaccagcagagcatggccttcgttgccctggtgcacgaggacggtgagctgcgcgaggtcggtatcagccgctacgccgcctgctgcgaggaagggcagtgcgaatgcgcggtaaccatcgccgacgactaccagggactgggcctcgacgccgtgctgatgcgccatctgatcgacgtggcgcggcgcaacggcttccgccagatgtattcggtggactcggcggccaaccgggcgatgcgcgacctgtgttgcgcactgggcttcgtcggccagcgcgacccggacgactcgacccaggtcatccaccgcctggccctgtag

SEQ ID NO: 322900 - DNA, 1290 bp, Pseudomonas aeruginosa
atggcctctaataaatccaaaggtgtcgccattttccgtgtggtcagtggcaacttcctcgagatgtacgacttcatggtgtatggcttctacgccaccgccatcgccaagaccttcttccccggcgacaacccgttcgcctccctgatgctgtccctcgccacctttggcgccggcttcctgatgcggccgctgggtgcggtgttcctgggcgcctacatcgatcgccacggccgccgccagggcctgatcatcaccctcggcctgatggccatgggcaccctgctgatcgccttcgttcccggctatgccacgctgggcgtggcggcgccgttgctggtgctgttcggccggctcctgcagggtttttccgccggcgtcgagctgggaggggtttcggtctacctgtcggagatcgccacgccaggacgcaaaggcttcttcgtcagttggcagtcggccagccagcaggtcgcggtggtcttcgccggcctgctcggcgtgctcctcaaccagtggctgagcccgcaggacatgggcgaatggggctggcgcgtgccgttcttcatcggctgcctgatcgttccggcgctgttcgtcatccgtcgctcgctggaggaaacgccggagttcgaggcgcgcacccaccgaccgtcgctgtcgcaggtgctgcgctccatcgggcagaacttcggcatagtgctggccggtaccgcgatggtggtgatgaccaccgtatcgttctacctgatcaccgcctacacgccgaccttcggcaagaacgaactgcaactgtcggacctcgacagcctgctggtgaccatgtgcatcggcctgtccaacttcatctggctgccggtaatgggcgcgttctccgaccgcatcgggcgcaagccattgttgctgggtgcctccgcgctggcactgctgaccgcctacccggcgctgtcctggctggtccgcgagccgagtttcgccggcctgctcggcgtcgagttgtggctgtcgttcctctacagcagctacaacggcgcgatggtggtggcgttgaccgaggtgatgccggcggacgtgcgcaccaccggtttctccctcgcctacagcctggctacggcgaccttcggtggtttcaccccggcggtctgcacctggctgatccacaccctggacaaccgcgcggccccgggcatctggctcagtggcgcggcgctgctggggctgctcgccaccctggtgctgttccgccggcgcggcaaggagatcgccgaggccgagctggccaacgcctga

SEQ ID NO: 322901 - DNA, 1041 bp, Pseudomonas aeruginosa
atgcccaaccaacaacgccccatcctcaaggcccgcctggagcaactgatcgccctggtcggcggcctgatggcccgctatccgcgcaccatcgccctgttcggcttctgttcgggcgtgttcagtttcatcatggtcgaccggcagaagggcttcgcccaggtgctggcgatcatcatgctggtcagttgggtctggttgatcctcgagaacctcctgcgggagaccttcgcccgccgcttcggctgggagatcccggcaccgctgctgcgctacgcgacccaactgatccaccaggaaagcctgttcttcgtcctcccgttcttcctcatcaccaccacctggaacagcggccaggcgctgttcacagggacgctggccgccgcggcactgatctccatcaccgatccgctctactatcgctggctgtccaggcgtcgttgggtgttcctcgcctaccacaccctgaccctgttcgcggtgttgctgacctcgctgccgatcctgctgcacctgaccaccccggaaagctaccggttgtcgctgggcatcgccgtcgtgctgtccttccccagcctgctcgtgaccttcccgctacagcactggtggcgcggcttcctgcttctcggcctgaccctggcggtgggcctggccggatggttcggccgcacctgggtaccgccggccaccctgtggctgaccgaagtggcggtgagcagccagttcgacgaccagagccgcacgcccggcgacagcctggagcaggtcggcgccgcccagttgcgcagccagggcctgttcgcctataccgcgatcaacgcgccgcgcggcctcgacgagcgcatctatcacgtgtggatgttcaacgggaaggagttcgaccgcatcgccctggatatccacggcggccgcaaggagggctaccgggcctggacccacaagcagaacttccccggcgacccggtcggccactggcaggtgaaggtactcaccgaggccggacagatgatcggcaccctgcgcttcgacgtcacccagtga

SEQ ID NO: 322902 - DNA, 1230 bp, Pseudomonas aeruginosa
atgctgaacggcttgtggttgggttttttcctggtggcggcggcgagtgcgctggcgcgctggttgatcggcggcgatgcgacggtgttcgcggcgatggtggagagcctgttcgccatggccaagctggcggtcgaggtgatggtcctgctgttcggcaccctgacgctctggctcggcttcctgcgcatcgccgagaaggccgggctggtggagcgcctggcggtgctgctcggtccgttgttccgccggctgatgccggaagtgccgccggggcatccggcgatcggcctgatcaccctgaacttcgccgccaatggcctgggtctggacaacgccgccacgccgatcggcctgaaggcgatgaaggcgttgcaggagctcaatcccagcagcaccaccgcgagcaatgcgcagatcctcttcctggtgctcaacgcctcgtccctgaccctgctgccggtgactatcttcatgtaccgcgcgcagcagggcgcggccgatccgaccctggtattcctgccgatcctcctggccaccagcgcctcgaccctggccggcctgctgtcggtggcgctgatgcagcgcctgcgcttgtgggacccggtggtgctggcctacctgatccccggcgcgttgctgctggccggcttcatggcggtgctcggcacgctctcggccaccgcgctggcgcagctgtcctcgctgctgggcaacctgacgctgttcagcctgatcgtgctgttcctgatcgtcggcgcgctgaagaaggtgccggtctacgagagcttcgtggagggggcgaaggaaggtttcgacgtcgccaggaacctgttgccgtacctggtcgcaatgctttgcgcggttggcgtgttgcgcgcctccggggcgctggaagtggtactcggcgggatacgctgggcggtcgaggggctgggttgggacagccgcttcgtcgaagcgctgcccaccgcgctggtcaagccgttctccggcagcgcggcgcgggcgatgctgctggagaccatgcagacccacggcgtcgacagtttcccggcgctggtcgccgccaccgtgcagggcagtaccgagaccaccttctacgtgctcgccgtctatttcggctcggtcggcctgcagcgcgcgcgccacgcggtgggctgcgcgctgaccgcggacctggccggggtcatcgcctccatcggcgtgtgctactggttcttcgcctga

SEQ ID NO: 322903 - DNA, 1335 bp, Pseudomonas aeruginosa
atgggtaaagccaagctaagcctcgcctggcagatcgtgatcggtctggcactcggtatcgccgtcggcgcagtgctcaaccatttcagcgccgaaaaggcctggtggatcgccaacgtgctgcaaccggccggcgacatcttcatccgtctgatcaagatgatcgtggtgccgatcgtgatttcctcgctggtggtcggcatcgccggcgtcggcgacgcgaagaagcttggccgcatcggcctgaagaccatcatctacttcgagatcgtcaccaccgtcgccatcgtcgtcggcctgctgctggccaacctgttccagcccggcaccggcatcgacatgagcaccctgggtaccgtggacatttcccagtaccagaagaccacccaggaagtgcagcatgaccatgcgttcatcgcgaccatcctcaacctgattccctccaacgtcttcgccgccatcgcccgtggcgagatgctgccgatcatcttcttctcggtgatgttcggcctcggcctgtcgagcctgcccaacgacctgcgcgagccgctggtgaaggtgttccagggcgtttccgagaccatgttcaaggtcacccacatgatcatgaagtacgcccctatcggtgtattcgccctgatcgcggtgaccgtcgccaacttcggcttcgcctcgctgctgccgctggccaagctggtgatcctggtctacgtggccatcgtcttcttcgccctggtggtgctgggcctgatcgcgcggatgttcggcttctcgatcatgcgcctgatccgcatcttcaaggacgacctggtcctcgcctattccaccgccagctcggaaaccgtgctgccgcgcatcatcgagaaaatggaagcctacggcgcgccgaaggcgatcagcagcttcgtggtgcccaccggctactccttcaacctcgatggctcgaccctgtaccagagcatcgcggcgatcttcatcgcgcagctctacggcatcgacctgtccatcggccagcagatcatgctggtgctgaccctgatggtgacctccaagggtatcgccggcgtgccgggcgtatccttcgtggtgctgctcgccaccctgggcagcgtcggcatcccgctcgagggcctggccttcatcgccggcgtggaccgcatcatggacatggcgcgcaccgccctcaacgtgatcggcaatgccctcgcggtgctggtcatctccaagtgggaaggcatgtacgacgcggccaagggccagcgctactgggattcgctgccgcacctgcggcaggcggtcggcgaagccaagggcaagcaggccaccctcgaataa

SEQ ID NO: 322904 - DNA, 468 bp, Pseudomonas aeruginosa
atgcgactcatgcgtaacctgatgaacgcactgctgctcggtgccgccgccagttcgctggcggtggcggccgacagggacggcgaataccgcttgaacgaactgcagagcaccgatgccggataccgcaaggcctggcagaacctggtggaagacgagagccgcttgcccgactgggtgatgaatctctcgggaaccgctacgccgatgcatgccgtcgacgaccagggcgacaagtatctggttggcggtctctgcgagaagtccgattgcaagggccagcgcctgctggtcgccttcgattgggacaagagtcatgcctacgggctctacgtgcaggtgcccgaagggctgccgcaggacaagtcgccgagcaagcacgccagcttccgctggctgggcaagccggaaccggcggtacagaagatcctcgacgaacaactcaaggccgatccgaactggtactga

SEQ ID NO: 322905 - DNA, 162 bp, Pseudomonas aeruginosa
atgcttagttgggctatcacctttctgatcatcgccatcatcgctgccgtcctcgggtttggtggcatcgcaggtgccgccaccggaatcgcgaagatcctcttcgtgctgttcctggtgctcttcgtggtctcgttcttcttcggacgccgtcgcggctag

SEQ ID NO: 322906 - DNA, 1350 bp, Pseudomonas aeruginosa
atggaaaccacttccgaaaaacaggggcgcatcctgctggtcgatgacgagtcggcgatcctgcgcactttccgttattgcctcgaagacgaaggctacagcgtggccaccgccagcagcgcgccgcaggcggaggccctgttgcagcgccaggtattcgacctgtgcttcctcgacctgcgcctgggcgaagacaacgggctcgacgttctcgcccagatgcgcgtccaggcgccatggatgcgcgtggtgatcgtcaccgcgcattcggcggtggataccgcggtcgacgccatgcaggccggcgcggtggattacctggtcaagccctgcagcccggaccaactgcgcctggccgccgccaagcaactggaggtgcgccaactgaccgcgcgcctggaggccctggaggacgaagtgcgccgccagggcgacggcctggaatcgcacagcccggccatggccgcggtactggagaccgcgcgccaggtcgcggcgaccgacgccaacatcctcatcctcggcgaatccggctccggcaagggcgaactggcacgcgccatccacacctggagcaaacgcgcgaagaagccccaggtcaccatcaactgcccgtcgctgaccgccgaactgatggaaagcgaactgttcgggcacagtcgcggcgccttcaccggtgccaccgaaagcaccctgggcagggtcagccaggctgacggcggcaccctgttcctcgacgagatcggcgacttcccgctgaccttgcaacccaagctgctgcgcttcatccaggacaaggaatacgaacgcgtcggcgatccggtgacccgccgcgccgacgtacgcatccttgccgcgaccaaccgcgacctgggcgcgatggtcgcccagggccagttccgcgaggacctgctctaccgcctcaacgtgatcgtgctcaacctgcctcccctgcgcgaacgcgccgaggatatcctcggcctggccgaacgtttcctcgcccgcttcgtcaaggactacggccgccccgcccgcggcttcagcgaagccgcccgcgaggccatgcggcaatacccctggccgggcaacgtacgcgagctacgcaacgtgatcgaacgcgccagcatcatctgcaaccaggaactggtggatgtcgaccacctcggtttcagcgctgcgcaatctgccagcagcgcgccgcggatcggcgaatcgctgagcctggaagacctggagaaagcccatatcacggcggtgatggcctccagcgcgaccctcgaccaggccgccaagaccctcggtatcgatgcctcgaccctgtaccggaagcgcaagcagtacggcctatga

SEQ ID NO: 322907 - DNA, 1788 bp, Pseudomonas aeruginosa
atgagcatgccgctgccgatgaagctccggacccggttgttcctcagcatttccgcgctgatcaccgtctcgctgttcggcctgctgctcgggctgttcagcgtgatgcagctcggccgcgcccaggaacaacggatgtcgcaccactacgcgaccatcgaggtgagccagcaactgcgccagttgctcggcgaccagttggtcatactgctccgcgaaacccccgacgggcaggccctggagcgctcgcaaaacgacttccgacgagtcctggaacagggccgggcgaataccgtcgacagcgccgagcaggccgccctggatggcgtccgcgacgcctacctgcaactgcaggcgcacaccccggccctgctcgaagcgcccatggccgacaacgacggcttcagcgaagccttcaatggcctgcgcctgcgcctgcaggacctgcagcaactggcgctggccggcatcagcgaagccgagaccagcgcccgccatcgtgcctacctggtcgccggcctgcttggcctggtgggcgtcgccatcctgctgatcggtttcgtcactgcccacagcatcgcccggcgcttcggcgcgccgatcgaaaccctggcgcgggcggcggacaggatcggcgaaggcgatttcgacgtgaccctgccgatgaccaacgtcgccgaggtcggccagttgacccggcgtttcggcctgatggccgaggccctgcggcagtatcgcaagaccagcgtcgaagaggtgctttccggcgagcggcgcctgcaggcggtactcgacagcatcgacgacggcctggtgatcttcgacaaccagggacgcatcgaacacgccaacccggtcgcgatccgccagctgttcgtctccaacgacccccatggcaagcggatcgacgaaatactcagcgatgtcgatgtccaggaagcggtggaaaaggccctgctcggcgaagtccaggacgaggcgatgcccgacctggtggtggacgtcgccggcgagtcgcgcctgctggcctggtcgctgtatccggtcacccatcccggcgggcatagcgtcggcgcggtgctggtggtccgtgacgtgaccgagcagcgcgccttcgaacgggtccgcagcgaattcgtcctgcgcgcctcccacgaactgcgcacgccggtgaccggcatgcagatggccttcagcctgctccgcgaacgcctggacttccccgcggagtcgcgggaagcggacctgatccagacggtggacgaagagatgtcgcggctggtcctgctgatcaacgacctgttgaacttctcgcgctaccagaccggcatgcagaagctcgaactggcttcctgcgacctcgtcgacctgctcacccaggcgcagcagcgtttcattcccaagggcgaggcccgccgggtctcgctgcaactggagctgggcgatgagctgccgcgcctgcagctcgatcgcctgcagatcgagcgggtgatcgacaacctgctggaaaacgccctgcgccatagcagcgaaggcgggcagatccacctgcaggcccggcgccagggcgaccgggtgctgatcgcggtggaagacaatggcgaaggcattcccttcagccagcaaggacggatcttcgagcctttcgtccaggtcggacgcaagaagggcggcgccggcctcggcctggcgctgtgcaaggaaatcatccagctgcatggcgggcgcatcgcggtgcgctcgcaaccgggccagggcgcgcgcttctacatgctgctgccggtgtga

SEQ ID NO: 322908 - DNA, 780 bp, Pseudomonas aeruginosa
atgcgttcgttcgttctactggctttcaccctgtcgctgctggccggctgctccagcggcccgcgcctgaacaccgactacacctcggcgaaccaggacagccgcgtccagttcatcgtcctccactacacctccaccgatctgccgcattcgctgggcatcctcacccacggcggcgtcagcgcgcactacctgatcggcgacgacgagccggccaccgtctaccgcctggtggatgagaaccgccgcgcctggcacgccggggtcagtgaatggcagggccggacctggctgaacgccacctcgatcggcatcgagatcgtcaaccagggctatcgcgatacaccccaggggcgggtctggtatccgttcagcgaagcgcagatccaggcgctgatccccctgctgaaggacatcgccaagcgccacggcatcaccccggaccggatcatcggacacagcgatatcgcgccgggccgcaaggtcgatccgggtccgctgttcccctggaagcgcctcgccgacgccggcctggtgccctggccgaagcccggcgaattggcgcgccggctcgccgaactgaacggccagctgccggatgtgcgctggttccagcagcagttggcgcggcacggttacctggtgccgcagaccggcgagctggagaaggacacccgcgacgtcatcggcgctttccagatgaaataccgtccggcccgcttcgatggcgagccggacctggaaaccgccgccctgctgctggcggtgccgacttcctga

SEQ ID NO: 322909 - DNA, 594 bp, Pseudomonas aeruginosa
atggatatgttcggcgtcgccgtcctgatctttctggtcaccgaccccttcggcaacatcgccgtgttcctcgccgcgctgaaaggcgtcgcacctgggcgccgcctgcgcgtggcgtttcgcgagctggctttcgccctgggcctgctgctgctcttcctcaccctcggcgagcacatcctcagcggcctcggcctgtcccgcgaggcgaccgggatcgcgggtggcatcatcctgttcgtgatcgccatgcgcctgatcttcccgtcgccccaagggctgctcggcgaagtgcccgacggcgagccgctgctggtacccctggccaccccggcggtggccgggccctcggcgctggcgatgctgatcaccctgcgcaccaccttcgacggtccgctgtgggagctttacctggcggtggtgctggcctgggccgctactgcgctgatcctgctgcaggcggcgttcctccagcgtttcctcggcccgcgcgggctgaccgccatcgagcggctggccggcatgctgctgatcatgctcagcgtcgatatgctgttggacaacctgcgcagcgtgttgcacatcgccgcctga

SEQ ID NO: 322910 - DNA, 2016 bp, Pseudomonas aeruginosa
atgagtcgcgacgacgtccagcgctggaaagacaagtacctggagaacatcgagcagcaggagcgcctgcaacggcgctgggatgcccggatcgacctgctgcgtcgcggcctggtgcgtagcagtctggcggccgaaggcagcgacaaggcggtcgaccagtgcatgaaggagctgcgcgagatcctccgtcgcgacgacatggacgccggcctgtcgggcctgattccgcgcctggaaaaggccgtgctcgactccgaacagcgccgccagcaacgcacccagcagaacatcgatgctctcggcgaactggcccagcagttgctggccctggacctgccgcgggaactgcgcaagccgctgaagcagttcgcccgcgatatcgaggagcgcgcccggcagtcgcgcgagattccgatcctgctcagcgagctgagcaggctgcaacgccaggcgctggccgagcgcaagggcggcgatgccgaagacggtcgcccgagcctgttgcaacgcctgttcggcggcaaggagtcggaaaccaccgcggagccgagcgcatcggtgccgtccgttgtggcggcaagcaatacaccgatccaaccggcggcggccgcgccgtccctgccggtcgccgagcacgacgaggcgccaggcggtccgccgcagccgttgcccgcccgcacggtcgccgccatcgaaagcgcgccagcgggttgggtcggggtcgccgagcgtggcgagccgaaccagatcctgctggatgagccccgggaaatctggctcgacagcctgccgctaccggccggcctgagctttagcgagacgctggaagaagcgggtgcggagccgtcgcccgcaatgccggcggacgttgaaagcgcgcccgaagctccggccactcctgtggataacctcgacgggcaggcggtagacgaggcctacgaactgccgccgccgataccggagcccggctacagcgcggtggcgccgcacatcgaggccagcctgctgcggctgctcgacggcctgtccctgccgagcagccaccagccccaggccgaggcgctgcgggagcggatcgatggcagcctgaactggtatgagctggtgccggtactcgacgacctggcggtgctggtgctgtccctggcggacagtggccagcgcgacttcgaggaatacctgcggcaactcaacgagcgcctggaaagcttcctcggccacctgggcgacgcccacgccggctataccgacgtgctggacaacgcgcgcggcttcgaccaatcgctgcgtgagcaggtcagtggcctgcaggccagcgtgcagcaggcgaccgacctgaacagcctcaagctggcggtggacagccggctgaacggcctgcttgcctccatggacgaacaccagcgcgaacaggccgagcacgaacaggaggtgtccggccgcctgcaggcgctgatggagcgggtcaacagcatggagcaggatgccaaggcgttccacagccacctggaggaccagcgacagaaagccctgaccgatccgctgaccggcctgcccaaccgcgcggcgctcagcgagcgcctggaacaggaagtggcgcgccggcaccgggacggcggcgatctgctgctggcggtgctggacatcgaccacttcaagcggatcaacgacgacttcggccacctggccggggacaaggtgctgaagatcattgccggcgaattgcgcaaacggttgcggcaggccgatttcatcgcccgtttcggcggcgaggagttcgtcgtcctgctcccggccacgtccctggaagccggccggcaactgctcgaacggctgcgcgcggcgatcgccgcctgtccgttccatttcaagggcgagcccctgagcatcacctgttccgccggcatcaccgcgttcgaaggcaacgaggccggcgaagcggttttcgagcgtgccgaccaggcgctgtatcgagccaagcgcgccggccgggaccgcctggaagtggcctga

SEQ ID NO: 322911 - DNA, 879 bp, Pseudomonas aeruginosa
atgttgcgccgctggcagcgtgaacctcgggtcgcaggtagctgcgacccgcgagtgaacccctcctgtgacgattcgcgggagctgcccgacgacggccgcctgcgccttctcagcttcaacatccaggtcggtatcagcaccgagcgctaccgccactacctgacccgcggttggcagcacctgctgccccacgcggggcgggcgaccaacctgaagcggatcggcgaactgctcgccgactacgacctcgtcgccctccaggaagccgacggcggcagcctgcgttccggctacgtcaatcaggtcgagcacttggcccagttgggggcgttcccctactggtaccagcagctcaaccgcaacctcgggcgtatcgcccagcacagcaacggcctgctcagccgctggcggccgaccctgctggaagatcatccgttgcccggtccgccgggacgcggcgcgatcttcgtgcgctttggcgaaggcgccgacgcgctggtggtagtgatgatgcatctcgctctcggcgctcgcacccgcacccgccagctcgcctatatccgcgagctgatcggcgactaccgccaccaggtgctgatgggcgacatgaacacccacgccgtcgatcttctggaaaactcgcccctgcgcgacctcggcctgatggcgccgcaggtcgaggcgacgtttcccagctggcggccgcagcgcaatctcgatcatatcctgctcagttccgatctcgctctcgagcgggtcgacgtgctcgaccagccgatctccgaccatctgccggtatcggtggagattcgcctgccggacaacctgcgcgacaaggccttggtcgtgcgcggggatgccgggagtccgccatga

SEQ ID NO: 322912 - DNA, 636 bp, Pseudomonas aeruginosa
atgcgtaacctgattctcaccgccatgctggccatggccagcctgttcggcatggccgcccaggccgacgactataccgccggcaaggaatacgtcgagctgagcagcccggtgccggtgtcccagccgggcaagatcgaagtggtggaactgttctggtatggctgcccgcattgctacgcgttcgagccgaccatcgtgccgtggagcgagaagctgccggcagatgtccatttcgtgcgcctgcctgccctgttcggcggtatctggaacgtccatgggcagatgttcctgaccctggaaagcatgggtgtcgagcatgacgtacacaacgccgtgttcgaggcgatccacaaggagcacaagaagctcgccactccggaagaaatggccgatttcctcgccggcaagggcgtggacaaggaaaaattcctgagcacctataattcctttgccatcaagggccagatggaaaaggccaagaagctggcgatggcctaccaggtcaccggcgtaccgaccatggtggtcaatggcaaataccgcttcgacatcggctccgccggtggtccggaggaaaccctcaagctggccgactacctgatcgagaaagagcgcgcagcggccaagaagtag

SEQ ID NO: 322913 - DNA, 606 bp, Pseudomonas aeruginosa
atgaacaaacttctcgtgagtctgctgttgaccctgggtctgaccggccttgcccatgccgctggcgatgccgccgcgggccaggcgaaagccgcggtgtgcggcgcctgtcacggtgcggatggcaacagcccggcgccgaacttcccgaaactggccggccagggcgagcgttacctgctcaagcagatgcatgacatcaaggacggcaagcgtaccgtgctggaaatgaccgggctgctgaccaacctcagcgaccaggacctggccgacatcgccgcctacttcgccagccagaagatgagcgtcggcatggccgatccgaacctggtggcccagggcgaagcgctgttccgcggcggcaagatcgccgaaggcatgccggcctgcaccggttgccattccccgagcggcgtcggcatcgcaaccgccggtttcccgcacctgggcggccagcacgcgacctacgtggccaagcagctgaccgacttccgcgaaggtacccgcaccaacgacggcgacaccaagatcatgcagtccatcgccgccaagctgtcgaacaaggacatcgccgcgatttccagctacatccagggtctgcactga

SEQ ID NO: 322914 - DNA, 294 bp, Pseudomonas aeruginosa
atgaagaaactgctgctcgcagcgacagtcgttgcggtggccgttacggcgcaggcggcgcaggacccggaagcagtgttcaaccggacctgtggcgcgtgtcacgacggccagctgccgatggcgccgaaaaagggcgaccatgccgcctgggagccgcggctggccaagggcatgccgaccctggtccagcatgtgaccaacggattcaacgccatgccgccccgcggcctgtgcaccgactgcagtgccgaagactaccaggcaaccatccagtggatggtgaagaagtag

SEQ ID NO: 322915 - DNA, 648 bp, Pseudomonas aeruginosa
atgtcagagaagaaccccatcgtcggcctgtgccagaaggccagctttctcatcagtgccgcccaggtcgaccagtgcccccccgacgagggcctggaagtcgctttcgccgggcgctccaatgccggcaagtcgagcgcgctgaacaccctcacccacgccaacctggcgcgcacctcgaaaaccccgggacgtacccaactgctcaatttcttcgccctggacgactcgcggcgcctggtggacctgcccggctacggctacgcgaaggtgccgatccccctgaagcagcactggcagcgccacctggaagcctacctgagcagccgcgcaagcctggccggggtgttcctgatgatggacatccgccacccgctcaccgacttcgaccgactgatgctggattgggcacaggccagccagctgccgatccatgtgctgatgaccaaggccgacaagctggccttcggcgcggccaagaacgccctgctcaaggtacgccgggaagtccagcaaggctggggcgacgtcgccaccctgcaactgttctccgcgcccaagcgccagggcatcgacgaggcgcaaatggtcctggcgcaatggctgggcctgctggacgaggaacaagaggcgttcgaggaagcctga

SEQ ID NO: 322916 - DNA, 2742 bp, Pseudomonas aeruginosa
atgagccaagcgcccctcgtcctggtggacggttcctcgtacctgtaccgcgccttccatgccctgccgccgctgaccacctcgaccggcaagcccaccggtgcggtgaagggcgtgctgaacatgctcctgagcctgcgcaagcagtacccggacagcccgttcgcggtggtcttcgacgccaagggcccgaccttccgcgacgagctgttcgccgagtacaaggccaaccggccgtcgatgcccgacgacctgcgggtccaggtcgagccgctgcatgccagcgtccgcgccctcggcctgccgctgctgtgcgtggagggggtcgaggccgacgacgtgatcggcaccctggcgcgcagcagcgccgcggctgaccgcccggtggtgatttccaccggcgacaaggacatggcgcaactggtcgacgggcacattacgctggtcaacaccatgaccggtagccgcctcgacgtggatggcgtgaaagagaaattcggcgtcggtcctgagctgatcatcgatttcctcgccctgatgggcgacaaggtcgacaacatccccggcgttccgggtgtcggcgagaaaaccgcgctgggcctgctgaccggtgtcggtggcggcctggaggtgctctacgccagcctggacaaggtgcccgagctaccgatccgcggcgccaagggcttgccggcgaagctcgaggaaaatcgcgagcaggcgttcctgtcctatcaactggcgaccatcaagaccgacgtcgaactggacgtggagatcgacaagctgtatcccggcgagccgcagcgcgaagcgctgatcgccctgtaccgcgagctggagttcaagaactggctggacgacctcctgcgcgaggccaaggaggccggcgagaacggcgaggcggaaacgcctatccaggccgaggtcgactacgacgtggtgctcgaccaggccggattcgacgcctggctgaagaagctggaggaggccgagctgatcgccttcgataccgagaccaccagcatcgacgcccagcaggcgcaggtggtgggggtgtccttcgccgtgaaggagggcgaggccgcctacgtgccgctggcccacagctacatgggcgttcccgagcaactggaccgtgacgcggtgctgcgtgcgttgaaaccgctgctggaggatccgaagaagctcaaggtcggccagcatgccaagtacgacatcaatgtcctggccaatgccagcacccccatcgcgctgcggggcgtagcctacgacaccatgctcgagtcctatgtgctggactccaccgccactcgccacgacatggacagcctggccctgaagtacctcggccacagcaccatccgtttcgaggacatcgccggcaagggcgccaagcaactgaccttcgaccagatcgccatcgaacaggccgggccctatgcggcggaggacgccgacgtgaccctgcgcctgcaccaggccctgtggcagaagctggaggcgatcccgtccctggccagggtcctgaccgacatcgagatgccgttggtaccggtgctggcgcggatcgagcgcaacggcgcgctggtcgacgccaacctgctgggcatccagagccgcgaactgggcgagaagatggtcgccctggagcgccaggcatacgacctggcagggcaggaattcaacctcggctcgcccaagcagctcggcgcgatcctctacgacaagctcggcctgccggttctgagcaagaccgcgaccgggcagccgtccaccgccgaggcagtgctcgccgaactggccgagcaggacttcgagctgcccaaggtgatcatgcagtaccgctccatgagcaagctcaagagcacctacaccgaccgcctgcccgagcagatcaacccgcgtaccggacgcatccatacctcataccaccaggcggtggcggctaccgggcggctgtcgtcgagcgacccgaacctgcagaacatcccgatccgtaccgcggagggccggcgcatccgccaggcgttcgtcgcgccgcagggctacaagctattggccgcggactactcgcagatcgagctgcggatcatggcccacctggccaaggacgatggcctgctggatgccttccgccacgacctggacgtacaccgcgccaccgcggcggaagtcttcggcgtgccgctggaagacgtcagcggcgaccagcgacgcagcgccaaggcgatcaacttcggattgatctacggcatgagcgccttcggcctggccaagcagatcggtgtcgagcgcaaggaggcccaggcctacatcgaccgttacttcgcccgctaccccggcgtcctggcgtacatggaacggacccgcgcccaggccgcggagcagggcttcgtcgaaaccctgttcggccgtcgcctgtacctgccggagatccattcgaagaacggcgccatgcgcaaggccgccgagcgcaccgcgatcaacgcgccgatgcagggcacggcggcggacatcatgaagcgcgccatggtcgctgtggataactggctgcaggaaagcggcctcgatgcccgggtgatcctccaggtgcacgacgaactggtgctggaagtgcgcgaggagctggtcgagcaggtgtgcgagggaatccgcccgctgatgagcggagcggcgaccctggacgtaccgctggtggtcgaggcgggtgtcggttcgaactgggacgaagcccactga

SEQ ID NO: 322917 - DNA, 291 bp, Pseudomonas aeruginosa
atgcgtacgctgaaccgcttgatgctcgccggactgctggcgttcgccccgctcgtcgcgatggcggcggacgacgacgcgccctccggcgagcccgacgtaaccatccgccaggagggcgacaagaccatcgaggaataccgcgtgaatggcttcctctacgccatcaaggtggttcccaagcatggcaaaccctatttcctggtccgcgccgacggcagcgatggcaacttcattcgctccgaccagccggacaagctgattccacaatgggagatcttcagctggtga

SEQ ID NO: 322918 - DNA, 951 bp, Pseudomonas aeruginosa
atgtcggtgttcaccccactcgaacgctcgaccctggaagccttcctcgccccctacgacctgggccgcctgcgggatttccgtggcatcgccgaaggctccgagaacagcaacttcttcgtcagcctggaacacggcgagttcgtcctgaccctggtcgagcgcggcccggtgcaggacctgccgttcttcatcgaactgctcgacgtgctccacgaggacggcctgccggtgccctacgccctgcgcacccgcgacggcgaggccctgcgccgtctcgaaggcaagccggcgctgctgcaaccgcgcctggccggccgccacgagcggcagccgaacgcccaccactgccaggaagtgggcgatctgctcggccaccttcacgccgccacccgcgggcgcatcctcgaacgcccgagcgaccgtggcctgccctggatgctggaacaaggtgccaacctcgccccgcgactaccggaacaggcccgcgccctgctcgccccggccctggcggagatcgccgcgctggatgccgagcgtccagcgctgccgcgcgccaacctgcatgccgacctgttccgcgacaacgtgctgttcgacggcccgcacctggccggcctgatcgacttctacaacgcctgctccggctggatgctctacgacctggcgatcaccctgaacgactggtgctccaataccgacggcagcctggacccggcccgcgcccgcgccctgctcgccgcctacgccaaccgccggccgttcaccgcgctggaagccgagcactggccgagcatgctgcgggtcgcctgcgtgcgcttctggctgtcgcgactgatcgccgccgaggcgttcgccggacaggacgtgctgatccatgatccggcggagttcgagatgcgcctggcgcaacggcagaacgtggagattcatttgccgtttgcgttgtag

SEQ ID NO: 322919 - DNA, 1029 bp, Pseudomonas aeruginosa
gtggaagccaccgccgagggtgtgcgcatcagtgtgcgcgacactggcatcggtatcgcccaggaggcgctggatcgcatcttccaaccgttcacccaggccgacgcgggtatcacccgccaatacggcggcactggcctcggcctggccctcacgcgcaagctgtgcgaggccatgcagggcgagctgacggtggagtcgacggtcggcctgggcagcctgttcagcgtcggcctgccgctggcgccggtcagccctccgctgcaggcgctgccgctgcgcggccgggtgatcgcgcaatgctcggccaacagcgggctggcgcagctgctgcaaacctggctgccgcgctggggcctggagtacaagcgtctggagaccgacgacagcctgctcggccactcgctcgacgtactgatatcggattgcccggactgtctgatgggactgcgtccgagcatcggtacgccgatcctgctggtcaccgcctacggcagtttcctcgaaccggagttggcccgccgcctgtcgccgctgcgccaactggccaggccgctgagtcgcaaccagttgtaccaggccctgaaacacgtgctcgaacacactgccatagccccgtcgagcgcctcggacaccacgggagaacagcgcaacacccgggtcctgctggtggaggacaacccggtcaaccagttggtcgccaagggcctgctgcacaagctcggctgccaggtatggatcgccgaacacgggctgaatgcccagaagatgctggaggagcatcccatcgacctggtcctgatggactgcaacatgccggtgatggacggctacgaagcgacccggcagatccgcgacagcggacgctggggcggcctgccgatcatcgcgctgaccgccaacgccctgccggacgagcgcgaacgttgtcgtgccgccggcatggacgactacctggccaagcctttccaccgcgacgaactgaaagccatcctcgaccgttggtgcccgctcaccgcgagcgactag

SEQ ID NO: 322920 - DNA, 492 bp, Pseudomonas aeruginosa
atgagcacccggggaaaagtcgccaggccggatggcgtcgaagaatcgctgctgctcgacaaccagctgtgtttcaagctgtacgccgcctcgcgcgcggtgatccgcggctatcggccgctgctcgaacagatcggcctgacctacccgcagtacctggtcatgctggtgctctgggagtggcatgcgagcccgccggagcagccgacggtgaaggccctgggcgaccgcctgctgctcgactccggaaccctgacgcccttgctcaagcgtctcgaacagctcggcctggtggatcgccgtcgcgccagtcacgatgagcgggaagtgcacctgacgctgacggtgccggggatcaccttgcgcgaacgggtcattccgctgcgccagcagctgatctgcagcaccggtttcgacctcaacgagatgttcgacctgcaccagcgcctgggcggattgctgtcgcgcttccgtctggtggtaggaggctag

SEQ ID NO: 322921 - DNA, 486 bp, Pseudomonas aeruginosa
atgagcgattcgctgctgagcattccctgcaccaccatcaagggcgaacagaagaccctggccgatttcggcggcaaggcgctgctggtggtgaacaccgccagcaagtgcggcttcaccccgcagtaccaggggctggaggccttgtgggaaaaataccgtgagcgcggactggtggtgctcggtttcccctgcaaccagttcggcaagcaggaaccgggcgacgagggcgagatttcgcagttctgcgaactgaactacggggtgagcttcccgctgttcaggaagatcgaggtcaacggcgccggcgcccacccgttgttcgtcagcctgaagaagcgcgcgccgggcctgctcggcagccagggcatcaagtggaacttcaccaagttcctgatcggccgcgatggccaggtggtgaagcgctatgcgccgaccaccaagccggaggagctgagctcggcgatcgaggcgctgcttgaatga

SEQ ID NO: 322922 - DNA, 399 bp, Pseudomonas aeruginosa
atgagcaagatcgacaaaccccttgactcctggcgcgaggagttgaccgaagagcagttccacatctgtcgcctgggcggtaccgaacgcgccttcagtggcgaataccacgccaccaagacccccgggatctatcattgcacctgctgcggcacggcgttgttcgactccgacgccaagtacgactccggcagcggttggccgagctatttccagccggtggacgccgaggcggtccgcgaactggacgacttcagccacggcatgcatcgcatcgaagtccgctgcggccgctgcgatgcccacctggggcacgtcttcccggatggcccccggcccaccgggttgcgttactgcatcaactcggcctcgctgaagctggtgccgcgggagagctag

SEQ ID NO: 322923 - DNA, 1212 bp, Pseudomonas aeruginosa
atgcaggtcagcaaatcgaacaagctcgccaacgtctgctatgacattcgcgggccggtgctcaagcacgccaaacgcctagaggaagagggtcaccgcatcctcaagctgaatatcggcaacccggcgccgttcggtttcgaagctcccgaggaaattctccaggacgtcatccgcaacctgccgaccgcccagggctacagcgactccaagggcctgttcagcgcgcgcaaggcagtgatgcagtattaccagcagaagcaggtggaaggcgtcggcatcgaggacatctacctcggcaacggcgtgtcggaactgatcgtgatgtccatgcaggcgctgctgaacaacggcgacgaggtgctgatccccgctcccgactacccgctgtggaccgccgccgtcagcctcgccggcggcaaggcggtgcactacctgtgcgacgagcaggccaactggtggccggacctggaagacatcaaggcgaagatcacgccgaacaccagggcgatggtgatcatcaacccgaacaaccccaccggcgcggtgtattccagggaagtgctggaaggcatggtcgaactggcccgccagcacaacctggtgctgttctccgacgagatctacgacaagatactctacgacggcgccgtccacgtctccaccgcctcgctggcgccggacgtgctctgcctgaccttcaacggcctgtccaaatcctaccgggtggccggcttccgctccggctgggtggcgatctccgggcccaagcagcgggcgcagagctatatcgaaggtctcgacatcctcgccaacatgcgcctgtgcgccaacgtcccggcgcagcacgcgatccagaccgccctgggcggctaccagagcatcaacgatctggtcctgccgccggggcgcctgctggagcagcgcaaccgcgcctgggaactgctcaacgacatccccggcgtcagctgcgtgaagccgatgggcgcgctgtacgccttcccgcggatcgatccgaaggtctgcccgatccacaacgacgaaaagttcgtcctcgacctgctgctctcggaaaaactgctgatcgtccagggcaccgccttcaactggccgtggcccgaccacttccgggtggtcaccctgccccgcgtcgacgacctggagcaggcgatcctgcgcatcggcagcttcctcaaaggctaccagcagtaa

SEQ ID NO: 322924 - DNA, 453 bp, Pseudomonas aeruginosa
atggacctgcagatcgacgacttccacaaggacgccgctggcggcctcctgcttctctaccaggcgtttccgcgcaagaccgcgctctacgtcgaagacctgatcggccgcgaggcgccggacgagttcggcctgccgagcaaacgtcaccaaagttgtctgggcgcgttgctctggctcgccgaggaaggctacctgcgcttcgccaacaccattcattacgaggctctcgaccaggcggtgctcagcgaaaaggccttcctaagacttacccgtatcgtcccccgggccgcggcggcgctggccgaggcgccggccagcgtgcgccgcgaacaggccagcctggccaaccagttgcgccaggcgctggcgcagggcgacggcgaacgcctggccgggctgacccgcctgctgttcgagggcaacctgggcgcgcaaggcgacacagtttga

SEQ ID NO: 322925 - DNA, 960 bp, Pseudomonas aeruginosa
atgattatcaggagcccgttcgcccgccccggcggcctgcgaaccgcgctccgtgccttcagccgtgaggagaagctttacaccatgatgcgcatcctgttgttcctggccaccaacctggcagtcctggtgattgccagcatcaccctgaaactgctcggggtggaccgcttcaccggccagaattacggcagcctgctggtcttctgcgccgtgttcggtttcgccggttcgctggtctcgctgttcatctccaagtggatggcgaagatgagcaccggtaccgaagtcatcagccagccgcgcacccgtcacgaacagtggctgctgcaaaccgtcgaagagctgtcccgcgaagccggcatcaagatgccggaggtcggcatcttccccgcctacgaggccaacgccttcgccaccggctggaacaagaacgacgcgctggtcgcggtcagccagggcctgctcgaacgtttctcgcccgatgaggtgaaagccgtcctcgcccacgagatcggtcacgtcgccaacggcgacatggtcaccctggcattgatccagggcgtggtgaacaccttcgtgatgttcttcgcgcggatcttcggcaacttcgtcgacaaggccatcctgaagaacgaggacggcccgggcatcggctacttcgtcgcgaccatcttcgccgaactggtgctcggcatcctcgccagcatcatcgtcatgtggttctcgcgccgccgcgagttccgcgccgacgccgccggcgcccacctggccggcaccggcgcgatgatcgccgcgctgcaacgcctgcgttcggaacagggcgtgccggtgcagatgcccgacaccctgaacgccttcggcatcaatggcggcctcaagcacggcctggccggcctgctgatgagccacccgccgctggaagatcgtatcgaagcgctgcgcgccagcgcacgctga

SEQ ID NO: 322926 - DNA, 1128 bp, Pseudomonas aeruginosa
atgcagatccgcgccgatttcgacagcggcaacatccaggtcatcgatgccagcgatccccgccggatccgcctggcgatccgtcccgacctggccagccagcatttccagtggttccacttcaaggtcgagggcatggctgccgccaccgagcaccgcttcaccctggtcaacgccggccagtcggcctacagccatgcctggagcggctaccaggcagtcgcctcgtacgatggcgaacgctggttccgcgtaccgtcgcaatacgacgccgacggcctgcatttccagctggaaccggaggaaagcgaagtccgcttcgcctacttcgagccctacagccgcgaacggcatgcccgcctggtcgaacgtgcgctcggcatcgagggcgtcgaacggctcgccgtcggcaccagcgtgcaaggccgcgacatcgaattgctgcgggtcaggcgccatcccgacagccacctgaagctgtgggtcatcgcccagcagcatcccggcgaacacatggccgaatggttcatggaaggcctgatcgagcgcctgcagcggccggatgatacggaaatgcagcgcctgctggaaaaggccgacctgtacctggtgccgaacatgaacccggacggcgcgttccacggcaacctgcgcaccaacgccgccggccaggatctcaaccgggcctggctggagccgagcgccgagcgcagcccggaagtctggttcgtccagcaggagatgaagcgccatggcgtcgacctgttcctcgacatccacggcgacgaggaaatcccccacgtattcgccgccggctgcgagggcaacccgggctatacgccccgcctggaacggctcgagcaacgcttccgcgaggaactgatggcgcgcggcgaattccagatccgccatggctacccacgcagtgcgccgggccaggccaacctggcgctggcctgcaacttcgtcgggcagacctacgactgcctggcgttcaccatcgagatgccgttcaaggaccacgacgacaacccggagcccgggaccggctggtccggcgcccgctccaagcggctcggccaggacgtcctgagcacccttgcggtgctggtcgacgaactccgctga

SEQ ID NO: 322927 - DNA, 657 bp, Pseudomonas aeruginosa
atgcaggcggatttttggcacgcccgctgggcgaacaaccagatcggcttccacctggacgagatcaatccctacctgatgcgccacctgtcgcggctgcgactgcaagcgggcgaacagatcctggtgccgttgtgcggcaagaccctggacctggcctggctggccgcccagggactggaggtgctgggggtggagctttcggaaaaggccgtgagcgacttcttcgaggagcacgacctgcgccccgagatcgatcaactggatggtttccgccgctaccgggtcgccggcatcaccctgctgcagggtgatttcttcgccttgcaggcagagcacctggcgcagtgcagggcgttctacgaccgcgccgcgctgatcgccctgccgccggagatgcgtgagcgctatgccgggcatctccaggcggtcctgccgacgcgcagcctcggcttgctggtcaccatcgactacccgcaggcggagatggccggtccgccgttcgccgtgcccgacgaggaggtgcgtggctactacgctggcggttggcggatcgaggaactggagcgcggcgacgtgctcggcgtcaactggaaattcctcgagcgcggggtgtcctggctgaacgaggccgtctacctgctggagagaggctga

SEQ ID NO: 322928 - DNA, 447 bp, Pseudomonas aeruginosa
atgttccatacactcctggtcgccatcgacggcggcccgcagacccgtcgcattgccgagctggcgcgtcaggccgccgcgcccggcgcgcaggtccacctgctgtgcgcggtggacgccggctatgcgttgccgggccggccgacgctgttcgactatccgcccgccgcgcacgagtgcgaagaggcccggcaggtgctcgacgaggcttgtgcgctgctagccgggtgcgagctggaggtacgggccgagctgcgtgccggcgacccggtgcaggtgatcctgggcgaggcgcggcgcctgggctgcgagctgatcgtcatcggccatcggcacctgggacggctggagcgcctgctcgatccttcggtcggcgaccgggtgatccgcgaggcgccgtgtccggtgctggtggaagtgcgcgagggagatgcgcaggggagttga

SEQ ID NO: 322929 - DNA, 933 bp, Pseudomonas aeruginosa
atgcatcttcccgatctgaatctcctggtcgccctcaacgttcttctcgaagagggcagcgtggtcggagccgcgcgccgcatgcacctcagcccaccggcgatgagccgtaccctgtcacggatccgcgaggcggtaggcgacccgatcatggtccgcgccggccgcaagctggtgcccacgccccgtgccctggaactgcaggagcaggtccggcaactggtggaccaggcccgcgacctgttcaacactcgcgagaccatccaactggacaagctggagcgctgcttcaccctgcgttccaacaacaccctggtcggcggtctgtcgatacgcctgctggagatcttcgccgaggaggcgccgcgctgcaccctgcgcttcgtgcaggagtcggacatcgacgacgaggcactgcggcagaaccgcatcgacctctatatcggcgcctcgtcctggatggaacccgaggtcaagacccagcagttgctcaccacccgcttcgtcggcctggcccgccaggggcacccgatcttcgacggcgagatcactccgcagcgcttcgtcgcttttccgcatatcgccgtctcgcgtcgtggcctcaaccatggaccgctggaccaggccctgggagaactcggcctgaagcgcgacgtcaagctgatcagcccgaccttccactcggcgatcttcgccctgcccggctccgacctgctgctgccgatcgccgagcattccctgtggcgggccaaccgactgggcctgggcctgcgccagttcgacatcccggtgccgttgaagaccgtgatggtggtccaggcctggcatccacgcttcgacaacgatcccgcgcaccgctggttccggcaaacgatcaagcggatttgcgaggaagtgcagagcgatccccatccgctgcttggctccaactga

SEQ ID NO: 322930 - DNA, 1593 bp, Pseudomonas aeruginosa
atgacttcgctcgccaccccactcggccagccgacgccaaccgcagcccccgccgcccagcctttcggcgcgcgcatcgtggtcggcctgctcggcgtgctgctcgcctcgctcaccgccggtctcaatggtcatgtcaccgagatcgccatgaccgatgtgcgcggcgcactcgccattggccatgacgaaggcacctggctgaccgtgctctacgaagccacccaggtcgccgccatggcattcgcaccctggtgttcggtgaccttttccctgcgccgcttcacgctcttcgccatcggcggcttcgccctgctggccctgctctgtccgttcgcgccgaacctcgagagcctgctggtcctgcgcaccctgcaagggctgatggccggctgcctgccgccgatgctgatgaccgtggcgctacgcttcctgccacccgggataaagctctatggcctgggcgcctatgccctcaccgcgaccttcgggcccaacctgggcctgccactggcggcgttctggttcgaatacgtcggctggcagtgggtgttctggcaggtcattccactgtgcctggtggcgatggccgcggtgtcccatggcatcccccaggacccggtgcgcctggaacgcttccgccagttcgacggcatcggcctgctcaccggcttcccggcgatctgcgccctggtgatcggtctgctgcaaggcgaacgcctggactggttcgagtcgccgctgatctgcctgctgctgggcagcggcagcctcctgctggggctgttcctggtcaacgaatggagccacccgctgccgttcttccgcctgcagttgctgaagcgccgcaacctgaccttcgccctgatcaccctggccggcgtgctggtggtgctcggcgcgagcatgggcgtgccgaccgaattcctcgccgagatccgcggctaccgccccctgcagagcgtacccatggtgttgctggtggcccttccgcagctcgtcgcgctgccgctggtggcggccctctgcaacatcccgcgggtcgactgccgctgggtgctggcctgcggcctgtgcctgtgcgccggtgcctgcctgagcttcagccaactgacggcggactgggtgcgcgaggacttctacctgccgatgctgttactggtggtcggccagccgatggcggtgattccgctgctgatgctctccaccagcgtcatcgcgcccatcgagggacccttcgcctcggcctggttcaacaccgtccgcggcttctccggggtagtcgccaccgcggtgatcggcgccctcggcaccgcccgcgagcactaccactccaaccgcctggtggatcacctgggcaatgcgtcccaggccgtcgaactgcgcctgcaacagatcgccggcctgcaaccgggcgccgactccggcgcgcactggcagcacctggccgaacaggcccgccaacaggcccaggtgctgggcaacgccgacgtgctgctggcgatggccggcctggcctgcgccctgctgatcctgattccgatcctgccgcaacgggcctacccgccccgcccggtcgctcccacacactga

SEQ ID NO: 322931 - DNA, 1065 bp, Pseudomonas aeruginosa
atgtcgttcatcacttcgcgcaagggcagcctgctgctcgccgccctgctggtcctgaccctactggtctacctgctgttccacctgctcgccccacgggtcgtgcagagcaccgacgacgcctatgtgcacgccgatttcaccctggtcgcgccgaaagtcgccggcttcgtccaggacgttctggtcgaggacaaccagccggtcaaggccggccagttgctcgcccgcctcgacgaccgcgacttccgcaccgccctggccgccgccgaagccgacgtgctcggtgccgaggccaacctggccaatgccgaggccaacctgcaacgccagcaggcgctgatcgaccaggcgcgggccaaggtccgcgccgagcaggccgagctggtcttcgcccgtcacgagcaaagccgctaccagaccctcgccagcaagggcgccggcagcctgcagaacgcccagcaggcgcaatcgcggatcgataccgccagcgcccggctggccgagggccaggccgcagtggatgccacgcgcaagcaggtgagcgtcctcgaagcccgcgtcggccaggcccgtggcgacctgcaacgcatgcaggcgcgacgcgaccaggcccgcctggacctctcctactgcgaactccgcgcccccttcgacggccaggtcggccgccgccaactgcgcgtcggcgcctatgtcacgccgggcagcgcgctgctggcggtggtgccactgcagcaggcctacgtggtcggcaatttccaggaaacccaactgacccacgtctctcccggacaggccgtggagatccgcgtcgataccttccccggcgaggttctgcgcggccatgtcgacagcatcgcaccggccaccggcctgagcttcgcgccgatcgccccggacaacgccaccggcaacttcaccaaggtggtccagcggatcccggtgaagatcgttctcgagccgcgccaggccatggcgggcaagttgcgtgtgggcatgtcggtggaagcacggatcgacaccgcgaccggcacccgctccgccgaggttgcccagcaatga

SEQ ID NO: 322932 - DNA, 1440 bp, Pseudomonas aeruginosa
atgaaaggcactccgctcctgcttattgccagccttgcgctcggcgcctgcagcctcggccccgacttcacccgcccggaccgccctgcgcccggcgaatggtcgctccaggccgctgccggcaaccccagccacctcgccgccgcgccgctcgcagcccaatggtggacgctgttcgacgacgcgcaattgaacgccctgctgcaacgggtccagcgtgccaacctcgacctgcgcagcgccacggcgcgcctgcagcagagccgcgcgatccgtcgcagcctcggcggcgacgccctaccctcggtggacgccagcggcaactaccagcgccagcggaccaccagcgccggcctgttcgatccttccggcaaggccggcaaaggcaactacaaccacgccctggccggcttcgacgcctcctgggagctggacttctggggccgcgtgcgacgcgagctggaagccgccgacgcgacggtggaagccagcgagaacgaactgcgcgacgtgcaggtctcggtgctggcggaagccgcgcgcgactatatccagttgcgcggcgaacagaaccgtgcggcgatcatccgcgacaacctcgagaccgcacggcgcagcctggaactcacccgcacgcgcctggccaacggcgtcgccaccgacctcgaggtagcccaggcgctggcccaggtggccagcatggaggcacgcctgcccgaggtggaaaagaaccaggcgcacctggtcaacgccctcggctacctgatcggtgccagccccggcagcctgctcgccgaactcggcccggcgcgggcgattccgcgtccgccgggcagcgtgccggtcggcctgccgtccgaactggcccagcgccgccccgacatccgtcgtgccgaagcgcgcctgcacgccgctaccgccagcatcggcgtggccaaggcggacttctatccgcgcatcacgctcaacggcaacttcggtttcgaatccctgcaactgtccagcctgggcgactgggaccatcgccagttcgccatcggcccggcgttcagcctgccgatcttcgaaggcggacgcctgcgcggacgcctggagctacgcgaggcacagcagcaggaagccgccatcgactaccagcgcaccgtgctgcgtgcctggcaggaagtcgacgacgcgatgcacgactacgccgccaaccagcgccgccaggagcgcctcggcgaagccgtggcgcagaaccgccgcgccctgcagagcgcccgcgagcaataccgcgccggcgcggtggacttcctcagcgtgctcgacagccagcggcaactgctggacaaccaggaacagcaggtcgccagcgacgaagcggtgtcgctgaccctggtcaacctctacaaggcgctgggcggcggctggagcccaacgtccgacccggcgtcgggctga

SEQ ID NO: 322933 - DNA, 972 bp, Pseudomonas aeruginosa
atggacctgctgcaaggtatccggaccttcgtccgcgtggtggagcacggcagcttcacccaggccgcccaagcgctggggacctctccggcgaccgtttcgcgccaggtcgccgggctcgaacaggcgctctcggcgcgcctgctgcaacgcaatacgcgcagcgtcgtggtgacggaaagcggtctgcgctattacgagcattgcaagcagatcctgcgcacggtcgccaccgccgcggcggacgtcgaagacagccagtcccacgccagcggtcgcctgcgcctccacgcggtgaccgaactgggcctcgagcacctgatgccgctactggtggactacctggacggccatccggacgtctccgtcgacctcacgctggcccagggcaccccggccctgctcgaggaaggcctggacgtgctgatcaccctcggccgaaccttgccggactcgaccctggtcgcccgcgatctcggccaggtgttcagcgtggtctgtgccgcgccggaatacctggcacggcatggcgtgccacgcacgccggaggacctgctgcggcatcgctgcctgaacgtggccgcgccgtcctgcccgcagggctgggccttcgtcggcgaacgcggcgaaacgctgctcgatctcgacgaggcgctcaaggtcaaccttcccgaggccgcctgcgccgccgccgcggccgggctcggcgtctgcctgctgcccggcttcgtcgccgcccgcgcgctgcaggaaggcagcctgttgcggctactgccgggccatcgactgcatgtccgcgaggtgttcgtgctgtactcctcgcggcgctacctggacgccaagatccgcacctgggtggacttcctcagggaacgcctgcccctggcgttcgagcgtgaccgggcgatcctcgacgatcggcgctactgggcggaaagcccaaccggcgtagcgcgcgagaccgcgacctaa

SEQ ID NO: 322934 - DNA, 771 bp, Pseudomonas aeruginosa
atgctaccgactctctatatttcccacggctcaccgatgctcgccctcgaaccgggcgccagcggcgtacaactgcgccgcctggctacagagctgccgcggccgaaggcgatcctggtggtttccgcgcactgggaaagcgacgacctccgggtaaccggcgccgcggtgccggatatctggcacgacttctacggctttccgccgcccctctacgccgtgcgctacccggccaaaggcgagccggcgctggcacagcggacgatcgaactgctccaggccgccggcctgccggcccaggccgacccacagcgaccattcgaccacggcacctgggtgccgctgagcctgatgtacccgcaggcggacatcccggtgctccagctgtccctgccgagccgcctcggtccggccctgcagagccgcgtcggccaggccctgcgccaactgcgcggggaaggcgtgctgctgatcggttccggcagcatcacccacaacctgggcgaactggactggcgcgccgggccggaagccatcgcgccctgggcgcgggagttccgtgactggatggtggaaaagctccaggccgacgacgaggccgcgcttcacgactaccgccggcaggcgccctgggcggcgcgcaaccaccccagcgacgagcacctgctgccactgttcttcgcccgcggcgcgggcggcggcgggatgcgcgtcgagcacagcggctttaccctgggctcgttggggatggatatctatcgcttcgattga

SEQ ID NO: 322935 - DNA, 1671 bp, Pseudomonas aeruginosa
atgactcaggaaaccgtcggcttcgccgcgctcggtattcaccccaatgtgctcgcggcaatcgtcgccgtaggctacgaagagccttcgcctatccaggctcaatcgattccgctgatcctcgaaggccacgacatgatcggccaggcgcagaccggtaccggcaagaccgccgcgttcgccctgccgctgctgtcgcgcatcgacccgagccgccgcgagccgcagatgctggtgctggtgccgacccgcgagctggccctgcaggtcgccaccgcctgcgaaacctattccaagcaattgccgggcgtcggcgtggtcgccgtctacggcggcgcgcccatggggccgcagctgaaggccctgcgccagggcgcacagatcctcgtcgctacccccggccgcctgtgcgaccacctgcgccgcgacgagaagctgctggccaccgtccagcgcctggtgctcgacgaagccgacgagatgctcaagctcggcttcatggacgacctggaagtgatcttcgaggcgcttcccgaatcgcgccagaccgtgctcttctcggcgaccctgccggcgtccatccgtggcatcgccgagcgccacctgaagcagcccaagcacgtcaagatcgccgccaagacccagaccgtggcgcgcatcgagcaggtccacctgatggtccatgccgaccagaaggccggttcgatccagcgcctgctggaagtcgagcagttcgacgcgctgatcgccttcgtccgcaccaagcaggccaccctcgactacgccgaattgctcgagcgccagggctaccgcgccgccgcgctcaacggcgacatgccgcaggcccagcgcgagcgggtcatcgagtcgctgaaggacggttcgctggacatcgtcatcgccaccgacgttgccgcccggggcctggacgtaccgcgcatcacccacgtgctgaacatcgacatgccctacgaccccgagtcctacgtgcaccgcatcggccgtaccggccgtgccggccgggaagggcgcgcgctgttgctggtgactccgcgcgagcggcgcatgctgcaggtgatcgagcgggtcaccgggcagaaggtcggcgaagtccgcctgccggatgccgagaccgtactggaggcccgcctggcgcgcctggccgcgagcctgacgcccttgctcgacagcgccgtcgagcagcgcggcgcggtgcgcgacgagctgtgccgtcgcctcggctgcgatgccgagaccctggccgccgcactgctggcacgcctgaccgccggcaaggcgctggacctggagtcggtgcgccgcgaacagccgctgaccccatcggcaccgcgcgagcgtgccgaccgtggcgaacgcggtgagcgtccggagcgcagcggcgagcgtcgtccgatggcgccgccgagcgaaggccgtgcccgctgccgcactgccctcggcgcgcgcgacggggttgcggcgaagaacctgctgggcgcgatcctcaacgagggcggcctgtcccgcgaggacatcggtcgcatccagattcgcgataccttcagcctgatcgagctgcccgaggccaatctcgagcgcctgctgaccaagctcaaggacacccgcgtcgccggcaaggccctgcgcctgcgccgctatcgcgaggactga

SEQ ID NO: 322936 - DNA, 747 bp, Pseudomonas aeruginosa
gtgagcgaagaacgtctgctggtcgaggagcgcgacgaatacggggtcatccgggtcatcgagtccggcgactatcgcttcctcgagttcggcgacggtgtcgagcagagctgcgtgttcatgcccgatccagcctggctggaatacgactacacccgcgccatgctgctcggcgggctctgccattcgcaaccgcgtcgcgcgttgttcctcggtttcggtgccggcagcctgacccaggcctgcctgcgccacctgccgctggaggaggccgaggccatcgagctgcgcccggcgattccgcgcctggcccgcgagcatctggggctgcgcgacgacccgcgcctgcgattgcgcatcggcgacgcactggagagcctgggcgaatgcgcggaggccgacctgatcttcctcgacctctataccgataccggcccgtcggccgcgcacctggcctggaatttcctcggtgcctgccaggagcgcctcgccgaggatggctggctggtgatcaaccagtggagcggcaccgatggcaagccgctgggcgcgccgctgctgcgcgggcgctatcaccatcattactgggagtgtccggtggccgagggcaacgtggtgatgctggtgccggcgaacctggccctcgaactcgaccaggaagccctgcggacgcgtgccgcggcgctggagccgcaactcggctattcgttgcagggctatatcgacagcctgcgcccggcccagtag

SEQ ID NO: 322937 - DNA, 1347 bp, Pseudomonas aeruginosa
atgagccagtcctggagccccgagagctggagggccaagccgatccagcaacaacccgagtaccccgatgccgcgcacctggccagggtcgagcagaccctcgccggatacccgccgctggtcttcgccggcgaggctcgcgagctgcgccggcagttcgccgaagtcaccgccggacgcgccttcttgctccagggcggggattgcgcggaaagcttcgccgaattttccgcggcgaagatccgcgataccttcaaggtactgttgcagatggcggtggtaatgaccttcgccgccggctgcccggtagtgaaggtcgggcgcatggccggccagttcgccaagccgcgctcctccggcgacgaaacgcagaacggcgtgaccctgcccgcctatcgcggcgacatcgtcaacggcatcggcttcgacgagaagagccgcgtgccggacccggagcgcctgttgcaggcctaccaccagtccaccgccagcctcaacctgttgcgcgccttcgcccagggcggcttcgccgacctgcaccaggtgcaccgctggaacctcgatttcatcgccaactcggcgctggccgagcgctaccagcaactcgccgaccgcatcgacgagaccctcgccttcatgcgcgcctgcggcctggacagcgcgccgcagctccgcgaaacaagcttcttcaccgcccacgaagcgctcctgctgaactacgaggaagccctgacccgccgcgacagcctgaccggcgagtggtacgactgctcggcgcacatgctctggatcggcgaccgcacccgccagatcgacggcgctcatgtcgagatgctgcgcggcgtgggcaatccgatcggggtcaaggtcgggccgagcatggacagcgaggagctgatccgcctgatcgatattctcaacccggacaacgatccgggccgcctcaacctgatcgtgcggatgggtgccgacaaggtcggcgaccacctgccgcgcctgatccaggccatccagcgcgagggccgccaggtgctgtggagttccgatcctatgcacggcaataccatcaaggcctccagcggctacaagacccgcgacttcgcccgcgtgctcgccgaagtccgccagttcttcgaggtgcaccaggccgaaggcagctacgccggcggcatccacatcgagatgaccgggcagaacgtcaccgagtgcatcggcggttcgcgaccgatcaccgaagacggcctcagcgaccgctaccacacccactgcgacccgcggctgaacgccgaccagtcgctggagctggccttcctgatcgccgaaaccctgaagcaggtgcgccgctga

SEQ ID NO: 322938 - DNA, 1209 bp, Pseudomonas aeruginosa
atgagtctttcgctttccctcgccgaagcccgccgcctggccctggccgcgcagggcttcgacggtcggcggacgcgccgcagcgtgcagcggcggcatctgcgcgaaatgctcgcgcgccttggcctgttgcagatcgattcggtgaatgcgctggtgcgctcgcactacctgccgctgttttcccgtctcggtccctactccatgacgctgctcgacgaggcggcctggagtgtcggccgtcaccgccagttgttcgaatactgggggcacgaggcctcgctgctgccgctggaacactacccgttgatgcgctggcggatgcgccaggccgccgacggccagggcatctaccagcaactggcacgtttcggccgggaacagcagccactgatccgccaggtgttgcaggcggtgcgcgagcaaggtgcgctaggtgccggcagcctgagcacgcggcaggagcgggccggtccctggtgggactggagcgcggaaaagcatgcgctggaatggctgttcgccgccggcgagctgacggtggccggacggcgcggcttcgagcggctctatgacctgccggagcgggtgtttcccgcggaattgctggcgcgccccgagctttcggaggcacaggcccagcgcgagctgttgcggatggcggcgagcgccctgggcgtggccaccgaaaaggacctgcgcgactactatcggctgagcccggcgcagagccgcgcgcgcctcgccgaactggtggaggctggcgagctgctgccggtccgggtcgagggctggagccagccggcctactgccccggcgaaccgcaggtgccgcggcggctaggcgccagtgccttgctctcgcccttcgactcgttggtctgggagcgggcgcgggccgagcgcctgttcgatttccgctatcgcctggagatctacacgccgaaggaaaaacgcgtgtacggctactacgtgctgccattcctgtacaacggccgtctggtcggccgcgtcgacctccgcgccgagcgggcgcgcgagcgcctggcggtgcatgcgttgcatgccgaggcgaacggcatggacgatgccgccctgcacgagctggccgagcaactgcgcagcatggccgcctggctgggcctggcgacggtggcgatcgaggggcgcggggagttggcggtacgcttgcgcggggtgctgctctag

SEQ ID NO: 322939 - DNA, 234 bp, Pseudomonas aeruginosa
atgaaaggtcaacaggattatttcggcagtcacttccacgctgcatcccatcccgcctcgaccgctgcgccgtcgttgtggcgtcgctggcggcgctggttgcagttggcccgcgagcgccgggaactgctgaggatgagcgacgaagcgctgaaggacctcggcctgagtcgggcggatatcttccaggagggcgagcggcatttctgggacgacccgctgcgtcggcattga

SEQ ID NO: 322940 - DNA, 855 bp, Pseudomonas aeruginosa
atgagctaccagcccggcatcgatacggaattgctccgcaccttcgtcgccatcgccgagcacggtggtttcacccgcgccgcggaggcggtgaatcgcacccagtcggcggtcagcatgcagatgaagcggctcgaagaggacgtcctgcagcgctcgctgttcgagcgcgacggaaggcagacccgcctcaccgccgaaggccaggtgctgctcggctatgcccggcggatcctcaagctgcacggcgaggtgttcaacaccctgcgccgcccgcacatggtcggttcggtgcgcatcggcaccccggacgactacgtgatgcgcttcctcccggcgatcctgtcgcgcttcgccgaagcctatccgctggtgcaggtcgaggtgcattgcgacacctcgctcaacctgctggcgcgcaacgacctcgacctgtccatcgtcacccgcgagccgggcaccgagatcggccagttgctgcgccaggagcccttcgtctggatggccgccgagggcttctgcccccacgaccagcggccgatcccgctggccatgttcaacaccacctgcttttgccgggcctgggcctgcaacgccctggaggcggcggaactggactaccgcatcgcctacagcagccccagcctgtcggcgctgttcgcggtggtcagcgccggcctcgccgtgaccgtgcaactgcgcagcctgctcaccggcaacctgcgcatcctcgacgagagcgagggcctgcccgccctgccctcggccagcatcatgctgatgcgcaacccgcacagccagtcaccggtcaccgagaagctcgccgaatacatcggcgagggcttccgtctctga

SEQ ID NO: 322941 - DNA, 750 bp, Pseudomonas aeruginosa
atgctggatgtatttctcgatttcctgctggggatggtgctcggttgcctgggcggtctgttcggaataggcggcggcttgctggcgatcccggcgctgggggtgatcttcggtctcgaccagcaactggcgcagggtaccgcgctggtgatggtggtaccgaacgtggtgctggcgttgtggcgctaccaccagcgcaaccgcatcgatccgcgccaggccggagtccttgccctgaccggcctgctttgcgcgttcctggcgtccagcgtggccgcgcggatcgatgcggcgcggatgcgcgaagcgttcgtgatcttcctcctggcgctggccggctacatgttctggcgcctgttccggcgcccgccgcagggcggcgcgacgccgcgctacggtttgccctggatgggcgtgctgggccttggcgcgggctcgctcggcgggcttttcggggtcggtggcggggtgctggcgacaccggtgctgacttcggtgttcggcctcgcccaggtcgtcgcccagggcctcgcgctggccctggccgcgccgagcacggcggtggcgctggggacctacgccatgcacggccatgtcgactggcggatggggatccccctggcgctgggcggcctgctgagcatttcctggggcgtgaggctggcccacgccttgcccgagcgcagcctgcgcatggccttctgcgccttcctcgcattgtgcgcggtgctcctgctggtgcgcggttga

SEQ ID NO: 322942 - DNA, 957 bp, Pseudomonas aeruginosa
atgttgcccgataccctcagcgaacagttcgttctctacctcgatgtcctcgatggcggcagcttctccgccgctgcgcgcaagcacccgctcaccccgtccgccgtggcgcgccggatggacgccctggaacgcgccgtcggcagcactctgctggtgcgcaccacccatgcggtgcgcgctactccggccggcctggccttcgccgaccgcgcccggcggatcgtcaccgaactgcgcctggcccgtgccgaagcggtgtccctgagcaccgcgccgcagggcctgatccgtatcgatgcgccggtgcccttcggccgccgccacctggccccggcggtcgccgacttcctcaaggccaaccccggcctcgacgtgcaattgcgcctgatcggcagcttcatcgacctgcagggcgaacatctcggcgaggtcgacctggtgttgcgcgccggcccgctgcccgacagccgcctggtggccacttcgctggcgccgatggtgcgggtggtctgcgccagcccggagtacctgcgcgaacatggcgttcccgcatcccccggcgaactgccggagcatgccggcatcgattgggacaacctgtcgccaccctatgcctggcgcttccagcacgacggcaagctccagcacctgcggccgaaacggacgcggctggccaccaataacgccgaagcgatggtcgacgcggcgctggccggcctcggcatcgcccacctgccgacctggctatgcagcgagtacttgctgcgcggcgaactgcaggcgctgttctgcgacgacggcttgcccgccgccgagcccacctgcatctatgctctgcgcctggaacgcgaagccagttcgcgaacccgcctgctgctggctttcctccgcgagcgcttcggttttccgccaccctgggaccaggccctgcagcagcgtctcggcgagcgctga

SEQ ID NO: 322943 - DNA, 456 bp, Pseudomonas aeruginosa
atgtcccgactgcccaccaccccttgcgagcagctcaagctggacaaccagctgtgcttcgccctgtattccacctcgctgcagatgaccaaggtctacaagcccctgctgcaagcgctcggcctcacctatccgcagtacatcgccatgctggtgctatgggaacgcgacggcctgaccgtgggcgaaatcagcgcacgcatgcttaccgacccgggatcgctcacgcctctgctcaagcgcctggagggcgaaggtctgattacccgcactcgcagcagcgaagacgaacgcgtagtcctgctgcgcctgaccgacaagggccgcgccctgcagcgacaggccgagagcattcccgcctgcatcctggagagtaccggcctcgacttgccacagctggtcgccctaaaggatgagctgctggccctgcgcagcaacctgcaagcaccggattga

SEQ ID NO: 322944 - DNA, 429 bp, Pseudomonas aeruginosa
atgcaaaccatcaaggctctctacaccgcaaccgcaaccgccaccggaggccgtgacggccgtgcggtatcctcggacggcgtgctcgacgtgaaactcagcactccgcgcgaactgggcggccagggcggcgcggccaccaacccggaacaactgttcgccgccggctactccgcctgcttcatcggagctctgaagttcgttgccggccagcgcaagcagacccttcccgccgacgcctcgataaccggcaaggtcggcatcggccagattcccggcggcttcggcctggaggtcgaactgcacatcaacctgccgggcctggagcgcgaagccgccgaagcgctggtagccgccgcccaccaggtctgcccctactccaacgctacccgcggcaatatcgacgtacgcctgaacgtgtcggtctga

SEQ ID NO: 322945 - DNA, 567 bp, Pseudomonas aeruginosa
atgaaaaccgctcaagagttccgcgccggccaggttgccaacatcaatggcgctccctgggtcatccagaaggccgagttcaacaagtccggccgtaacgctgccgtcgtcaagatgaagctgaagaacctgctgaccggcgccggtaccgagaccgtgttcaaggccgacgacaagctggagccgatcatcctcgatcgcaaggaagtgacctactcctacttcgccgacccgctgtacgtcttcatggacagcgagttcaaccagtacgagatcgagaaagacgatctggaaggcgtgctgaccttcatcgaagacggcatgaccgacatctgcgaagccgtgttctacaacgacaaggtgatctcggtagagctgccgaccaccatcgttcgccagatcgcctacaccgagccggccgtccgcggcgacacctcgggcaaggtgatgaagaccgcgcgcctgaacaacggcgccgagctgcaggtttccgcgttctgcgaaatcggcgactcgatcgagatcgatacccgcaccggcgagtacaagtcccgcgtcaaggcctga

SEQ ID NO: 322946 - DNA, 1131 bp, Pseudomonas aeruginosa
atggcgagctgggagattttctgtagcgtggtcgacaactatggcgatatcggcgtcacctggcgcctggctcgccaactggccgccgagcacggtcaggccgtgcgcctgtgggtggacgagccgcaggccttcgcccggatctgtccgcgggcggacccggcggcgcacgtgcagtgcctggatggggtcgaagtgcgtgcctggggccggccgtgggcaccggtggcggccgccgatgtggtgatagaggccttcgcctgcgaagtgccggaggcgcaccggcaggccatgcgcgagcgcaagcggccgtccctgtggctgaacctggagtacctgagtgccgaggaatggatcggcagttgccacgcattgccgtcgctgcaggcgtgcgggctttccaagtacttcttctttcccgggttccgcgagcccagtggcggcctgttgcgcgaggccggcctgctggaacgtcggcgccgtttccaggcctccgtctcggcgcaggatgagtttctcgcctccctcggcgtgcggcggaaggttggcgagcgactgatttcgctgtttgcctacgaaaacccggcgctgcctggctggctggaacaactgcgcgacgcccgccagccgagcctgctgctggtgccggaggggcgggtgctggcggatgtcgccgattggctgcgggtggctaccctggccgtcggggacgtccacgtgcgcgacgcgttgcgggtccaggtgctgccgttcatggcgcaggacgactacgatcgcctgttatggtgctgcgacctgaacgcggtgcgcggcgaggattccttcgttcgcgcgcagtgggcgggacggccgctgctctggcacatctatagacaggaagaggaggcgcacctggcgaagctcgaggcattcctcgaactctattgcgccggcctgcccgccgacctggcggaaaacctgcgcaccttctggctggcgtggaacgccggcggtggacttgccggggcctgggaggggctggagaggcaactgcccgagtggcgtcgggaagcgcagcgctgggccgacgaacagggcatgcgtccggatcttgcggcaaggctggtgcaattttacgcagattggctatga

SEQ ID NO: 322947 - DNA, 972 bp, Pseudomonas aeruginosa
atgttgtcgcgcgtacccgttgtctcactgtctttcgccgcgctgctttcggccggctccgcatcggccctggaactgcagcttccgcctccgggcgaggacgtcgtcggccaggtccaggtgatcaaggccaagtacgaggacactttcgccgacctcggcgagcagtacaacctgggctacagcgaaatggtcgccgccaaccccggtgtcgatccctggctgccgggcgtcggcaccgaggtgatcatccctacccgcttcgtgctgccgcctggcccgcgcgaaggcgtggtgatcaacctggccgaataccgcctgtactactacccgaaagggcagaacgtggtgcacacctatccgctgggcatcggccgcgagggctggggttcgccgatcgcgaacacccgcatcaccgccaagaccaaggacccggcctggtatccgccggcctcgatccgcgccgagcacgccgccgatggcgatccgctgccgaccgtggtgccgccgggcccggacaatccgctggggccgtacaagctgaccctgggcgtgccgggctacctgatccatggttcgaacaagaagttcggcatcggcacccgcaccagccatggctgcttccgcatgtacaacgccgacgtgacccacctgttctcgatgatcagcgtcggcaccagcgtgcgtatcatcaacgagccctacaagttcggcgtgagcaacggcaaggtctacctggaggcgcatacgccgctgaacgaccatggcgacccgtcggtggtggacaagcacaccgcggtgatcaacaccctgctcaagcgcgacgacctggccaagcgtatccagttgaactgggacgtggtccgcgaagtggtggcctcggaggatggcgtgccggtggaaatcgcccaggaatcggcgccggcgatgaccgcgacggtggatagcgatcctacccagcttacgccctga

SEQ ID NO: 322948 - DNA, 279 bp, Pseudomonas aeruginosa
atgccgcgtcccgcctggaccctctacgcctatcaactgatcgagcccgacgatcagctggacctgttcgcctgtcgcgaggtccgggtgcatgtggtggcgcgtcagctggagctggataccccggcggaccgcacgctttgcggcaagctgctgccggcccagccgcgctggcagccgctggaacgggcgcgtctgcgcgaccggctgctgtgtcccgattgccggaaacaactggaggcggaaaagcgcggggagcgcctgtcctggttggtctga

SEQ ID NO: 322949 - DNA, 606 bp, Pseudomonas aeruginosa
atgcgtgcattgctgttgagcggctgcctggccctggtcctgctgacccagcaggccgcggcgcagacgctgttggtcgtgggcgatagtatcagcgccgctttgggactggataccagccagggctgggtcgccctgctgcagaagcgcctcgccgacgaaggttacgactaccgggtggtgaacgcctcgatcagcggcgacacctccgcgggtggcctggcgcgcctgccggcgctgcttgccgaggagaagccggcgctggtggtgatcgagctgggaggcaacgacgggctgcgcggaatggcaccggcgcaattgcaacagaatcttgccagcatggcgcaaaaggcccgggcggaaggagcgaaggtgctgctgctgggtatccagttgccgccgaactacggcccgcgctacatcgaggccttttccagggtctacggcgcggtcgcggcgcaggaaaagaccgccctggtgccgtttttcctcgaaggggtcggcggggtccaggggatgatgcaggcggatggcatccatccggcgctcgccgcccagccgaggctcctggaaaatgtctggccgacgctgaaaccgctgctttga

SEQ ID NO: 322950 - DNA, 684 bp, Pseudomonas aeruginosa
atgagcgccagcattctcaacgcgcagaaccttagcaaggttgtcggtagcgcggaaggcaagttgaccatcctccacgacctctccctcgacctcgcccgcggcgacagcctggcgatcgtcggcagctccggctccggcaagtcgaccctgctcggcctgctcgccgggctcgaccagcccagcggcggcgaggtccgtctcgccgggcacgccctcggcgacctcgacgaggaccagcgggcgcgcgtccgcgcggcccatgtaggcttcgtattccagtcgttccagttgctcgacagcctcgatgcgctggagaacgtgatgctgcccctggagctggaaggccgcgccgacgctcgccagcgcgccagagaactgctcgagcgagtcggcctcggccaacgcctgggccactatccgcgccagctctccggcggcgagcagcagcgggtcgccattgcccgtgccttcgcggcgcagccggacgtgctgttcgccgacgaacccaccggcaacctcgacagcgccaccggcgagcggatcagcgatctgctcttcgaactcaaccgcgaacgcggtaccaccctggtcctggttacccacgacgagcgtctggcgcatcgctgccggcgcctgatccgtctggaaagcggacgcctgatcgaccgggtcgaaccctga

SEQ ID NO: 322951 - DNA, 2502 bp, Pseudomonas aeruginosa
atgaagccggtgcccctctcccgcctgctgagcctcgccggtcgccaattgttccgcgagtcgcgcagcggcgagctgcgcgtgctgttcttcgccctgctgatcgcggtcgcctcgagcaccgccatcggctatttcagcgcccgcctgaacggcgccatgctcgcccgcgccgccgagttcctcggcgccgacctagtgctcaacggtacccagccggcaagcgccgaacagatcgaacgcggcacccgtctgggcctgcgccacgccgacagcgtcgagttttccagcgtgatcgccaccgaccagggcatccagctcagcagcatcaaggcggtcggcgaccgctaccccctgcgcggccagctcaagagcgctgccgcgccgttcgccgccgagcaggccggcggtcgtccgcaggcgggcgaggtatgggtcgaatcgcgcttgctggtcagcctcgacctgaaggttggcgacagcatcgagatcggccgcaagccgctgcgcatcgcgcgcatccttacctacgagccggaccgcgccggcgacttctacagcctgacgccccgcgccatgatgagcctggccgacctcgatgccaccggggtggtccagccgggcagccgggtgcgctaccgcgatctgtgggaaggcccgccggaagccctccaggcctatcgccagcaggtcaagggcagcctcgccgccaaccagcgcctgcaggatgcccgcgacggcaaccgccaggtgggcgatgccctcggccgtgccgagcgctacctgaacctggccagcctggccgcggtgctgctcgccggcgtcgccgtggcgctgtccgccgcccgtttcgctgcacggcgctacgacgccagcgcgctgctgcgctgcctcggtctgtcgcgcagcgaaaccctgctcctctacgcgctgcaactgttgctgctgggcctgctcgccagcgccatcggcgccctgctcggctggttggcacagctcggcctgttccgcctgctcgccacgctgctgccgccggacgtaccagccggcggcctgttccccgccttcgccgggatcgccaccggcctggtagcgctggccggcttcgccctgccgccgctggcagccctgggccgggtaccgccgttgcgggtcctgcgcagcgacctgctgccggtgccgatgcgcacctggatggcctacgcctgcgccctgctcgccctgggcctgatcatgtggcggttgagtctcgacctgaagctgaccctcgccctgctcggcggcggcctggtcgccacgctggtgctcggcgccctcctgctgctcggcctgaacggcctgcgccgggcactggcgcgtgccagcctgccatggcggctgggactcggccagttgttgcggcacccgctggccgccgccggacagagcctggccttcggcctgatcctgctggccatggccctgatcgccctgcttcgcggcgaactgctggatacctggcaggcccagttgccgccggacgcccccaaccatttcgccctgaacatcctgccgacggaaaaggaagccttcgaacgtcgcgtgcaaaagctctcccccggcgccgagccgctgttccccatggttcccgggcgcctggtagcggtgaacggcaagccggtccaggcgctcgacgaagacgtgcgcagcgagcgtgccctgcagcgcgacctcggcctgacctggtcggagcgactgccctccggcaaccagctcaccgccggacgctggtggagcgcgccgcagccgggggccctgccgggcgtgtcggtggaagagaagctggccgccaacctgcgtatccaggtcggcgaccggctcaacttcagcgtcgccgggcagaatcgcgaggtccaggtccagagcctgcgcaaggtgaaatgggacaatttccagccgaacttcttcatggtcttccagcccggcaccctgaccgacctgccggtgacctacctgaccagcttctacctgccggccagccaggaacgcgacctgatcgaactggcccgcgccttccccaccgtcaccctgctgccggtagacgccctgctgagccagctgcggagcatcctcgaccaggtcaccctggccgtggagtacgtgctggtgttcgttctcgcggcgggcttcgtggtgctcttcgccggtctccaggcgaccctcgacgagcgcgtgcgccagggtgccctgctgcgcgcgctgggtgccgagcgcgagttgctgcaacgtacccggcgggtcgagttcgccctgctcggcgcagtcagcggcctgctcgcggcgctcggctgcgaggcggtcagcctgctgctctaccgactggtcttcgacctgccgtggcaagcgcatccctggttgctcgcgctgcctctggtgggcgccgtgctggtaggcggcgccggcctgctgggcacccgtcgcgccctcaacagcagcccgctgcgggtcctgcgcgagggctga

SEQ ID NO: 322952 - DNA, 507 bp, Pseudomonas aeruginosa
atgagtcgctatcgtccaccgcgcaccgccggcaccccgctgatcactccggagggcgccgcgcggttacgcgcagagctgcatgaactctggcacgtgcgccgtccccaggtgacccaggcggtcagcgaagccgccgccctcggcgatcgctcggaaaacgccgaatacatctacggcaagaagatgctgcgcgagatcgacagtcgcgtgcgcttcctgcgcaagcgcctggagaacctgaaagtggtcggcgagcggccggcggatccgaaccgggtgtacttcggcgcctgggtgaccctggaagacgaagacggcgagcaggcccgctatcgcatcgtcggccccgacgaactggacctgcgcaacaaccagatcagcatcgactcgccgctcgcccgcgcactggtcggcaaggagctggacgccgaggtgctggtgcgcaccccggccggggaaaagctctggttcgtcgtcgagatcgagtatccgccggcgccctga

SEQ ID NO: 322953 - DNA, 318 bp, Pseudomonas aeruginosa
atgacctgtcccagcacgcaattgcgcctggcacccatcaccaccggcctggtccggcggaacccgaggattctcctcagcggcccgcaccagccgaccctcgtccgttacctcgaaggctggccgaagcgctggaatggttcgcgtaccttccttatccagttcgcccaggacggcaaggacctggcgggcttccccagcgacgcgttcgacttcgccgtggtccaggcccccgaggcggaagacctggacctggtggtccggcaactgatccgggtcgcccgccagggcctgatcacccgccgtatcctgcgctga

SEQ ID NO: 322954 - DNA, 549 bp, Pseudomonas aeruginosa
atgcccgatcgctctcttcgcctgttcttcgccctgccctgtccacctcccctcgccgagcggatcggccggtggcgcgatgaccagccactgcccggacgccaggtggcgacggcgaacctgcacctgaccctggccttcctcgggcaggtcccgtccgctcggctcgaggccctgctggacatggccgcggccatcgaggccgcgcccttcgacctgtgtctcgaccgtctgctgcgctggaggaacggcatcctgctgctggcccccagccaaccgcccggcgccctcctgcgcctgcgccgcgccctgcgctccggccttgccgaactggagctgcctgtggaaacccgcccattcagcccccatctgaccctggctcgcgatgtcgcgccgctggaggacgccccgctacccccaaccttcgtatggcaggtcgaccatttcagcctgttttgctcgcaaaacgacgccgcgggcgtgcgctaccgcacactcggtcgctgggcgttgtgcggggaagattcaaacgagcgtttcgcgccgtaa

SEQ ID NO: 322955 - DNA, 936 bp, Pseudomonas aeruginosa
atgaagaagaagtctctgctccccctcggcctggccatcggcctcgcctctctcgctgccagccctctgatccaggccagcacctacacccagaccaaataccccatcgtgctggcccacggcatgctcggcttcgacaacatcctcggggtcgactactggttcggcattcccagcgccttgcgccgtgacggtgcccaggtctacgtcaccgaagtcagccagttggacacctcggaagtccgcggcgagcagttgctgcaacaggtggaggaaatcgtcgccctcagcggccagcccaaggtcaacctgatcggccacagccacggcgggccgaccatccgctacgtcgccgccgtacgtcccgacctgatcgcttccgccaccagcgtcggcgccccgcacaagggttcggacaccgccgacttcctgcgccagatcccaccgggttcggccggcgaggcaatcctctccgggctggtcaacagcctcggcgcgctgatcagcttcctttccagcggcagcaccggtacgcagaattcactgggctcgctggagtcgctgaacagcgagggggccgcgcgcttcaacgccaagtacccgcagggcatccccacctcggcctgcggcgaaggcgcctacaaggtcaacggcgtgagctattactcctggagcggttcctcgccgctgaccaacttcctcgatccgagcgacgccttcctcggcgcctcgtcgctgaccttcaagaacggcaccgccaacgacggcctggtcggcacctgcagttcgcacctgggcatggtgatccgcgacaactaccggatgaaccacctggacgaggtgaaccaggtcttcggcctcaccagcctgttcgagaccagcccggtcagcgtctaccgccagcacgccaaccgcctgaagaacgccagcctgtag

SEQ ID NO: 322956 - DNA, 468 bp, Pseudomonas aeruginosa
gtgaagcacgatcgcaccgagaccgtggacaacaacgagaccatcaccgtgcatgccaaccgcagcaagacggtcgaccgcaacgagacggtcaggatcggcatgaacaagacggaaaccatcctcatggcctcgttgcagaacgtcggcatggggcgcatggaaaacgtcgggctcggctacagcctgaacgtcggcatgatgatgaacaccgtggtcgggctgaaccagagcacccaggtgatgaagaagaagaccttgtcggtgggcgatagctacgaagtgagcgtgggcggcagcgacgatggctctaagatcaccctggacggtcagagcatcaccctcggcagccagcgcatcgagctgaccgccgaccgcgagatcctcttgcgctgcggccagagcacgatccgcctgacgccgggggagatcgagatcctctcgcccaatgtcgatatcaactgttga

SEQ ID NO: 322957 - DNA, 3954 bp, Pseudomonas aeruginosa
atgagcggcctaccggtttcccatgtcggcgagaaagtctcgggaggggttatctccaccggctcgcccaccgtgcacgtcggcagcagcgcggtcggcctggccgaccgggtgtccgcctgcgtgccgttggtgggcaagccggtcaacccgatgctcggcagcaagctgctgccggaagaggtcgatttcgccctggcggcgccggacaccttcaccttcgcccgtggctacctgtcgagcaacccccgtatcggccggctcggccggggctggtggctgccgggcgagagcatgcacctggaactgagcgaagacgcctgcgtgctggtcgacgcccagggccgccggatcggctttcctgcgctggctcccggtgcccagcattattccggcagcgaggagctgtggctgcgccgcggcggttcgagcggcggcgaagcgcaggcctggcgcgggcgctgggcggcggtgccggccgaactgcagacgcaggagggctccgtgctggtgctgtccggccacagctacctgcatttccagcgttgccccgacggtatctggcgcctgcaggccagcttcggccgcgccggctaccgcaccgagttccgctggagcggacgtggcctgctcaccggcgtgcgcgacagcgccgggcgcagctatgcgctggtctaccagcaagcctgcgagccgagcgagggcgacgacggcctgcgtctgttcggcgtgatcctggccagccacgacggaccgcctccggactacatcgatccgcagagcccagggctcgactggctggtgcgctaccagttcagcgacagcggcgatctgatcgccgtgcgcgaccgtcttggccaggtggtccgggtattcgcctggcgcgagcacatgctggtcgcccacggcgaaccgggcgggctggaggttcgctacgagtgggatgtccatgctccgcacgggcgggtcgtgaagcagatcgaggcgggcggcctgacccgtaccttccgctacctgcgcgatgccaccgaggtcagcgacagcctcggccgcgtcgaacgctacgagttcgccggcgagggcgggcagcggcgctggaccgcgctggtcagggccgacggcagccgtagcgagttcgactacgacctgttcggccgcctggtcgccatgcgcgatccgctgggacgggagacgcggcgccggcgcgatggccaggggcggatgctcgaggaggagtcgccgggcaaggcgcgctatcgcaagcgcgtcgacgaagagaccgggctgctggtcgagctggaggacgcgatgcagcgccgctggaccttcgagcgcgacgaacggggcaatgcgacgacggtgcgcggcccggccggcagcacccgctacgcctacgaagacccgcgcctgcccgaccggccgacgcgaatcgtcgacccgcgcggcggcgagcggcgcctggagtggaaccgcttcggcctgttggccgcgttgaccgattgttccggccaggtctggcgttacgactacgacaacgaaggacgtttggtcgccagcagcgacccgctgggacaactgacccggcgccgctacgacccgctggggcaactgatcggcctggaattggccgacggcagcgccctgagctatgaatacgacgcccttgggcggcagatccgtatcgccgatgccgaggggcacgccacgctgttttcctgggggcacggcgatctgctggcgcgggtttccgacgccggcggcggcgaattgtcctacctgcacgacgaagccggcaggctggtcgccctgaccaacgagaacggcgtccaggcgcagttccgctacgacctgctggaccgtctggtggaagagaccggcttcgacggtcgtcgccaacgctatcgctacaacgccgctgacgaactgatcgcccgcgaggatgccgacggtcgcgagaccacctatgcctacgaccgcgacggccgcctggcgagcatccgggttcccgccaccgagcacgcaccggccctggtcgagcgttaccgctggttggccgacggccgcctggccagcgccggcggggcggattgcgaggtgcgctacacgtacgacgaggtcggtaacctgcgcctggaaagccaggtacatgccgacggttgggtctacagcgtcgagcacagccacgacgcgctaggcgtgcgccagaccagccgctacggcgacgcgccgccggtcgcctggctgacctatggcccgggtcatctgcacggcgcgctggtcggtgcggtcgagctggccttcgagcgcgatgccctgcaccgcgaggtgcgtcgcgacgcccgccgcgacgggcaggatgacgcgttgttcacccaggagcgccagcacgcgccgctgggacgcctgcagcgcagccgcctgcgtctggccggcggtttcgactggcagcgcggctatcgctacgacggacttggacaactggtcggcatcgacgacaaccagtatccgtcggtgcgctacgaatacgacctcggcggtcgcctgctggccagccggcgcgctggcgcggcggccagcacctaccgctacgacgccgccggcaaccgcctggagggcgtcggcgagtacgcgcgcgaggacgctcgccaggcattcgccgagaacgaactgtaccgctccggtttcagtcgctccgaggcgcgcgcgaaccaggccggcgaaggcccggcgcgctgggccggcaaccgcgtggagaggatcgccggcaaccgctatcgcttcgatgcgctgggcaacctggtcgagcgtatcggcgccgacggcgagcgcctgcgcctggcctacgacggcgcgcagcgcctggtccatctgacgcgcgattacgccgacggcacgcggctggaggcgcgctaccgctacgacgcgctgtcgcgacggatcgccaaggtggtgctgcgcgacggtgtcgagcagcaggtgcgcttcggctgggaaggcgatcgccaatgcgccgaagcctttgcgcgggaactgcgcaccaccgttcacgaaccgggcggtttcgtcccgttgctgcgcctggagcaggcctgcgagcccgatcccccggagctgctgcaactgcgccaggcgttcgccgccgaaggccagccgctgccggcgcaatgcgtgccggcgctgggcgaggcgcggatcgctttcttccacaccgatcacctcggtacccccctgcagctgagcgacgaacgtggccaactgcgttggcagggcgttccggacgactggcgggcggtagcgccggaacgacagccgggtgcgcagccgatccgcttccaggggcagtaccacgatgaggaaagcggcctctactacaaccgctaccgttactacctgccggaagccgggcgctatgccagccaggacccgctcggcctgggcggtggccccaacccctatgcctacgcgctgaacgcgcccacgctggcctacgatcccaccggcctgatcatcccgctggtggtgatcggcgccttcgccgcccgcgccgcgatcggagcggcgctgggcgccggcatcgagctggggatgcagaccggcaagcaggtgctggggcagatgaaggacaactgggacagcgatcgcgacctcaccgatatcaagtggaagtgcatcgacatcaactggaaacacgtcggcgcctcggcggccatcggcaccgtggcgccgggcatgctcagcaccggcaagaccgtggtgcagtccgccaaggcgatcaggaccctttccggacaggcggccaacaccgccaaccgcgcggccaagctggccgcgcgcaaggccgcccatgccgataccatcaagaaggccgtggccacccaggccgcctggcagacgggcaagcagatcgtcaaatgcccgctgaaggacgaagaagaggagtgcccgccgcaatga

SEQ ID NO: 322958 - DNA, 192 bp, Pseudomonas aeruginosa
atgatcaagcattacctgctgatgaccctcgtctgcataccgctggcgttgctctatgtctgcctggaatggttcttcggcaacacctgggtgaccgtcggggtgttcttcggcgtgctcgtcgtgctgcgcctcgggctctacctctaccgccgctcgaagggcatcagggacggctacctggacgagtga

SEQ ID NO: 322959 - DNA, 963 bp, Pseudomonas aeruginosa
atgcacgacctgcctacctacgacgatgtgatcgccgccgccgcgcggatcgccgggcatgccaaccgcacgccggtgatgtcctcgcgtaccctcgacgaagaactcggcgcggaagtcttcttcaaatgcgaaaacctgcagcgcatgggagcgttcaagttccgcggcgccttcaacgcgctgtcgcggttttccgctgagcagcgtgccgccggggtggtggcgttctcctccggcaaccacgcccaggccatcgccctctcggcgcgcttgctggggatcccggcgaccatcgtgatgccggccgacgcgccggcggtgaagatcgaggcgacccgtggctacggcgggcaggtagtgctctatgaccgctatacggaagatcgcgagcagatcggccgcgacctggcgcagcgccatggcctgaccctgatcccgccctacgatcaccccgacgtgctggccgggcagggcaccgcggccaaggaactgttcgaagaagtcggtccgctggacgccttcttcgcgcccctcggcggcggcggcttgctctccggctgcgccctggcgatccgcgcgctggcgccggcctgccggatctacggggtggagccggaggccggcaacgatggccagcgttcgctgcgcagcggcgccatcgtgcatatcgatacgccgcagaccctcgccgatggcgcccagacccagcatttgggcaatctcaccttcccgctgatccagcgcaacgtcgatgacatcctcaccgccagcgacgccgaactggtggatggcatgcgcttcctcgccgcgcggatgaagctgctggtcgagcccaccggttgcctcggcctggccgccgcccgccagcgcaaggacgaattgcgcggcaagcgggtcgggatcctgctcagcggcggtaacgtcgacctggcgcgtttctgcgccttgctcggcggctag

SEQ ID NO: 322960 - DNA, 1242 bp, Pseudomonas aeruginosa
atgggacagtacgtcagcatcgccgcgtccgacggcagcggccggttcgacgcgtatctcgcgctccccgccagcggcaaggggccgggcgtggtgatcggtcaggaaatcttcggcgtcaacgcgaacatgcgcgcggtggccgacctgtacgccgaagagggctacgtggccctggtccccgacctgttctggcggctgcagccgggcgtcgacctgggctacgacgaagcggccttcgccaaggccatcgagctgttccagcgcatcgacctggacgccgcggtggacgacatcgccgcctgtatcgagcacctgcgccaacgcgaggaggtggtccacgccgggatcggcttcgtcggcttctgcatgggcggcaagctggcctacctcgccgcgacgcgcaccgacgtctcctgctcggtgggctactacggcatgggcatcgaggcgctgctcgacgaggcgaaacagatcaagggccggctggtgctgcatttcgccgaacaggacgcctattgcccgcagcaggcccgcgacgcgatcctgccctgcctgcgcaacctgcccaagaccgagttgtacctctaccccggcgtcgatcacgccttcgcccgcgtcggcggcatgcacttcgacaagccggcctacctgatggctcacgaacgcagcatcgccgccctgaagcgggagatcgggccgaacttcgacctctccgcgctgtgggacgagcatgtgcgccacgagttcgatacccgcgacgtcgccgcgaccatggcgaccatggtcgccgagccctacgtcaaccatgtcccgaccctcaccggcggcgtcggccagcgcgaactgagccgcttctaccgccatcacttcatccacggcaacccgccggacatgaccctcacgccgatttcgcggacggtgggggcgctgcaggtggtcgacgagttcgtcatgcgcttcacccacagctgcgagatcgactggctgctgcccggcgtcccacccaccgggcgcttcgtggaaatccccatgctcggcgtggtgcgctttcgcggcgaccgcctttaccacgagcacatctattgggaccaggccggcgtgctggtgcagatcggcctgctcgacccgcagggcctgccggtcgcgggggtggaaagcgcgcgcaagctgctcgacgaaagcctgccgtcgaaccgcctgatggcgcgctgggcagccagcgaaggactcggcctctag

SEQ ID NO: 322961 - DNA, 930 bp, Pseudomonas aeruginosa
atgcaaccgttcgacagccggcaggccgatgaagtcgccacgctcctggccctggccgagcacggttcgttcgccgccgccggccgcgccctgcaacgccatccctcggtgctctcgaagcggctcggcgcactggagcgtcgcctcggcatccgcctggtcgaacgcaccacccggcaactgcgcttcaccgatgaaggcgagcgcctggcgagccgcttccgccaggccgtcgacctgctcgacgaggccgagcacgaagccagcctgggcgccgcgcaactgcgcggacgcctgcgcatcgccctgccgtcggcgatgggccggctctggctcggtccgctgctggcggagttcgccctggcgcatccgcaggtggtgctggaaaccgactattcggagcgcttcgtcgacatcatcgcggaaggcttcgacctcgcgatccgggtcggcgaactggccgacagccgcctggtggccaggcggctgtgcgcccatcggcgcatcctcggcgccgctcccgactacctggagcggcatggggtaccgcgtatcccggccgacctggcggcacataattgcctcggcttcagcggactgcattcgtacccggagtggaagctgacccgccaggacgaacagcagcccgtgcgggtacgcggctcgatggtcagcaacgacaacgaggccctgctctgcgccgcacgccagggcctgggtatcttcgccgccggcgagtggctgatgagccgcgacctcgaagccggcaggctggtacgggtgctgccggagtggcaactggacgccgacgccggcgtctacctggtgcgcccctcggcgcgctacgccacggcagcggccagcgcgttccgccaatgggtggaagcgcggttcgccgctggcccgccctggcagcgccagcgggcctga

SEQ ID NO: 322962 - DNA, 975 bp, Pseudomonas aeruginosa
atgcccagtcgcatcaccctcaacgcaaacggagaccccgaggtcctgcgcctggagcaagtccaggcgcagcaaccgggccccggcgaggtctggctggagcaggccgccatcggcgtcaatccgctggacctcggccagcgctcgggagcggtaccgattccgctgccgtccggcctcggcctggaaggcgccggagtagtcgccgcgctgggtccgggagtctccggactggcgccgggcgaccgcgtcgcctatgccaccggcccgctgggcgcctatgccagcgcccggctctaccccgccgagcgcttgctgaagctgcccgacacactcgctttcgaggacgcggcggcgctgctgttcaagggcatcaccgcgcactacctgctgcacgccacctaccccgtcgggcccggcacacgcatcctgctgtacggcgcggcgggcgccgtcggccagttgatggcggcctgggcccggcacctgggcgcctgggtgatcggcgtggtgtcgaaggcggaaagcgtcgagcgggccagggctgccggctgcgacgaggtgctggtgttcgacgcggccagtctcgccgcccaggtcgccgagctgaccgccgggcgcaaggtcgatgtggtctacgaccccatcggtcgcgctaccctcgaggcatccctggacagcttgcgtccgcgcggcctgctggtgtccttcggcgctacctccggcgtgccgccagccgtcgaagtcgccaccctcaacgccaagggttcgctgttcctcacccgtccctcgctcgccgcccacaccgccaacccggaggaataccggctacgcgcgcaggctgtgctgcgcgcccatgcagacggtgtcatccagccccaggtctggcggcgctacccgctggccgaggcggccgtggcgcataccgatctgctggagggacgctcgcaaggcgcgctggtactcttgccctga

SEQ ID NO: 322963 - DNA, 753 bp, Pseudomonas aeruginosa
atgacggcacctttcaaggatcatttctccacgggttcggcgaactacgccgcacatcgtccgacctacccggcgcagttggtcgacgagctggccgcgctctgccccggcacccgcctggccctggactgcggctgcggcactggacagctcacggtgctgttggccgagcgtttcgaacgggtggtcggtaccgacgccagcgccgcgcagatcgacaaggcgcaggctcgcgagcgggtcgagtatcgcgtggccctggccgaggacagcggactggcggcggccagcgccgacctggtgacggtcgcccaggccgcccactggctggacctgccgcgcttctacgaggaagtccggcgtgtggcccgcgcggacgccatcctggccctggttacctatggcgtattgcatgtcgacggacccatggaaccgctggtccagcacttctaccaccaggtcgtcggcccctactggcctgccgagcggcgccacgtggaggagggctaccgcagtctgccgttccccttcgaggagcgtcgcctgccggacctggccatcgaggtggcctggaccctggacgaactgctgggctatgtcggtacctggtcggcggtgaaggaggccggcaaggcccttggccaggatccgggcgccgcgttcgtcgatgagctgcgcgaagcctggggcgacccgcagacgcgctatcgggtcagttggccgctgacggtgcgcgccggggtgatccgctga

SEQ ID NO: 322964 - DNA, 804 bp, Pseudomonas aeruginosa
gtgagtggttccctcttggtaccggccagtctcgccagtcgcatcaggctcctgctggtcatgacccggcgcgaggtcgaactgcgttatcgcgacgccatgttgggccgcatctggatcatcgtctcgccgttcctgctcttgctgatctatacgtttgtcttcggcttcgtgctgaagtcgcgctggggtggaagccagagcacgctctccttcgccttgaccctgttttccggactcctgctgaacgggatcctcgctgaaagcctgtccagggccccgactatcatccaggccaacgccaactacgtgaagaagctggtttttcccctggagatactccccctcacaccgctgctggccgctttcttcaacgccatgctcggctacctggtgctctgtatctttcttctcttcagcggcgtcgagccaggctggcaactggttctgctaccgcttgccctgctccccttcctgctctgcgtgacggggctggcgtggttcctcgcgggactcggggtctatgttcgcgacatagggcagttcgtccagtttctcctggtgcttctgctattcatcagcccggtgttctatccgctgtcatccttgccaccggtaatgcagccctacctgtacctcaatccgctgacgatcccggtggaaatggtcagggcgatccttttcgatgctccctatccgacccttggggtcttcagcgtttattgcgttgcgtctctgctggtctgttcatcgggcttcctctggttccgtcgggttcaggaaggttttgcagatgtcctctga

SEQ ID NO: 322965 - DNA, 1728 bp, Pseudomonas aeruginosa
atgtcctctgaggccgtttccccgggcccgcagatgacggccgagttgataccgctggggcagcgtttgctcgaacgcgggttggtgagcggccaggaactcgagcgggcgctcgacctgcaacgccggcttggcggccgtctgggaggcattctcgtgcgttccggagccatctcggaaaataccctcatgcaggtgctggcggagcaactgcggttgccgctggtgggggacgacctgcggaagccgagcgaagagtccatcgccgcattcctgctcagtaccccgatcaataccgactggttcgtcgaagagcaactggtggtctgggaggagggcgagcaactgctgttcgcggcgcgtgatccgttatctccttcgatacgcgaaaccctgggctatttctatccggagcgctcgattcaagcagtgctgtgccgctcccaggatctggacggctggttggagcattccctggacctggcccggcaaggtgcggatcggcacgcctacggcagcgaagacatccgctacctgcgggagctggcggaggaggcgccggtagtcgaactcgtcaacaacgtgatgagccaggccatggaaaagcgctcttcggatattcacatcgaaccccgggagttcgacttccgtatccgcttccgcgtcgacggcgtcctgcacgaccaactgagccttccccgcgagcgattcgcggcggtcgtctcgcggatcaagctgatctccgccatcgacatcgcggagcgacggttgccgcaggatggacgcatgagcatccgggtcagcggtacggagctcgacgtgcgggtctccaccttgccaggggtgcatggcgaatcggtggtcatgcgcctgttgccgaaggagcgcgaggggttgcgcctggaccggctcgggatgctcccggaccacttgcggaggatgcgtgcatgggtagcggaaccacacggcatcatcctggtgaccggccccaccggatcgggcaagtccaccacgctctatggcgcgctggaggaaatcaatgatggcgtgcgcaagctcatcagcgtggaagatcccgtggagtaccaggtgcccaacatcacccaggtccaagtccatgccgacatcggcctgaccttcgctgccgccttgcgctcgatcctgcggcaggatcccgatgtgatcatgatcggggagatacgcgacctggagacggcggagatcgccgtacagtcctcgctcaccggtcacctggtgctttcgaccctgcataccaacgatgcggtgagtgccttcacgcgcttgatcgacatgggcgtggaacccttcctggtggcttcgccggtgcgcggtgtccaggcccagcgactggtgcgcaggttgtgcgcccactgcgcggaaccttgcgagccaacccttgctgcggccgatctggcagcgaccgaggcggccaccgcgcggctgttcccggggcaggcagcgcaatggcgcgtggcgcgaggctgcggccgctgcgaaggtaccggctacagcggccgtgtgggcatctacgaactcgtcgatctgtcttccgagatgcgcgacctgatcgtgcagagagcttccctcgaacagatgcatcggcttgccgccagccagggacagcgcaatctgcgtgaagatggcttgatcaaggcctggttgggtatgaccagtcttgacgaggtgcatcgcgtgaccagcggctaa

SEQ ID NO: 322966 - DNA, 1188 bp, Pseudomonas aeruginosa
atgaatttcatctaccaagccgtcgatcgcaagggcaggcgcgttcgtggcgaactctgcctccccacgcgccaggatgcgctgcggcagttgcagcgccaggggctcaccccgctcagcctggaggtgaaacgccgcaacctgggctcgcgacgtcggctcaaggccgaggaattgaacatggccatccacgagctggccaccatgctcgcggcgggagtgagcatggccgacgcggtggaggcccaggagcgaggcgcgcgccacccgaagttgatttccgccctgcaggcgatggccaatggtctgcgccaggggcaatcctttcccgtagtgctggagagcgccggcctcgacttgccgcgctatgtatatcaactggtggcggccggcgagatgaccggaaacctcgcaggagccctgagggactgtgccacgcagatggaatacgaacggcgaacccgcgccgagttgcaaggggcgctgatctaccctgcgattctggtgctcagcggggtgctcgccgtggcgaccctgttcgtcttcgtcgttccgaaattcgccaatctcctgaacgagaccgcccagcttccgtggcttgcctgggcagtgctgagcatcggggtatggagcaacgagagttccggcttgctggcgttcgccgtcctgctgcttgctggcggcattgccgtggcgctgcgcaatccgacgctccgcgcccatgcgctcgaccagttggtgcgcctgcccgtagtcggggaatggttgatgcaggcggaaatagcgcaatggtcgaaggtgcttggaaccctgctgggaaatcgtgtgccgctggtggaggccctggcgctttccgccgagggcgtccgcattgcccggcagcgccggaccctggagcgagtcacccaggatgtgcgggccggcatcgccttgtcggcagcgttggaggagcgccaggcggtcacgtccatcggttcgagcctggtgcgagttggagaggcctccgggcagctcgcggagatgctgcagagcctggcgacgctctatggcgaggccgggcaggcgcgaatgaaaaaggccctggtgctgatcgagcctctggcgatcctgctgatcggctctgtgttcggcctgatcattaccggcgtggtactggcgattaccagcgccaacgacatggtgctttga

SEQ ID NO: 322967 - DNA, 435 bp, Pseudomonas aeruginosa
atgaacagagctgcacaacagggcttcaccctgctcgagatgattgtggtgttggtgattatcggcatgctgatggggctcgtcgggccgcgactgttcaatcaggccgacaaggcgaaggcgcagacggcggatacccaggtgaagatgctcaagggcgcgttgctcaccatgcgcctggacatcggccggctgccgaccgaagaagaaggcctggcgctactcaacacgccgccttccgatgaacgtctcggggctttctggcacgggccctacctcgagggcggcgtaccgctggacccctggaaccggccttacctgtacagcgacaggccgagtgccgaacaacccttcactctctacagccagggcgcggatgggcagcccggtgggaaaggcctggatgccgatgtcggttacgcgcccaaacgttga

SEQ ID NO: 322968 - DNA, 438 bp, Pseudomonas aeruginosa
atgggcagcccggtgggaaaggcctggatgccgatgtcggttacgcgcccaaacgttgaccaggccgcgttcaccttgctcgaactgctggtggtgctggtgatcgtcggggccattgctgcggtggcgttgcccggcctggtgaggatgcaggagacctgggcgcgcaggaccgcgctggacgatctgttcaatcaattgcagaccttgggctatcgcgtgcgcagcgatgggcgggagctgctcattggtgagagcggggcggttcccgagcagttgctgcgactgcccgatggctggacggttactgctcggccgccgatacgttacatggcaaacggagtttgcctgggcggaaagttgcaggtccatcatgggcgcgcgacacatacgctgctgcttcagccccctctctgcgcgcccgggacgatccgctga

SEQ ID NO: 322969 - DNA, 426 bp, Pseudomonas aeruginosa
atgccggcgcggcaggaaggcttcacgctcctggaggcggtggttgcgctgacgctcctggcagtggtcggcggtgcgcttttcgcctggctcaacagtgcctttcggagcatgcagcgggtcgaggcggccgagctgcgcatcgagacggcccgggtggcgatggcctatctggagcgcatgaaccctgcgctcgaacccgcaggcagggcccggctggggcattaccggctggagtggcgaagttcgccgctgtccgcgtcgaaagcggcggtgggccgccatagcggcagtccgggcatctacgacgtgaccttgttcagggtcgtcgccagcatccgggccggcgatggaacgccgcagacgctgcaactggagcttcccggttacgtggtcatccccgcgcgactgggtgatggaccatga

SEQ ID NO: 322970 - DNA, 591 bp, Pseudomonas aeruginosa
atgatccgctcgcgacgaaaacagggtgcattcaccctgctcgagatgatcgtggtgctgctggtcgtttccttcatcggcacgttgctcatgcaagggttgagctatgccagcaaggccaaccagtccttgcaccagaacctggggcgcggacaggtccgggcgctgaccttcgattggttccgtgatgcggtggagaacctggtcgctcccgaggctggcgaggtccgctggcgtttgcgaggggacgaactcagtttcgaggccatgtctgccgcggccctggatcgccgtgcgggcatcccgacgcccttggccttccggctcgagcggcgggcaggagaggaccggaccgagttgatctatgtgcgaaggctggaggacagtcgctggcccctcctgcatctgcgcggcgaagctcgcttccgctatctggacggtcacggccagtggcaccgggactggccgccgagcgcgcaactggccgatacccttcccgaggcgatggcactgacggctcccgaggagcgcctgtttgtccttgtcgcggtcgcgctgcccagagcgaggcccgccgaacatgatttctga

SEQ ID NO: 322971 - DNA, 1080 bp, Pseudomonas aeruginosa
atgatttctgatggcgcatgccgacatgcggcgtctgcccgctcgtctggcttcgttctggtcggagtggtctggttcctggccatcatgaccctgctggccagtgccgctgtactctgggtcgggcgctcgctggatgccacggaaaaccggcgcaaggcgctgcttcgtgagctggaggagcatgccttgctggcgcgggtccaatggctggtggctacccagcgctataccgtcgcgggcctgagcgtaccgggaaatgctggcgccgcgccgagcaaggtggacatggacacttcgatcctgcccattggcggggagctgcctctggatggccgggagttctgcatggccaatggctggtgcgttgcgctgctcgatcgctccgcgcgcctcagtctttccggcatcgatccgcgggtactgtccaggctgctggcggggttgggggttcctgccgagcaggtgcaggtcatggtcgcccaatggttcagctatctctatcccggcgccgctccacgactgggtagcgccgcgcaagccagcgacaggtcctctccgggccaggcccggcgccgtccgttgcgctcggtgatggaagtcttccggctggaggcctggcgcccctgggaagcgcatttgctcgacgccggttggcgcgatctggttgcggcggacgaggcggcgctgaacatcaacaccgcggatgcccgaatcctgtctcttgcctggggactaccggaggacgctgtcggccgactgctgcaagcccgctggcagcgtccgttcacccggatgtcggacctgcatgacttcctcggggggcatgcgaggctggttcccgaggatggctgggcgcgcctggccagtccggtcctgtcgattcggctctacccgccaggagccgagcaggggacggaatacgaggtccgcttcaactcagagcaccgcctgctgccaccctggcagcttctctcgaagaggtccgtgaagataaatgatcgctactcgaatcctccgctgcatcccgatatcgcccccggggttcttgccgccccgcttgtggcaaggccgtggtaa

SEQ ID NO: 322972 - DNA, 444 bp, Pseudomonas aeruginosa
ttgccgcatgggctcatagccaccctgttgctgggatgcggattcaatctgggggaaggtttgtcctggtggtgggccgagcgtgcgctgcgaacgcagtacgaccagctgagcgaccaggtctcgccgatcctcagcgcacgcaaccaggccttgcagaccaatcggatggccacggagctggggcgcgctttgcagcatcgctcgcaggtggcgctgctgggacaggtggcggaactgttgccgaaggacagtcggttgctcgcctggcgctatcgaggctccgagctggacttgcggattggcaccgacagtgtcgacccgcgtctctatgtgcggcgtttcatggagtctgggagtttcgaagatgtcagggtggaaccttcgcagagcgaggggctatcgctgagcctggtcctgcgtacgccgggggagggtgcctga

SEQ ID NO: 322973 - DNA, 585 bp, Pseudomonas aeruginosa
atgtcggacttccagcgatcactgcagttccaggggcggaacctgcaacgacaatggcaggaaaaaccactcttgcgcatggccatctggagcctgtgcctgctgctggttgtgcatctggtcatgctcagcatggattggagggaggaacgaggggaggaatatcgtcgtctggccggggaatggctcaagctccaggacgtttcccggcagaccgcctggccggagcgggcgatgcaggcggagcaggtcctgaaccttcagcgagagcgcttctggcaggcgccgaatgcgtcgcaggcgagggccgatgtgcaggcctggctgaccgagcgggttcgcctggcgggcgtccctgacgcggaagtgagcgtactgcttcctcgcggcttcgagaagcaagggacgatcgcgcgtatcgaggcccaggttcgcgggcagttggagccagcctcgttcagtcggttgttgcaggatatagaagcggagcagcggcaagtagcggtggagtttctggaactgaacaatatgttgtcgcccatgctcaatctacagttgtcgttcctgttcgtagcggcctattga

SEQ ID NO: 322974 - DNA, 318 bp, Pseudomonas aeruginosa
atgctggagcacaactttcccatggataccattgccatgaagttcctgctgcccctgctgctgttatttccgctttccactctcgccgacgacaaggactacgaccaatgcatactcgactaccaacgcacggcgaagagcggggtggcggttcacttcatcacccaggcctgcgacaagttgtataacgacggttccttcctgctgtcgcgggaaaaggcttattacgagtgtctgctggagaacctgccgggggtggagaacaacctggcggcgcagaagatcaggagcgcttgcgaatcgaagtcgcagaattga

SEQ ID NO: 322975 - DNA, 354 bp, Pseudomonas aeruginosa
atgtccaaacttgccgagttccgcgaggcagagcgcaaacttcaggagcaactggccctgctggaaaagctgaaaagcgacagcagcctgaagcaggaactggaattcaaggacaagttgcaggcgttgatggacaagtacggcatgaccctgcacaacatcatcgccatcctcgaccccaaggctccggtcaccgtcagcgccgctccgcagcgccgtgcccgcgccctgaaggtctacaagaacccgaacaacggtgaagtcgtcgaaaccaagggcggcaaccacaaggttctgaaagcctggaaagaacagtacggttccgaaaccgtcgaatcctggctgcaacgctaa

SEQ ID NO: 322976 - DNA, 357 bp, Pseudomonas aeruginosa
gtggaactcttcaaagaattcaccttcgaatccgcccatcgcctgccccacgtccccgaaggtcacaaatgcgggcgcctgcacggccactcgttccgtgtcgccatccacatcgaaggcgaggtcgatccgcataccggctggatccgcgacttcgcggaaatcaaggcgatcttcaagccgatctacgagcaactcgaccacaattatctgaacgatattccaggcctggaaaaccccaccagcgaaaacctctgccgctggatctggcaacaactcaagccgctgttgccggaactctccaaggtccgcgtccacgaaacttgcaccagcggttgcgaatatcggggcgattga

SEQ ID NO: 322977 - DNA, 1554 bp, Pseudomonas aeruginosa
atgaccaccaatcccttgcttgccaccctgatcccgctggttgccgacctgtcccgcgacctgccggaagacgaacgctaccgccgcctgctccaggccctgcgcgacctgctgccctgcgacgccaccgcgctgctgcgcctggacggcgaatacctgatcccgctggcggtggacggcctcagcccggacaccctcggccggcgcttccgggtcggtgaacatccgcgcctcgaggccctcctggagcgccgcgggccgacccgcttccccgccgactgcggcctgcccgatccctacgacggtctggtggaaggcctccacggccacctggaaatccatgattgcctgggctgtccgctgtacctcgacgaccagccctggggcttgctgaccctggataccctcgatccgtcgcgcttcgccagcgccgacctggataccctggaggccttcgccagcctcgccgccgccacggtcaaggccagcgagcggatgcgcgacctgacccgccgcgccgaggacgagcaccagcgcgccgaggcctatctcgaagccgctggcgagcggccacgggaaatgatcggccagagcgccgcgcacaaggcgctgctggaagaaatccgcctggtcgccaacagcgacctgagcgtactgatcaccggcgagaccggggtcggcaaggaactggtggcgcaatccatccaccggcattccatgcgcagcggcaagccgatgatcagtctcaactgcgccgcgctgcccgagaccctggtggaaagcgaattgttcggccatgtgcgcggcgccttctccggcgcggtcaacgaacggcgcggcaagttcgaactggccgacggcggcagcctgttcctcgacgaggtcggcgagttgccgctggcggtgcaggccaagctgctccgcgtgctgcagagcgggcagttgcagcgggtcggctccgatcgcgagcaccgcgtcgacgtacgcctgatcgcagccaccaaccgcgacctggccgaggaagtacgtgccgggcgcttccgcgccgatctctaccatcgcctcagcgtctatcccttgcgcgtgccgccgctgcgcgagcgcggccgcgatatcctcctgctggccggctacttcctcgaggaaaaccgaccgcgcctgggactgcgtagcctgcgcctggaccacgaggcccaggccgcgctcctcgactatcgctggccgggcaacgtgcgcgaactcgagcacctggtcggccgcgcctcgctcaaggccctcggccacaatccggagcggtcgcggatcgtcaccctgcatcggcaggatctcgacctgcccgcggaaacccccgcgccacctcgcagcgtggtcgagcccgcgcccgccgcgccaacgaccggtcactcgttgcgcgcggccaccgacgcctaccaacgccacctgatccaggactgcctggcccgtcaccagggaagctgggcctcggctgcacgcgagctgggcctggatcgcgccaacctggcgcgcctggcgcgccgtctgcaactcaggtga

SEQ ID NO: 322978 - DNA, 1182 bp, Pseudomonas aeruginosa
atgttgtccaatgcccaacgtgccctcatcaaagccaccgtaccgctgctggagaccggcggtgaagcgctgatcacccatttctaccgcaccatgctcggcgagtaccccgaggttcgcccgctgttcaaccaggcccaccaggccagcggcgaccagccgcgggcgctggccaatggcgtgctgatgtacgccaggcacatcgaccagttgcaggaactcggcccgctggtggccaaggtggtgaacaagcatgtctccctgcaggtgttgcccgaacactatccgatcgtcggcacttgcctgttgcgggcgatccgcgaggtcctcggcgaacagatcgccaccgacgaagtcctcgaagcctggggcgcggcctaccagcaactggccgacctgctgatcgaggccgaggagtcggtgtatgccgccagcgcccaggccgagggcggctggcgcggcgtgcggcgcttccgcgtggcacgcaagcaggcggagagcgaggaaatcacctcgttctacctggagccggtggacggccagccgctgctggcgttccagccgggacagtacatcggcctgcggctggacatcgacggcgaggaagtgcgccgcaactattcgctttccgctgccagcaacggccgcgaataccgcatcagcgtcaagcgcgaggcgggtggacgggtctccaattacctgcatgaccgggtcgccgagggcgacgagctggatctgtttccgccggctggcgatttcgtcctgcgtgacagcgacaagccgctggtgctgatcaccgccggcgtcggcatcaccccggccctggccatgttgcaggaagcgctgccgcaggcgcggccgatccgcttcatccattgcgcccggcatggcggcgtgcatgccttccgcgactggatcgaagacgtgtcggcgcagcacgagcaggtcgagcacttcttctgctacagcgaaccgcgtgccggcgacagtgccgacgccgagggattgctgagccgcgagaaactggccgactggttgccgcaggagcgcgacctggacgcctacttcctcggaccccggcctttcatggcgcaggtcaagcgccacctggccgacctcggcgtaccctcgcagcaatgccactacgagttcttcggtccggccgccgcgctggacgcctga

SEQ ID NO: 322979 - DNA, 258 bp, Pseudomonas aeruginosa
atgaacgctctgttcgattgtccacggcgggtgctgcggatcggtcacgggctgctggcggccggcctggcgctgctcgtcgccggcgtgatcgccgcctatttcctcgaccgctacctgaacatgccggcgctggtgttttcccatgcgctggtgatcctcggcccgaccctgttgaagatcggctacgtgatgcgcctgagcgcgctgttctgcatgcgtcgacccggttgggaggtctgctgtgcaagtgcttga

SEQ ID NO: 322980 - DNA, 1194 bp, Pseudomonas aeruginosa
gtgcaagtgcttgatcgttccaggctgatggccataccgccgatctggcgcctgggcttccgcccgttcttcctcggcggcgcgctgttcgcggtcctcgccatcgcgctctggctggcggcgctggccgggctctggagcggctggcaaccggtcggtggctggctggcctggcatcgtcacgaaatgctcttcggtttcggcgtggcgatcatcgccggcttcctgttgaccgccgtgcagacctggaccggcgtacccggcctgcagggcaaacccctggccctgctcgccgggctctggctggcggcgcgcctggcctggctattcgatgcgccgctggcgctgctgctggtgctgcaactgagcttcctgccgctattggcctgggctatcggtcgcagcctgtggcgggtgcggcagaagcgcaattacccggtggtgggcctgttgctgctgttgaccctggccgacgccctggtcctgctcggcctgttcgagggcaacgacgactggcaacggcgtgcctccatcgccgcgctatggctgatcgccgggatgatgaacctgatcggcgggcgggtgatcccgttcttcacccagcgcggtctcggccgtcagcagcaggtgccggcgatcgcctggctggacaatggcatcctgctgggctgcgtgctggtggcgctgctcaccgccgcgggcgtcacgacgcagccgacgccctggcttgcaggactgttcgccgccctcggtggtgcgcaactgtggcgcctgtggcgttggcgcgatcgcggcatctggcaggtgccgctgctctggtctctgcacctggcatatttctggatcgccgtggcgccgcttggcatggcgctctggagcctgggcctggcgctggcgccgagccaggcgctgcacgcgctggcggtgggcggcatgggcgggttgatcctggcgatgctggcacgggtcactctcggccataccggtcgcgcgctgcaaccgccggcagcgatgccctgggctttcgccctgctcaatctcggctgcgcggcgcgggtgttcctgcccagcctgttgccggcgaactgggcgctgcccctggcaggcggactgtgggctttggcgttcctgctgttcgcctggttctatgcgccgatgctgtgtcgtccgcgggtcgacggccatcccggttga

SEQ ID NO: 322981 - DNA, 267 bp, Pseudomonas aeruginosa
ttgctgagctttgttgaagacagcggctgcaccttcatccgcaacggcagcgaatacccggccgcggaagcccgcgcccacctgcagaagaagctcgactacctggagcgcaaggatctggtcgccagcagcgaggacttcatcgagcgcgccgcgacccagagcagcctcagcggcaagccctaccaggtgcgctgcgccacgcagacgcgcaactccgccgactggctgaaccaggagctgcggcgtctgcggcaagccccctga

SEQ ID NO: 322982 - DNA, 894 bp, Pseudomonas aeruginosa
atgaaactggccgtagcgctgatccacggcatcggcgaccagcccgatagccgcgacgaggacggtctgcacagctacgcccgcgaactggtggcggcgctgcgccgacgtctcggcgcggaagccggcgaggtggccttccagagcctgtactgggccagcgtactggacgcccgcgagctggcctacctcaagcgcatcgagcgcgagccgctgggctggcgctggctgcgccgggcggtgacgctattcctcggcgacgccagcggctaccgcaaggtcagcgccgcctacgacaccacctaccagcaggtccaccagcacgtgcgcagcgggatcatggccctgcgcgcgaaagtcgggccgcagacgccgctggtgatcctcgcccactccctgggcgggcacatcgtgtccaatttcatctgggaccagcagaaactcaaccgcacgccgagttgctcgatcgaccccttcctcggcctggaaaccctggccgggctggtcaccttcggttgcaacatcccgctgttcaccttcgcctacgagaaggtctgtccgatccgctttcccggccactgcctgcccccggccatccgccagcaggcacgctggctgaacgtctacgcgccggccgatccgctcggctatccgctgcggccgttgcagaactacgccgcggtcgtccacgaggacctcgccctgccggtcggtccctggtacaagcggcacaccccgttgagccacatggagtactggaacgatgcgcgctttcacgattacctggcggactacctgcgccgcctgttggctgctggcctcgagcctgccggcgctggccgcgccctccccgcaggcgagccaggagatcggccgcttgctgagctttgttga

SEQ ID NO: 322983 - DNA, 1083 bp, Pseudomonas aeruginosa
atgccagccatccagatcaagtcccccgcactgaccctcaaggccggtcgccgcgccctcgcccgcatccgcgagcgcggcctgcagccggccgacgtcggcatcgtccccggtgccgccggcgggccaaaggcgctgggcatccagggactggacctggcgatcttcggcgagtggctgccgcgcgccccgcgtgaacgctcgctgatcggcgcctccatcggttcctggcgcttcgccagtgcctgcctgcccgacgccgtggccggcctcacccgcctcggcgagctgtacacccggcagcgttttcccaagggcgtgagcatcgccgaagtctcgcgcaagtgcgcggcgatgctcgacgacctgctcgccggccaggacgcgcggatcctcgacaacccgctgtaccgcctcaacgtggtggtggtgaagagccacgggcgcctcgcccacgaccacaaggccagcctcggcctggggctgtcctcggtgatccgcgacaacctgatcggccgccgccatctgcaccgccacttcgaacgggtgatcctgcatgacgcccgccaggcgccgccgctggccgcgctgaccgacttcccgtcgcgctacctgcacctggacggcggcaacctgcgccaggcgctgctcgcctccggctcgatcccgatggtcatggaaggcgtccgcgacctgcctggcgccggccccggcacctaccgcgacggcggcctgctcgactaccatctcgacctgccctacgaggaccgcggcgtggtgctctacccgcacttcaccgacaaggtgatccccggctggttcgacaagggcttgccctggcgccgtggcgacgccgggcgcctgcaggacgtgctgctgctggcgccgtcgcgcgagtacctggcgcgcctgccgcacgccaagctgccggaccgcaaggacttcacccgctacctcggcgacgacgacggccgcgagcgctactggcgccaggcgatggcggaaagccgcaggctcggcgacgaattcctcgaactggtcgacggcggccggctcggcgaacgcctgcaagcgctggactga

SEQ ID NO: 322984 - DNA, 309 bp, Pseudomonas aeruginosa
atgaagaaactgactgccctgttcgccgccaccgccatcgccctgactgccggcctggcccaggcccgcgacctcggcccggacgaggcgctgaagctgcgtgacgccgggaccatcaagtccttcgaagagctgaacaagaacgccatcgccaagcatcccggctcgagcgtccacgataccgagctggaagaggaatacggccgctacatctaccaggtcgagttgcgcgacccgcagggcgtgaaatgggacctggagctggatgccgctaccggcgccgtgctcaaggaccaccaggacgactga

SEQ ID NO: 322985 - DNA, 315 bp, Pseudomonas aeruginosa
atgaagtggctcatgcgctacgccgggatcgtcgcactggtcctggcggtcatcagcctcgaagcgatggcgcgcgacctggaccaggacgaggtcctgcgcctgcgccaggacggtgtgatacagccgctcgaatccctcatgcaggaagccctggggcgttaccccggggcgcgcctgctggaggtcgagctggaagaggaagacgacgtgtatgtctacgaggtggagctgctcacccgcgacggcgtcgtgcgtgaactggaactggatgcccgcaacggccgcatcctgaaggacgaggaagacgactga

SEQ ID NO: 322986 - DNA, 672 bp, Pseudomonas aeruginosa
atgcggttgctgctggttgaggatcacgttcccctggccgacgaactgatggccagcctgacccgccagggctacgcggtggactggctggccgacggccgcgacgcggcggtgcagggcgccagcgaaccctacgacctgatcatcctcgacctcggcctgcccgggcgtcccggcctggagatactccaggagtggcgtgggctgggactcgcgactccggtgctgatcctcaccgcgcgcgattcctgggccgaacgcatcgatgggctcaaggccggtgccgacgactacctgaccaagccgttccatccggaagagctggccttgcgcatccaggccctgttgcgccgcgcccatgggctggccaaccagagccagctggaggccgccgggctgcgcctggacgagcagcgccagtgcgtgtgcctgaacggcgccgacgtcgacctgaccgccgccgaattccgcctgctgcgctatttcatgctgcaccccggccaggtcctgtccaaggggcacctggccgagcatctgtacgacggcgagaccgaacgcgattccaacgtcatcgaggtccacgtcaaccacctgcggcgcaagctcggccgcgaggtgatcgagacccgccgtggccagggctaccgctacgccggggtggccgccggatga

SEQ ID NO: 322987 - DNA, 1338 bp, Pseudomonas aeruginosa
atgaggtcgatccagcggcgcctgagcgtcggcctgttcgcggtgctgctggtggtcgggctggtcctcgcgcagaccggcctgtggctgttcgaccagggcctgcggcgctatttcgccggcaatctgcgcgaggaggcggagaacctgctggtggccatggtgcgcgggccgaacggcatgcaactggacgagcaacgcctcaacccggcgttccagcgcccgtattccgggcgctatttcgtcatcgagctggaaaaggacacctggcgctcacgctccctgtgggacagcgagctggaagtgccgcacaagaaagggctggtgcagggcctggtcgatgggcccgaggagcagcgactgctggtgttccgcggccactacaagcgcatgggccagaagctgcggatcgtggtggcgcaggactatacgccgatcctggaaagcttcgcccgtgtgcagtggatgggtctgggcgccggcgccctggcgctgctcctggtattgctgttgcagcgcctgaccgtgcgtcgttcgctgcgtccgctggaggaggtgcgcctgcagatcgcccagctgcagcagggccagcgtagccaactggacaaccaggctcccgaggaactggagccgctggtggagcagatcaaccacctgctggcgcacaccgaggagaccctgaagcgttcgcgcaacgccctgggcaacctcggtcacgccctgaagacgccgctggcggtgctggtcagcctcgccgagcgcgaggagatggcgcgccagccggagttgcaacaggtcctgcgcgaacagctggaacagatccagcagcgcctcggtcgcgagttgggcaaggcccgcctggtcggcgaagcgctgcctggcgcacatttcgattgcgccgaggagttgccgtcgctgtgcgacaccctgcgcctgatccacggcccgcacctgcaggtgagctggagcgcgccaccggggctgcgcctgccatgggaccgcgaggacctgctggagatgctcggcaatctgctggacaacgcctgcaagtgggccgatagcgaagtccgcctgactgtcgcgcagggcgagggcatggtccgcctgaaggtcgacgatgacggccccggcatcctccccgaccagcgccaggcggtgctcgagcggggtacccggctcgacgagcaggtcagcggccatggcctgggcctgggcatcgcgcgcgacatcgccgaggcctgcggtggccgcctgagtctcgaggacagcccgctgggcggcctgcgggtgagcgtcgagttgccgttgcagaagagcggccgcgccgccagggcttaa

SEQ ID NO: 322988 - DNA, 309 bp, Pseudomonas aeruginosa
atgaaacggcggacgagtacgggccgctggcgctgggcgctgatgctgccggtgctggtgttcctgttgggcgagtccagtggacagcgagaggaggggcggtcgccgcggttacccgcgcaggctcgctacgagcaggccgtggaaaacgcgttgcgcagcgagcgcggcgagccgcgacaggccgggacagcggcagcgaaggtggccgaggcgggagccccggcgcgtctgcgtggctggctgcgctcgctggcccgcctggcgatctgggggacctacggccccccggcgctattcaggccgtga

SEQ ID NO: 322989 - DNA, 2145 bp, Pseudomonas aeruginosa
atgttccttcgccgcctgtccatccaatggaagatcaccctgctggcaggcctctgcctgctcggcgtggtcgccttgctggtcggcctttcggtctaccgcatgcagcacagcagcgtgctggtgaaaagcgccagtacgcagatgctcgacgaatcggcgcgcctgcgcctggaagcccgcggggaattgcaggcgttacgcatccagcgctatttcatggatgccttccagtacggcaagggcttctcccggcagatcctgttcctccgcgaccaggcgcagaagcgcttcctcgatgcctacgacctgcgcgaagacctgacccgccaggtgcgcaccgcgctcgccgccaatcccgaggtgctcggcctgtacgtggtcttcgaacccaatgcgctggacggcaaggacgaactgttcgtcgaccagcccgccctgggcagcaacgacaagggacgcttctccctgtactgggcgcaggccacgccgggacagctggaatccgagtcgatgatcgagtccgaactcgccgacaccagcagcgggcccagcggcgcggcctacaacgcctggtacacctgcccgaaggaaagcgggcaaccctgcgtgctcgatccttacttcgacaaggtcggcgaacgccaactgctgatgaccagcatcgcctttcccctcgaactggatggcaaggtgatcggcgtgatgggcctggacatcaacctgagcaacctgcaggcgctcagcgaacagggcaaccgcgaactctacgacggcgtcggccaggtcggcatcctcagccccgccgggctgttcgccggcaacagccgcgacgccggcctgctcggcaagaacctggccaaggcggatccgcagcacgccggcgaactcctgcaactgctggccgccggcaagagccggttgttcaacgagaacgacgacctcaaggtgctgcaaccgttgcagccgattcccggcgccaagccctggggcgtgctcctcgaagtgccgaagagcgccctgctcggcccggccctggcgctggagcggcaactggacgacatgcgtcgcgaaggcacctgggtcgaactgggcctcggcctcggcgccgcggtgctcggcctgctggtgctgtggctgagcgcccgcggcgtgacccggccgatcctcggcgtcgcccacatgctgcgcgacatcgccagcggcgaaggcgacctgacccagcgtctgccgcacaccgggcgcgacgagctgggcgaactggccggttggttcaaccgttttctcgacaagctgcagccgatcatccgcgacgtgaaggtctcggtgcgcgatgcgcgcagtaccgccgaccagtcggcggcgatttccagccagaccagcgccggcatgcagcagcagttccgcgagatcgaccaggtcgccaccgcatcccacgagatgaccgccactgcccaggacgtcgcccgtagcgccgcccaggccgccgacgccgcgcgcggtgccgaccaggcgacccgcgacggcctggcgctgatcgaccgcaccacacagagcatcgacagcctggccgccaacctgaccagcgccatgggccaggtcgagcaactggccagcagcagcgaggaaatcggttcggtgctggaagtgatccgcgccatcgccgagcagaccaacctgctggcgctcaacgcggccatcgaggcggcccgcgccggcgacgccggccgcggcttcgcggtggtcgccgacgaagtgcgcaacctcgcccggcgcacccaggactcggtggaacagatccgcggggtgatcgaaggcctgcaacagggcacccgcgacgtggtcgacgccatgcatggcagccatcgccaggcccagggcagcgtcgagcaggtggatgaagcggtggccgcgctgcaacggatcggcgaggcggtgacggtgatcaacgacatgaacctgcagattgccagcgccgccgaggaacagagctcggtagccgaggagatcaaccgcaatgtcgcggcgatccgtgacgtcaccgagtcgctgtcgagccaggccgaggaatcggcccaggtcagtcagtcgctgaaccgcctggccaaccaccagcagggcctgatggaacagttcaaggcctga

SEQ ID NO: 322990 - DNA, 1326 bp, Pseudomonas aeruginosa
atgaacgcagtggtgctggcggtggggctgatgctcgtcctcagcctttgccgtgtgcatgtcgtgctggcgctgatcatcggcgcggtggtcggcggactgttcggtggcctaggcctggaggggactctcaaggccttcaacggcggcctcggcggcggcgccacggtggccctgtcgtacgccatgctcggcgccttcgccgtggccatcgctcgctccggcgtggcccatgcgctggccgacaaggtcctggcgctgctcggccggcacgacgagcagggcaagggcgccggtgcgttcaagtggatcctggtcggcctgctgctctgcgtggcggtatcctcgcagaatatcctgccgatccatatcgccttcatcccgctgctggtgccgccgctgctctatgtgctgagcaagctgcagatcgaccggcgattgatcgcctgcgtcatcaccttcggcctgatcaccccgtacatgttcctgccggtgggcttcggcaacatcttcctcaatgaaatcctgctggccaacgtggcgcgcaacggcgtcgacgtcagcgggatcaatgtcacccacgccatgttcatcccagccctgggcatgctcgccgggttgctcatcgcggtgctgttcagctaccgccgcaagcgcgtctacgacttgcagcggatcgagcaggccgaacgcgtcgatgtcagctacaacccgaagagcctggcggtggccggggtatccatcgtcgccgcgttcgtcgcacagctgtggctggactcgatgatcatcggcgcgctggtcggtttcgtggtcttctcgctgtccggcgtggtgcgctggaaggagaccgacgacctgttcaccgaaggcatgaagatgatggccaccatcggtttcatcatgatcgccgcggccggtttcgccgaggtgatgaaggccaccggcgaggtgcagagcctggtcgacgcctcggtggcctggatcggcaacagcaaggcggtcggcgccatgctgatgctgctggtcggcctgctggtcaccatgggcatcggctcgtcgttctccaccgtgccgatcatcgccgcgatcttcgtcccgctggcggtgcaactgggcttcagcccgctggccatcgtcagcatcgtcggcaccgccggcgcgctgggggatgcaggttctccggcgtcggactcgacccttgggccgacctccgggctcaacgtcgacggccagcacaatcacatctgggacaccgttgtgccgaccttcctgcactacaacctgccgttgctggtgttcggctgggccgccgcgatgttgctctga

SEQ ID NO: 322991 - DNA, 1992 bp, Pseudomonas aeruginosa
atggcggcgaactgggggttgcgcggcaaatcggtggtggcgctgttgctggcctgtgccctggcactggtcccggcggtgctgctgggctggcgcgcgatggacgacatccgtacgcacttcggcctggcctacgcgaagaacttcaccctgctgcaccggcagaagatcctcgccccggtctcccgcgaactggcgttgtcgcgccgtttcgccgaatcggtggtgacccgcgactggctgctgaaggaagacgacccggcgcgccgcgcgctgttcttccgcgaggccgagggctaccgcggcgacttccgcgaccacgcctacttcatcatcgccagcggctcccaccactactacttcaacgacggccgccaaccctacagcgaacggccgcgctacaccctggaggccggcgacccggaagacgcctggtacttcaataccctgcgcaacagcgccgcctacaacatcaacgtcaatgtcgacagcaagctgaacctgaccaaggtctggttcaacctggtgatccgcgaccagggccggcccatcggcctggccggcagcggcctggacctgagcggcttcctcgacgacttcatcatcgcccgcgagccgggcgtgacgccgatgatcgtcggcgacgacggcgccatccaggcccacccggaccgccgcctgatcgcctacagctccgccgccggcggcgccagcgaacgccaccgggtgttcgacctgctcgaccagccggaacagcgcgacgccctgcgcgaggccatgcgcctggcccgcgccaaggccggctcggtgcactgcctgtgggccggcctcgacggccgccagcaactcttcgccgtggcctacattccccaactgcgctggtacgtgctcaccgccgtcgacctgcacgccgcccaggtcctcgacaaccgctggctttggccgctggcgggcacgttcctgctgttgctggtggccctgctgctgggcttcgcctatgccgtcgagcgcctgctgttgcgccccctgcgcagcctcaagcgctcggccaaggcgatcgccgccgggcgctacgacacgccgctgccgctggcgcgccaggacgagatcggctcgctgtcgaaggccttcgccagcatggccgaccaggtccgccggcacaccgccgagctggaagacaaggtccaggagcgcacccaggcgctggaggaagccaaccgcgagatggccgccgcgcagaagaagatcggcgacagcctcgactacgccagcctgatccagcgcgcgatcctccccgaccgccagctcagcgccaccctcggcgagcatcacttcatcctgtggaaaccgcgcgacgtggtcggcggcgacttctacgtgtaccgcgagcaggccgacggctacctgatcggcgtggtcgactgcgccggtcacggcgtgcccggcgcgctgatgaccatgctcgcccgcgccgccatcgaccacgccatcgaggcggtgggcagccgcgacccggcggcgatcctcggcgagaccgaccaggcgatgcgcagcatgctcagccaggagcagatcccccaggcgctggccaccaacatggatgccgggctggtctgggtcgaccgccggcgccgccagctggccttcgccggggcgaagatctcgctgtacgccagcgacggcgaggaggtccaggaactcaagggcgcgcgccgggcgatcggcgacaagcgccgtggcgactaccgcaacatcgaggtaccgctggcgccgggctggaccttctacctgagcaccgacggtttcctcgaccaggccggcggcgaacacggcttcggcttcggcagccggcgcttcgccgacatgctccgcgaccacgcgcggcagccgctccccgggcaggccgaggccttcgtggcgacgctcgccgagtaccagggcgagcacccgcaacgcgacgacatcaccatcctgtccttccgattcgactag

SEQ ID NO: 322992 - DNA, 543 bp, Pseudomonas aeruginosa
atggaaacgctagacctgctggccatgcgtgaaagctacacccgccaacgcatcctgctctgcttcaacggaccgatctcgcgcagcctgatcgaggagataggccacgcgctgcgcaactacctgcacgccgaacaggccaagccgagcgaagcgatggacgtcttcgcggtgtacatcgagatgacccagaacatccgccactacgccaatctcaagggctacggcgaacacgaggcggcggccacggtagccatcgcccgcaacgaggacggccactacgtggtgtccgccggcaacctggtggaacgcgacgacggccagagcctggtgcgcagcatccaggccatcgccaacctcgacaaggccgccctcaaggccgcctacaaggagcagctacgccgcccgcgcgacagcggctgcgccagcggagccggtctcggcctgctggacatcgcccgcaagtccagcgaaccactggccgcatcgctgaaggaacagcccgacgggcgcgccttcttcagcctgcgcgccgtgatctga

SEQ ID NO: 322993 - DNA, 381 bp, Pseudomonas aeruginosa
atgagtgacctgcacatacccggcacccagtccacgcccgccatccagggcgactggcaggccggacgcctgtccatgcaaggcgattcctacccggaaaactcctatgaactgttcggccaggtgatcgactgggtcgagcgcttcctcgccgacgggcagcggccgctggaactggacctgcgcctgctgtacctgaacaccagttcgatcaaggccatgatggacatcctcgacctgctcgaagaggcccaccagggcggtcgcccggtcagcctgcgctggcactacgaccggcgcaacgaacgggtcgccgagctggccgaggagttccgcgaggactgcagcttccccttcgccatccaggcccacgacgagtag

SEQ ID NO: 322994 - DNA, 828 bp, Pseudomonas aeruginosa
atgagccgcgaacgcgaactggacgcctggatcgacggcctgctggccgatccgcagttccacgggcatccgctgcaccaggcgctggcccgcctgcgccagcaatcgctggagcaactggtgcggctggagcgcatcgcccggatctccgacggtttccagtcgatggcgcgggagcagaacctgtcgctgtccgagcgctaccacaagcagctgcggcgcctggaaaaggtggcgcggatctccgaccgctaccagcagatgatgcgcgacctcaacctggcgctgaaggaagcctcgatccgcgacccgctgaccggcctgcccaaccgacgcatgctgctggagcgcctcagggaggagaacgaacgctcccagcgccacggccagagctacgtgctggcaatgctcgatgtggacttcttcaagcaggtcaacgatacctggggccacgacagcggtgaccgggtgctggtggaaatcgcccgggccatggagtccgagctacgtgaatacgacctctgcggccgctggggcggcgaggaattcctcctgctgctgccgcagacccgcctgcaggacgccggcccggtactcgagcgggtgcgcgacagcgtacggaccctggcggtacgcgtcggcaccgaggcgctgagcgtcaccgccagcgtcggcgttaccgaacaccgcatcggcgaaacctattcgcagaccgtcaatcgcgccgacgccgcactgctcgacgccaagcgcagcggccgcgacaaatgcgtgttcgccgcgctcccgccgcttcctgccccttcccgcccggctccagcgcgctga

SEQ ID NO: 322995 - DNA, 591 bp, Pseudomonas aeruginosa
atgccgagcaccctgcaaggcctcgccgaataccgcgaggaaatccgcaagagccgcttccacaccatcgccgcgccggtggccgacgaggacgaggcgcaggcgttcatcgccgcccaccgcgacgcttccgccggacacaactgctgggcctggaagtgcggcgcgcagtaccgcttcagcgacgacggcgaacccggcggcagcgccgggcggccgatcctggcggccatcgagggacaggacatggactgcgtggcggtgctggtcagccgctggttcggtggcatcaagctcggcaccggcggcctcgcccgcgcctatggcggcggcgcggccaagtgcctgcagcaggcgccgcgcagcgagctggtcgagcgctgtcgggtgcgcttcgcctgtgccttcgccgaccacgcgctgctcaaggcgcgcagcctggcgctgggcgccagcgtggcggccgaagactacggcgccgacggcatcgtcctgaccctggagttgccggtggcgcgcttcgaggcgcttcaggcgctgctggtggacctcagccgaggccaggtgaggccgcagcggctggacgcctga

SEQ ID NO: 322996 - DNA, 666 bp, Pseudomonas aeruginosa
atgaccctgacagtgcccgcccacgacccggccgcccgcgacaagccggccgggcgcatccgccagaagaacgaggaggcgatcctcgccgcggccgaggaggagttcgcccgccacggcttcaagggcaccagcatgaacaccatcgcgcagaacgtcggcctgcccaaggccaacctgcactactacttcggcaacaagctgggcctctacacggcggtgctgagcaacatcctcgaactctgggacagtaccttcaacaccctcggcgtcgacgacgatccggccgaggcgctggcccgctacatccgcgccaagatggagttctcccgccgctacccgctggcctcgcggatcttcgccatggagatcatcagcggcggcgagtgcctcaccgcgcatttcaaccaggactaccgcagctggttccgcggccgcgccgcggtattcgaggcctggatcgccgccggccggatggacccggtggatcccgtgcacctgatcttcctgctctggggcagcacccagcactacgccgacttcgccagccagatcggcctggtcaccggccgcaagcgcatgtccaggcaggacttcgccgccgccgccgacaacctggtgcggatcatcctcaagggctgcggactgaccccgccggcggcctga

SEQ ID NO: 322997 - DNA, 1407 bp, Pseudomonas aeruginosa
atgcatagcgaagaccagcgccccaacgacctcatctacggcctcgacgaccggccgcgcccgcttcccgccttccttgccgcgctacagcacgtgctggccagcttcgtcggtatcgtcactccgccgctggtgatcggctcgctgctcggcctcggcgagcacctgccatacctgatcagcatggcgctgatggtttccggcgccggcaccctgatccaggcgcgccggccgttcggcatcggcgccgggatgatctgcctgcaaggcaccagcttcgccttcctcggcgccgtgctggccgccgggatgctggtgaagcagcgcggcggcggtcccgaggatatcctcgcgatgatcttcggcgtgtgcttcttcggcgccttcgtgcagatcgtcctcagtcgtttcctcggccatcttcgccgggtgatcacgccgctggtcaccggcatcgtcatcaccctgatcggcgtcagcctgatcaaggtcggcatcaccgacctcggcggcggagccgggacctcggacttcggcgcaccggccaatctcgcgctgggcgcgctggtgctgctgagcatcgtcctgctgaaccgctcgcgcctgccctggctgcgcctggccgccatcgtcatcggcctggcgctgggtaccctggcggcctgggcgaccggcctgttcgttccgcgggcgttgcccgagctgccgctggtcagcctgccgcagccgttccgcttcggcttcgccttcgactggatggccttcctgccggtggcgctgatctacctgatcagcagcatcgagacggtcggcgatctgaccgccaactgcatgctctcgcggcagcccctggagggaccggcgtacctgcagcggttgcgcggcggggtgctcggcgacggcgtcagttgcctgctggcagccaccttcagcgccttcccgaacaccaccttcgcgcagaacaacggggtgatccagctcaccggggtggccagccggcacgtcgggatctatatcggcggcgtgttgctggcgctcggcctgttcccctgggtcggcgcgatcctccagcagatccccaagccggtgctcggtggcgccaccctggtgatgttcggcagcgtcgccgccgccggcatccgcattctcggccagaccgcgatggaccgccgcagcgtgctgatcatcgccgcctcgttcggcgtcggcctcggcgtggccgcgcagccgaccctgctcgaccagatgccggcggtggtgaagaccctgttcgactcggcgatcaccagcggcggcatcaccgccatcctgctcaacctgctgctgcccgaggagcgcgttgccgaagcggcgcaggccagcgcgaagggcggcgccctggcgcgctggcgcaagccgctgggttga

SEQ ID NO: 322998 - DNA, 837 bp, Pseudomonas aeruginosa
atgagccgcacactcgccaccgtgatgctagccggggggctactggccgcaggccaggctgtcgccgaagaccatgacatgacgccgacccacgagaccgactcggggccgctgctctggcacaacgagagcctgacctacctctacggcaagaacttcaagatcaacccgccgatccagcagaccttcaccctggaacatgccagcggctggacctggggcgacctgttcatcttcttcgaccagatcaactacaacggcaaggaagacgccagcaacggcaagaacacctactacggcgagatcactccgcgcctgagcttcggcaagctcaccggagcggacctctccttcggcccggtgaaggacgtgctgctggccggcacctacgagttcggcgaaggcgacaccgaggcctacctgctcggcccgggcttcgacctggcgatccccggcttcgactacttccagctcaacttctactaccgcaagcccgacggcaaccgcgtgcgcgccggcgcctggcagatcaccccggtgtggtcctacaccattccggtgggcaactccgacatcctcatcgacggctacatggactgggtgatcaacaacaagagcgccagcaccagccgccgcaaccagagcgactatcacgccaacctgcacttcaacccacaggtcaagtacgacctgggcaaggccctcggctacgagcctaagcacctgtacgtgggcctggagtacgactactggtccgacaagtacggtgtgaaggactcgcagtacttcaccaccgaccagaacaccgcaagcttcctggtcaagtaccacttctga

SEQ ID NO: 322999 - DNA, 1617 bp, Pseudomonas aeruginosa
atgctcgacttctccgcccacgcgcttccctacgcctcgcaacgttcgccggtccatgcccgccgcggcatggtcgccacctcgcagccgcaggcggcgcaggtcgggttggagatattgcgccgtggcggcaacgccatcgacgcggcgatcgccaccgccgccgcgctgacggtggtcgagccgaccggctgcgggatcggcggcgacgccttcgccctggtctggacccgcggccgcctgcacggcctggacgccagcgggcgcgcgccgggcctgctcgatcgcgagcgggtgcgcgccgccggccacgagcggatgccgctgtacggctggacgccggtcaccgtgccgggctgtccggcggcctgggccgaactgtcgcggcgcttcggcaaattgccgttcgaacaactgctgcggccggcgatcgagctggcccgcgatggcttcccggtctcgccggtgatcgcccgcctgtggcaaagcggcctggacaagttccgcgcggcgttgccgcagcggcccgagctgcgggcctggttcgacgagttcctcatcgacggccgggcgccgcgcgccggcgaggtgttccgccagccgggccaggccgacaccctggacgagctggcgcgcagccagtgcgaaagcttctatcgcggcgagctggccagggccatcgtcggccacgccgagcgcagcggcggctacctgcgcgcggaggacctggccggctaccaggcgaagtgggtcgaaccgatctcactgaactaccgtggctatgacgtctgggagattccgccgagcggccagggcctgatcgccctgatgaccctgaacatcctcaagggcttcgaattcggcgagcgcgactgcgcgcggacctggcatcgccaactggaggcgatgaagctggcgtacgtcgacgggctgcactacatcagccagccgcagtcgatgcgggtctcggtcgaggaactgctgcacgaggactacgccgccagccgccgtgcgctgatcggcgagcgcgcgctcgatcccagacccggccagccgaggccgggcggcacggtgtacctggcctgtggcgacgaggagggcaacctggtctcgttcatccagagcaactaccacggcttcggctccggcgtggtggtgcccggcaccggcatcgccttgcagaaccgcggcgccgagttcagcctcgatccggaccacgtgaattgcctggagccgggcaagcagaccttccacaccatcattcccggtttcctcagcaaggacggcgtgccgctcggcccgttcggcgtgatgggcgcctatatgcagccgcagggccacgtgcagatggtgatgaacctggtggacttcggcctcaacccccaggccgccctcgacgcgccgcgctggcagtggctgggcgggctgcgcgtcggcatcgaacatgccgcgccgcgcgcgctggcggcggagctggcgcagcgtgggcaccaggtggaaatcgcctacgactcgaccagctacgggcgcggccagatcgtcctgcgcgacccggccagcggcgtgctctgtggcggcaccgagccgcgcaccgattcgcagatcgcggtgtggtga

SEQ ID NO: 323000 - DNA, 798 bp, Pseudomonas aeruginosa
atgacgatgaacggacagcctgcggaactgcaccgcccgattcccaccctcgcccgcctgccacggccggtctacgcgcgcgccgaaagcctgcgcgccggctcctggacctcgcgccaccggcacgcctgggtgcagctttcctacgccatcagcggcgtgctcggcgtgcataccgccgagggcagcttcttcgccccgccgcagcgggcgatctggattccggcgcaactggaacacgaggtggtcacctccacccgcgccgagatgcgcagcctgtacatccgtggcgacgcctgcgcctgggcgccgacgcgttgccgggtgctggaggtgacgccgctggcgcgcgagctgatcaagagtttctgcgagttgccggtggactacccggagggcgacagcgccgaatcgcggctggtgcaggtgctgctggaccagttgcggctgctgccggaggtcgccttctccctgccgatgccgcgcgagccgcgcctgctgcggctgtgccaggcactgatcgacgaaccgacccagagcctgaccatgggcgactgggcgcagcgcctgggcacctcggaaaagaccctgtcgcgcctgttccagcgcgagaccgggatgaactaccggctctggcgccaacgccagcgcctgctcgcctcgctcaacgcgctggaagccggcgacagcgtcaccggcgccgccctggacagcggctacgactcgacctcggcctacatcgccgccttcaagggactcttcggcttcactcccggcgaactgttccgccagcgctga

SEQ ID NO: 323001 - DNA, 1335 bp, Pseudomonas aeruginosa
atgaggaatctgttcgccttgacgccgatggcgctggcgctgtgcaccgcgtccgccgcctgggccgatgagggggaagccaaagaaggcttcatcgaaggctccagcctccaattgctgacccgcaactactacttcaaccatgaccgccggcacgcttccgggcacgacagcaaggaatgggcgcaaggcttcatcgccacctttcagtccggctacacgcccggcgtggtcggcttcggcgtcgacgcctacggcatgctcgggctgaagctcgacggcggcggcggtaccggcggcaccagcatcctgccgatcaccgcgccgagcaaggaaggctacgaatccggcaaggcgcccgatgagttctccagtggcggggcggcgctgaagatccgcgccttcgacaccgagctgaagctgggcgaccagttcctcagcaacccggtggtcgccggcggcgagtcgcgcatgctgccgcagaccttccgcggtgtgagcctgaccaacaacagtttcgaggacctgaccctcacggctggccaggtcagtttcaccaagtactacaaccagagtggccaccgtcgcctcggctcgtactacggcgaactgccgggcgaccgcgacagccatcatctcagctggctgggcggcacctggggcggcatcgagggcttcaccagcagcctgtacgccgccgaactgcagaacgtctggaagcagtactacgccgacgtcgactacacctacgagatcgacgacaactggtcgctgaaccccggcgcgcactactacaagaccgtcgacagcggcgactcgttgctcggccggatcgacaacaacacctacagcctgcatttcgcggtcggctacaggcagcacaccgtcaccgcggtgctgcagaaggtcaacggcaacacgccgttcgactacatcaaccagggcgacagcatcttcctcgacaactcgcagcagtattccgacttcaacggtcccaacgagaagtcctggaagctgcaatacgactacgacttcgtcgccctcggcctacccggcctgagcgcctcggcctcgtactcgcgcggcaagctggacctgacccgggtcgatccggacagccccggctacggcggctggtacagcgccgacggcaagaacgccaagcactgggaacgcgacctcgacctgcagtacgtggtccagggcggtccggccaaggacctctcgctgcgcctgcgctgggccacccaccgcggcaccggcggctacagcgcggtggacaacgacatcgacgaataccgggtgatcgtcgactatcccatcgacgtgctctga

SEQ ID NO: 323002 - DNA, 186 bp, Pseudomonas aeruginosa
atgaatcgccagatccttgctgccgccatactcagtttgttttcccttgcattttcccaggccggtttcgccgaagagtcctcgctgatgaccaaccgcatggtcgacgccaaccagcaggccatcgagcaccagcaggaactttccgcctccgccgcgcaggccggggcccgcagcgacacctga

SEQ ID NO: 323003 - DNA, 939 bp, Pseudomonas aeruginosa
gtggacacattgcaaggcatgcgcgtgttcgccagggtggtggacagcggcagcttcacttccgccgcccaggccctggacctgtccaccgcgcaggtatcgcggctgatctccgacctggaggcgcacctgcagacgcgcctgctgcaccgcaccacccggcgcctggccctgaccgaagccggcgagcgttacctggaacggtgccgcgggatcctcgaggacatcgaggtcgccgaggccgaagccgccggcgcgcacatccgcccctgcggccgcttgcgcgtgcagtcgctgatgggcatgggccagcatcacctggtgccgatgatcgcccgctacggcgcactgttccccgacgtggtgatcgagctgaccctgtcccagcgcaacccggacatgctcgaggaaggccaggatgtgctgatcaccggcgagcgccagttgcccgactcggagttcgtcgcccagcgcctgggcagcatccacagcgtgctctgcgccagtcccggctacctgcagcagcacggcgtgccacgctcggtggacgacctggagcgccacgtctgcctgcgcctgcaggacccggcctacccggagggctggatcttcgccgacgagcagggcgagcgcaccgtcagcccgcagaacaccttcatggtcaatgtcgccgaggtcatggcccaggcggccaaggccgacctcggcatcgccctgctgcccagctacgtggcggccgcggcgctgcgcaacggcgagctgctacgggtgttgcccggccatgccatgcaccagcggaccatctatgcgctgtatccctcgcggcgttacctggacgcgaagatccgcacctgggtcgatctgttgcaacaggaacttccccaggcattcgcccgcgacgaaactaccatgcaaagttcaagttactgggcacagtga

SEQ ID NO: 323004 - DNA, 3048 bp, Pseudomonas aeruginosa
atgaagggcggtttcaacctgtcggactgggccctgcgccaccagtccctggtctggtacctgatggcggtatcgctggtgatgggcgtgttctcctacctcaacctggggcgcgaggaggatccctcgttcgccatcaagaccatggtcatccagacccgctggccgggcgccacggtggacgacaccctggagcaggtcaccgaccgcatcgagaagaagctcgaggagctggactcgctggattacgtgaagagctacacgcgacccggcgaatcgacggtcttcgtctacctcaaggacaccaccaaggccggcgacatcccggatatctggtaccaggtgcgcaagaagatatccgacatccagggcgaattcccccaaggcatccagggaccgggtttcaacgacgagttcggcgacgtgttcggcagcgtctacgccttcaccgccgatggcctggacttccgccagctgcgcgactacgtggagaaggtgcgcctggacatccgctcggtgaaagacctgggcaaggtgcagatgatcggtgcgcagaacgaggtcatctacctcaacttctctacccgcaagctggccgccctcggtctcgaccagcgccaggtcgtgcagagcctgcaggcgcagaacgcggtgaccccgtcgggcgtggtcgaggccggccccgagcgcatctcggtgcgcacctccggcaacttccgttcggaaaaggacctgcaggcggtcaacctgcgggtcaacgatcgtttctaccggctgtccgacctggccagcatcagccgcgatttcgtcgacccgccgacctcgctgttccgctacaagggcgagccggccatcggcctggcggtggcgatgaaggagggcggcaatatcctcgagttcggcgaggcgctcaatgcgcgcatgcaggagatcaccggcgaactgccggttggcgtcggcgtgcaccaggtgtcgaaccaggcccaggtggtgaagaaggcggtcggcggtttcacccgggcgctgttcgaggcggtggtgatcgtcctcatcgtcagcttcgtcagcctcggcctgcgcgccgggctggtggtggcctgctcgatcccgctggtgctggcgatggtcttcgtgttcatggaatacaccgacatcaccatgcagcgggtttccctcggcgcgctgatcatcgccctcggcctgctggtggacgatgccatgatcaccgtggagatgatgatcacgcgcctcgaactgggcgactcgctgcacgactcggcgacctacgcctacacctcgacggccttcccgatgctcaccgggaccctggtgacggtggccggcttcgtgcccatcgggctcaacgccagctccgccggcgagtacaccttcaccctgttcgcagtgatcgccgtggcgctgctgctgtcgtggatcgtcgcggtgctgttcgccccggtgatcgccgtgcacatcctgccgaagactctcaagcacaagtcggagcagaagaagggccgcatcgccgagcgtttcgacagcctgctgcacctggcgatgcgccggcgctggacgaccatcttcctcaccgcgctgctgttcggcgtgtcgctgttcctgatgaagttcgtccagcaccagttcttcccgtcttccgaccgtccggaactgctggtcgacctcaacctgccgcaaaacagcagcatccacgagaccagggcggtgatggaccgcctggaagcgacgctgaaggacgacgaggacatcgaccactggagcgcctacgtcggcgaaggcgcgatccgcttctacctgccgctggaccagcagttgcagaacaacttctatggccagctggtgatcgtcaccaaggacctggaggcccgcgagcgcgtcgccgcacgcctgcgcgatcgcttgcgcaaggactacgtcggcatcagcacctacgtgcagccgctggagatggggccgccggtgggacggccgatccagtaccgggtcagcggaccgcagatcgacaaggtccgcgagtacgccatgggcctggccggcgtgctcgacggcaacccgaacatcggcgatatcgtctacgactggaacgagcccgggaagatgctcaagatcgacatcgcccaggacaaggcgcgccagctcgggctttcctccgaggacgtggcgcagatcatgaacagcgtggtgaccggcagcgcggtgacccaggtgcgcgacgacatctacctggtgaacgtcatcggccgcgccgaggatagcgagcgcggctcgctggagaccctggagagcctgcagatcgtcacgcccagcggcacctcgatcccgctcaaggcgttcgccaaggtcagctacgagctggagcagccgctggtgtggcgccgcgaccgcaagccgacgatcacggtgaaggcgtcgctgcgcggcgagatccagcccaccgacctggtcgcccggctggcgccggaggtcaagcgcttcgccgacggcctgccggcgaactaccggatcgaagtgggcggcacggtggaggagagcggcaaggccgagggcccgatcgccaaggtggtgccgctgatgctgttcctcatggcgaccttcctgatgatccagttgcagagcgtgcagaagctgttcctggtggccagcgtcgcgccgctggggctgatcggggtggtcgcggcgttgctgccgaccggcacgccgatgggcttcgtggcgatcctcgggattctcgcgctgatcggcatcatcatccgcaactcggtgatcctggtgacccagatcgatgccttcgagaaagacggcaagacgccctgggaagccgtgctggaagccacccaccaccgcacccggccgatcctgctgacggcggcggcggccagcctggggatgatccccatcgcccgcgaagtgttctgggggccgatggcctatgcgatgatcggcggcatcgtcgccgccacgctgctcacgctgatcttcctgccggcgctgtacgtcgcctggtaccggattccggaaccgggacgctga

SEQ ID NO: 323005 - DNA, 1071 bp, Pseudomonas aeruginosa
atgaagccgttttccctcgccggcctgttcggcttcgccctgctcctctccggctgcggcgacgagccgccgccggcaccgccgcggccggtgctgacggtgaccgtgaagaccctgaagaacgacgacctcggtcgcttcgccgggagcatccaggcgcgctacgagagcgtgctcggcttccgcaccaacggacggatcgcctcgcgcctgttcgacgtcggtgacttcgtcggcaagggcgcgctgctggcgaccctcgaccccaccgaccagcagaaccagttgcgcgccagccagggcgacctggccagcgccgaggcacagttgatcgacgcccaggccaatgcccggcgccaggaagaactgttcgcccgcagcgtcaccgcccaggcgcgcctggacgatgcgcggacccgcctgaagaccagccaggccagcttcgaccaggccaaagcggcggtgcagcaggccagggaccagctttcctacacgcgcctggtgaccgatttcgacggcgtcatcaccacctggcacgccgaggccgggcaagtggtcagcgccggccaggcggtggtcaccctggcccggcccgaagtgcgcgaggcggtcttcgacctgcccaccgaggtcgccgagagcctgccggccgacgcgcgcttcctggtcagcgcccagctcgacccgcaggccaggaccaccggcagcatccgcgagctgggtccgcaggccgacgcctcgacccgcacccgtcgcgtgcgcctgagcctggcgcagacgccggaggcgtttcgcctcggttcgaccatccaggtccagctgagcagcgccggtagcgtgcgcagcgtgctgccggccagcgtgctgctggagcgcgacggcaagacccaggtctgggtcgtcgatgggaaacagttcagcgtggccctgcgcgaggtacaggtgctcagccgcgacgaacgccaggtggtgatcggacagggcctggccgacggcgaccgggtggtccgcgccggagtcaacagcctcaagcccggccagaagatcaaactcgacgaggatgcgcgatga

SEQ ID NO: 323006 - DNA, 1104 bp, Pseudomonas aeruginosa
atggcgctgcccgccatcctgtgcgccggcctgcttgtcggttgcggcgccgagccgcccgccgaggaacacgtccgtgtgctggcgcagacggtgaagatggccgagttcgcctcggccacctcgatcaccggcgacatccaggcacgggtacaggccgaccagtcgttccgtgtcggcggcaagatcgtcgagcgcctggtcgatgtcggcgaccacgtcgcggctggccaggtgctggcgcggctcgacccgcaggaccagcgcagcaacgtggagaacgcccaggcggcggtcgccgcgcagcaggcgcagtcgaagctcgccgacctcaactaccagcggcagaaggcgctgctgcccaagggctacaccagccagagcgagtacgaccaggcgctggcctcggtgcgcagcgcgcagagttcgctgaaggccgcccaggcgcagttggccaacgcccgcgacctgctttcctacaccgagctgcgtgcctccgacgccggggtcatcactgcccgccaggccgaggtcggccaggtggtgcaggccaccgtgccgatcttcaccctggcccgcgacggcgagcgcgacgcggtgttcaacgtctacgagtcgttgttcagccacgatgtcgacggccagcggatcaccgtcagcctgctcggcaagccggaagtcaccgccagcggcaaggtccgcgagatcaccccgacggtggacgagcgcagcggtacgctgaaggtcaaggtcggcctcgactcggtgccggcggaaatgagcctcggcagcgtggtcaacgccagcgtcgccgcgccggccgagcacagcgtggtgctgccctggtcggcgctgtccaaggtcggcgagcagccggcggtctggttgctcgaccagcaaggcaaggcgcgtctgcaaccggtgcgggtggcacgctacgccagcgagaaggtggtcatcgacggtggcctggaggcgggccagacggtggtcacggtgggcggtcaactgctccatccgggccaggtggtcgaggtggcccagccgccgcagccgacccagagcaccgccagccgcgacgccgtgggcggaggccagccatga

SEQ ID NO: 323007 - DNA, 840 bp, Pseudomonas aeruginosa
atgagcgaactcccggaacaccccgccaccctggcgccgccgaccgtcctttcgccggccaagcgcatcgaggccttcaccggcgatcccaacttcatgacctcgctggcccgtggcctggcggtgatccatgcgttccaggagcgcaagcggcacctgaccatcgcccagatcagccaccgcaccgagataccccgcgccgccgtgcgtcgctgcctgcacacgctgatgcagcttggctacgccaccaccgacgggcgcacctactcgctgttgccgaaggtgctcaccctcggccacgcctacctgtcgtcgacgccgctggcgatcaccgcgcagccgatcctcgaccgcctcagcgaacagctccacgaagcctgctcgatggccaccctggagggcgacgacgtgctctacatcgcccgttcggccactccccagcggctgatttcggtggacctcaacgtcggcagccggctgcccgcctattgcacctcgatgggccgcatcctcctcgccgcgctggacgacgacgcgctgcacgcctacttcggcggagtggagatgcaggccaagaccagtcgtaccctgtatacccccgagaccctgctgccgtgcctggtggagattcgtcgccagggctggtgcatcgtcgaccaggagctggaagtcggcctgcgctcgctggcggtgccggtacgcgactccgccggccatgtgctcgccgcgctgaacgtcggcacccatgccgggcgggtctcccgcgccgaactggaaagccgtttcctgccgttgctgctggaggccagccgcgagctgagcgcgcgcctgttcacctga

SEQ ID NO: 323008 - DNA, 606 bp, Pseudomonas aeruginosa
atgagccacgaactgctgcgggaaaccccttcccagaccgccggtccctatgtccacatcggcctggcgctggccgccgccggcaacccgacccgtgacctggagatctggaaccgcatggcccgcgaagacgcgccgggccagcacatcctcctgctcggccacgtctacgacggcaacggccacctggtgcgcgactcgttcctggagttctggcaggccgacagcgaaggccgctaccaggagcgctacgatccggagcgaccgttcaacagcttcggccgcaccgccaccaccttcgatgccggcgagtggaccctgcacacggtcaagccgggggtggtgcgtaacgcccagggcgtgccgatggcgccgcacatcaacgtctcgctgttcgcccgaggcatcaacatccacttgcagacccggctgtacttcgatgacgagaccgaggccaacgccgcctgtccggtgctcaacctgatcgagcaggcgccgcgtcgcgacaccctgctcgcgcagcgctgcgaagtggacggacagctcgcctaccgtttcgacatccgcatccagggcgacaacgagacggtgttctttgacttctag

SEQ ID NO: 323009 - DNA, 720 bp, Pseudomonas aeruginosa
atgcacgacgccgaaagccgtcgtttcgtcatccgtgaccgaaactggcaccccaaagccttgacccccgactacaagacctccgtgccgcgctcgccgagccaggcgctggtgagcatcccgcaatcgctctcggaaaccagcgggccggacttctcccacctcaggctcggccgtcacgacaacgacctgctgctcaacttcgaccacggcggcctgccccagggcgagcgcatcatcatgttcggccgggttttcgaccagtacggcaagccggtcccgcacaccctggtggagatgtggcaggccaacgccggcgggcgctaccggcacaagaacgaccgctacctggcgccgctcgacccgaacttcggcggcgtcggccggaccctcaccgacagcgagggccactattacttccgcaccatcaagcccgggccctatccctggcgcaacggccccaacgactggcgcccggcgcacatccacgtgtctgtcagcggcccggcgatcgccgcgcggctggtcacccagatgtacttcgagggcgacccgctgatccccaagtgcccgatcatccgcacccttgccgacccggaggcggcgcagagcctgatcggccggctcgacatgagcatggccaacccgatggattgcctggcctaccgcttcgacatcgtcctgcgcgggcagcgcaagaccttcttcgagaacgtctga

SEQ ID NO: 323010 - DNA, 918 bp, Pseudomonas aeruginosa
atgaacctcgacaaccgcatcaagttccgccacctcgcctgcttcctcgaagtcgcccgccagcgcagcttcgccaaggcggcggatgccgtggcggtgtcgcagccggcgatctccaagaccctcaaggaactggaggaaatcctcggcgcgcggctgttcgaacggagcaaggccggcgccgagctgaccgaggcgggggtgaccttcctgcgctatgccggcccctgcgtgcaggccctgcgcgacggggtgaacaccctgcgcggccacgaggcgcaggtcgagacggtgcgggtcggcgtgctgtcgacggtagagagcctggtggtgcccgaggtgatccggcgcctgcaccggcgccacggcgcgctggtggtcagcgtcgccaccggacccagcgcctacctgctggcgcaactgaaggtcggcgagctggacctggtggtcgggcggatgaccgatagcccggacatccagggcctgaccttcgagcacctgtacagcgagtcgatgatgctggtggtgcgtcccggccaccccttgctcgccgcgcccctcggcgacccgcagcggctggccgaattcccactggtgctgccgctggccggcaccaccatccgccgccacgccgacagcctgttcgtgcaatggggcatcgggctcgccggacagcgcctggaaaccctctcgccgaccctcagccgcagctatgtgttgcgcagcgaggcgatctgggtggcgccgcgcgatgccgtgcgcctggacgtcggcaacggcgagctggccgagctggacctgggtatccgcgaaccgggcggttcggtcgggctgtgccacaacgcggccttgccgttgccgctgggggcgcaatggttcagcgcggtgttgcgcgaggtggccgccgagttgcactga

SEQ ID NO: 323011 - DNA, 2388 bp, Pseudomonas aeruginosa
atgaccctgttcccgcgcttcgccctgcgtactctccccgccctgttcctcagcctcggctgtctcgccgccaccgtgcaggccgccgaggcggttcgctaccgcttcagccaggctgccgcgccgctggcccaggcgctcaacgcgttcagccgggccagcgggcagacgctgctctacaccgccgagctgccgccgcaggcgaccgctccggcattgcacggttcgctggtcgcggaggaggcgctgcaacgcctgctgcagggcagcggcctgcgcgcgcggcggatcgacgagcgcaccctgaccctggaaccgatccccgccagcggcgcgctcgacctcgatgccacgacggtctccgccgccgccccggcgcagggctaccggccggcggccaacgcctcgatcagccgcggcgatgcgccgctactggaaatcccccaggcgatcagcgtggtcccggcacaggcgctgcaggaccagcgcccgcgcaaccttgacgacgcgctgggcaacatcagcggcatcacccaggccaacaccctcggcggtacccaggacgcggtgatgaagcgcggcttcggcgacaaccgcgacggctcgatcatgcgcgacggcatgccctcggtgcagggccgcaatttcaccgccaccgccgaccacgtcgaggtgctgaaggggccagcatccctgctctatggcatccaggatccgggcggggtggtcaacgtggtgagcaagaagccacaactgcaacaagccaacgccctgaccctgcgtggctcggcctacgcccacgggcgcaacggcagcggcggccagctcgactccaccggcccgctgggcgacagcggactggcctaccggatgatcctcgatcatgaggacgaggattactggcgcgacttcggcaagagtcgcgagacgctggtggcgccctcgctggcctggtacggcgaggacacgacggtcaacctgagctacgagcaccgcgagttcaccacgccgttcgaccgtggcacggccatcgacccgcgtaccaaccgcccgctggacatcccgcgcagccggcgcctggacgagcccttcaacatcaccgagggccgttccgagctgacccgcctggatctcgaacggcagctcgacgacacctggaaggcccacttcggctacggctacagtcgcgagacctacgacgacaaccaggcccgggtgatggccgtgaatgccgacggcaccctgacccggcgcatggacggcacccacggcgcggtcagcagcgacagcttcgccaccctcggcctgagcggaacgctgcaactggccgggatgcaacatgacctgcaattcggcatggaccacgagaagcgcaagatcttccgcgccgacctgctgcgcgacagcaagaccagccgcttcgactacctcgacccggtctatggccaggtggtgccgtcgacccgggtggtcgccggcgacagcgaccagaccgacaagctgcgcagcgactcgctgtacttccaggactcgatccacctggacgaacgctggatcctggtcggcggcgcgcgctaccagatctacgaccagctcgccgggcgcggccggccgttcaacgccaacaccgatatcaacgggcagaaatgggtgccgcgcggcggcctggtctaccgcctgagcgacgaggtttcgctgtacggcagctacacgcgctcgttcaagccgaactcgaccatcgccccgctgagcaccggcgagaccatcgattcggcgatcctgccggaggaggcgacctcctgggagctgggcgccaagctggatgtgccggggcgtctcagcggcaccctggcgctgttcgacattcgcaagaagaacgtgctggtcaacgaactcgacggtgccggcaacagcagcgtgcgcgccgccggccgggtccgctcgcgcggcctggagctggacctcaccggccagctcagcgaacgctggagcctgatcggcagctacgcctggctcgccgcggaagtcaccgaggacccgaccctggagggcaagcgcctgcagaacgtggcgcgcaacaccgcgtcgctgtcggcggtctacgaactcggccagctcttcggcggcgaccgcctgcgcctgggcggcggcgcgcgctacgtcggcaagcgcccgggcgacccggccaattccttcgacctgccgtcctacaccgtggccgatgccttcgccagctacgacacccgcttcggcgggcacggcgtgaagttccagctcaacgtgaagaacctgttcgaccgcacctactacccgtccagtgccaatcgactgtacgtggcgatgggcgagccccggcagttccaggtgtcgacgacggtggagttctga

SEQ ID NO: 323012 - DNA, 996 bp, Pseudomonas aeruginosa
atgacccgacccgatagcgacgccgcgccctacgagcccgtcctcgagcagaccgcccaggcctggctggtgcgcctgcgcggtacgccggatgcggcgacccggcgggccttcgaggactggctggcgcagcggccggcgcatgccgaggcctatgcccgcgccgaggcgctctggcgcctgacggaaataccggcgagccgcctggccatcgaagaggccgatgccctggaagcctacctgcggccgcgccgagcgtcgcgcaacccgcggcgctgggcctacccgctggccagcgtcgcctgcctgctggcgatgctctggctgggcggctggtggcagcccggcgactggctgcaggactggcgtgccgactatgtcgccgcgccgggacaggtcgccgaatggaagctggccgatggctcctacctgagcctggacgccggcagcgcggtgcgcgtgcgtatcgacggcggccagcggcgggtcgaactgctgcgcggcgccgccgcgttgcgggtgaagcgcgacgcgctgccattcgtggtcgaggccggcgaaggtcgggcgcgggtactgggcaccgagttcgaggtccgtcgcggcgccggggcgacccgcgtcaccgtgttgcaagggcgggtcgcggtgagcgtcggcaccggtgcgggcgccgccgaggaagtgctgggcgccggccagcaggtcggcttcgccgacggcaagctgggccggcccgtggccatcgacgccgccgccgcgctggcctggcgccagggttggctgagcttctaccggcggccgctggcggaagtgctcgacgaactcgctcgctactaccccggacgcattctcctgctcgacgacgcgctcggtcgccagccggtcagcggcagcttccgcagcgatgatcccgaagccgcgctgaagtcgctgcaggcggtgctcggctatcgccagcagatcctgttcggacgcctggtggtgattcgctga

SEQ ID NO: 323013 - DNA, 588 bp, Pseudomonas aeruginosa
atgcccgaccgcgacctacctcccggcccgcgcccggatgccttgccggcagacggcgaggcggcgcgccgcgcggatctcctcaaggccttcctggcccagcgccagcgcatggaaagcctggtcagccgctgggtcggctgccgggcgaccgccgccgacctggtccaggagctgttcctgcgtttctggcggcgcccggccgccccggtggaggagcttggcagctacctcctgcgcagcgcgcgcaacctggccatcgaccacttgcgtggcgaaggatcgcggcaacggcaactggacgactggctgccggagcagcgccagggcgagccggtcggtcccgagcaggcgctcgaggccggcgaccagtggcgccgggtcgaggccgccttgcgcggcctgcccgagcgcacccggcggattttcctgctcaatcgcatccacggccgcacctacgcggagatcgcccaggccatgcagctttcccaaagcgccgtggaaaaacatatgatgcgcgccctcgacgcctgcaaggcgagcctggccggcccggccggcgagcaggcaaggagcgcccagccatga

SEQ ID NO: 323014 - DNA, 951 bp, Pseudomonas aeruginosa
atgtacgaatggctcaacgccttgcccaaggccgaactgcacctgcacctggaaggtaccctggagccggagctgctgttcgccctcgccgagcgcaaccgcatcgccctgccctggaacgacgtcgagaccctgcgcaaggcctacgccttcaacaacctgcaggaattcctcgacctctactacgccggtgccgacgtgctgcgcaccgagcaggacttctacgacctgacctgggcctacctgcagaagtgcaaggcgcagaacgtcgtccacgtcgagccgttcttcgacccgcagacccacaccgatcgcggcattcccttcgaggtggtgctcgccggcatccgcgccgcgctacgggacggcgagaagctgctgggcatccgccatgggctgatcctcagcttcctccgccacctcagcgaggaacaggcgcagaaaaccctcgaccaggcgctgccgttccgcgacgccttcatcgccgtcggcctcgacagctcggaagtagggcatccgccgagcaagttccagcgggtcttcgaccgggcccgcagcgaaggcttcctcaccgtcgcccatgccggcgaggaggggccgcccgagtacatatgggaagccctcgacctgctcaaggtcgagcgcatcgaccacggcgtacgcgccttcgaggacgagcggctgatgcggcggctgatcgacgaacagatcccgctgaccgtctgcccgctgtccaacaccaagctctgcgtgttcgacgacatgagccagcacaccatcctcgacatgctcgaacgcggcgtgaaggtgacggtgaactccgatgacccggcctacttcggcggctatgtcaccgagaacttccatgccttgcagcagagcctgggaatgaccgaggagcaggccaggcgcctggcgcagaacagcctggatgcgcgcctggtgaagtga

SEQ ID NO: 323015 - DNA, 963 bp, Pseudomonas aeruginosa
ttggaccgtctacccatcatcgacatcgccccgctctacggcgccgaccgtggcgcctggagcgacgtggcgcggcggatcgaccaggcctgccgcgagtggggcttcttctacatcgccggacacccgctgccggccgcgcgcttcgaagccctgctggcggcggcgcgggagttcttcgcgctgcccgtcgaagagaagctgaagatcgatatcacccgtagccgcaaccatcgcggctatggcgcgatcgccaccgagcagctcgacccggcgttgcccagcgacttcaaggagaccttcgacatggccctgcacctgccggcggagcatcccgacgtgcgcgccggcaaatccttctacgggcccaaccgacaccccgacctgcccggctgggaggccctgctggaaggacactatgccgacatgctggcgctggcccgtaccgtgctgcgcgccctggccatcgccctggggatcgaggaggacttcttcgatcgccgcttcgagcagccggtcagcgtgttccgcctgatccactatccgccggcctcggcccggcagagcgccgaccagcccggcgccggcgcgcacaccgactacggctgcgtgaccctgctctaccaggacgccgccggtggcctgcaagtgcagaaccgccagggcgaatggatcgacgcgccgcccatcgacggcaccttcgtggtcaacatcggcgacatgatggcgcgctggagcaacgaccgttaccgctcgaccccgcaccgggtgatcagcccgcgcggggtgcaccgctactccatgccgttcttcgccgaaccgcacatggacaccgagatccgctgcctgccgggctgcttcgacgcggacaacccgccgaagtatccgccgaccacctgtggcgattggctgacctcgcgcttcgcgcagacctatgcctatcggcgcggcgaaacggcctga

SEQ ID NO: 323016 - DNA, 1098 bp, Pseudomonas aeruginosa
atgaaacaccgtcgcacgcaatcccgcatgtccgtcctgcgccgccttgccgccgtccttggtctcggcgcctgcgctctcgccgccgaggccgccgaaccactgaagatcggcttcgtctatgtcggcccggtcggcgaccacggctggacctaccagcacgaactgggccgccgcgaactagtggagcacttcggcgacaaggtgaagaccagcttcgtcgagaacgtcgccgagggcgccgacgccgagcgggtcatccgcaacctggcgaaagacggctacggcctggtcttcaccacctccttcggctacatgaaccctaccgccaaggtggcccggcagtttcccaaggtgaccttcgagcacgccaccggctacaagcgcgacaggaacctcggcacctacctgtcgcgctcctacgagggacgctacgtcggcggcttcctcgcggcgaagatgacccgcagccacaagatcggctacatcgcctcgtttccgattcccgaggtgatccgcgacatcaacgcgatccagctggcgctggacaaatacgacccgcaggccgaactcaaggtgatgtgggtgagcacctggttcgatccgggcaaggaggccgacgcggccaacgcgctgatcgaccagggcgtcgacgtggtgttccagcacaccgatagcccggcgccgatccaggccgccgagcgtcgcggggtgtacgccgtgggctacgcctcggacatgcagcacttcggtccgaagaccgtgctcacctcgatcgtcaacgactggggcccgcactatatccgctcggcccaggcggtgatggacggcacctggaaatccgaggacttctggggtggcctggccgagagtacggtggtcctgccgctgaaccaggaggtgctgccggcgccggtgcgggaagaggcgggcaggctgatcgagtcgatccgcagcggagccttccaccccttcaccgggccgatccgcgaccagtccggcaaggagcgtttcgccgccggcgtcagcgcgaccaatgccgacctggcgtcgatgaactattacgtggaaggcatcaaggccgacctgccgaagtga

SEQ ID NO: 323017 - DNA, 516 bp, Pseudomonas aeruginosa
atgaccgcgatctacctggccgggccggacgtcttccgccccgacgccgaagcccatggcgaaaccctcaaggcgctctgcgccgagttcggcttcgtcggcctctacccgctcgaccacgccctgcccgccgacatccgcgagccagccgcacaggccgcctggatctaccgcgccaatgtcggcctgatcgagcgcgccgactgcgtgctggccaacctcgaaccgttccgcggcagcgagccggacagcggcaccgccttcgaagtgggttacgccctggccctgggcaagccggtatatgcctacctcagcgatgccggcgcctacgccgagcgcctcgcccggctggccccggaatggctcggcgagcaccccggcgaggaccgcgacggttggcaactggagggtttcggcctgccattgaacctaatgctggcggtgccttcgcggctggtcgccggcggcccgcgcgaggccctgcgacgcctcgccgaggaactcgagcgcgcctga

SEQ ID NO: 323018 - DNA, 627 bp, Pseudomonas aeruginosa
atgaaccgatccaagggttccagcagccgtcgtaccttcctgcgcctggcagccctgctgctgcccgccggcgccctgctcggcagcctgccgggcgtacgcgccgcggccaggccgcggaaactctatctggccggtcccgatgtgttccgcgccgacgccgtcgcccacggcgaagcactcaaggcactgtgcgcacgctacggtttcgagggcctctacccgctggacaacgcgctgccgaaacagctcgccgagccgcgcgaacaggcggcctggatctaccgcgccaacatcggcctgatcgaacgcgccgacgcggtgctggccaacctgaacttcttccgcggcgccgagccggacagcggcaccgccttcgaggtcggctatgccaccgccctcggcaagccggtctatggctacgtcgacgacgccggcagctacgccgagcggatccgccggcacgccccggagctgatcggcgaggatccgacccgcgaccgcgacggcatgaccctggaagagttcggcctgccgctcaacctgatgctggcggtgccggcaacgctagtcgtcggcgacgccgagcaggccctgcgccaactcgccagccggcgccacggctga

SEQ ID NO: 323019 - DNA, 1053 bp, Pseudomonas aeruginosa
atgtcacgcgccgcccgcccatgcaatcgcttttgcagccttctgctaggactcgccctgctgatgcccgccagccttcctctgtccgctgccgaaacggtggcgccgccatcgccgcggacgctgatcatcgacaccgatccgggcgccgacgatgtgatcgccctgctgttcgccatggcctcgccgaaggagctgaagatccaggcgctgaccaccgtcgccggcaacgtgccgctggaaaagaccgcgcgtaacgcccggctggcccgcgagtggggcaagcgcccggatatcccggtctacgccggcgccccgcgaccgctgctgcgcacgccgatctacgccgccgacgtgcacggcagcgaaggcatcagcggcgtcgaggtgcatgagccgaagcagccgctggccgaaggtaacgccgtggactacctgatccgcaccttgcgtgcggcgccggagaagagcgtgaccctggccatgctcggcccggagaccaacctcgcgctggccctgacccaggccccggacatcgtcaagggcatccgcgagatcgtgatcatgggcggcgcccacttcaacggcggcaacatcaccccggccgccgaattcaatatcttcgccgacccccacgcggcggaaatcgtgctcaagagcggggcgccgatcaccatgctgccgctcgacgtgacccacaagatcctcaccagccccgagcgcatcgccaagctgcgcaacctcggcaaccaggccggcaagaccgtcgccgacatcctcgacgcctacgtccagtacgacatcaagtactacggcctgaagggcggcccggtgcacgacgccacggtggtcgcctacctgctcaagccctcgctgttcaagggcaagcggatcaacgtgcaggtcgacagccgcgagggcatcaccttcggccagaccgtggccgactggtacggcggcctcaagcagccggccaacgtcgagtggatcaacgagggcgacgcccaggggttcttcgacctgctcaccgagcgtatcgcccgcctgccctga

SEQ ID NO: 323020 - DNA, 1350 bp, Pseudomonas aeruginosa
atgtcccgcacctggattcgcaatcccctcgccatcttcaccgccaacggtctcgacgccgccggcggcctggtcgtcgaagacggccgcatcgtcgagctgctcggcgccggccaacagcccgcgcagccctgcgccagccagttcgacgccagccggcacgtggtgttgccggggctggtcaacacccatcaccacttctaccagaccctcacccgcgcctgggcgccggtggtcaaccagccgctgttcccctggctgaagaccctctacccggtctgggcgcggctgaccccggagaaactcgcactggccaccaaggtggcgctggccgagctgctgttgtccggctgtaccactgccgccgaccaccactacctgtttcccggcggcctcgaacaggccatcgacgtgcaggccggggtggtcgaggaactgggcatgcgcgccatgctcacccgcggctcgatgagcctcggcgagaaggacggcggcttgccgccgcagcagacggtgcaggaagccgagaccatcctcgccgacagtgagcgactgatcgcccgctaccaccagcgcggagacggtgcccgggtgcagatcgccctggcgccctgctcgccgttctcggtgactccggagatcatgcgcgccagcgccgaagtggcggcgcgccacgacgtacgcctgcacacccacttggcggagaccctcgacgaggaagacttctgcctgcagcgcttcggcctgcgtaccgtggactacctggatagcgtcggctggctcggcccgcgcacctggctggcccacggcatccacttcaacgccgaggagatccgccggctcggcgaggcgggcaccggtatctgccattgcccgagttcgaacatgcgcctggcctcgggcatctgcccgaccgtggagctggaggcggccggcgcgccgatcggcctgggagtcgatggctcggcttccaacgacgcctcgaacatgatcctcgaggcgcgccaggccctgtacctgcaacgcctgcgctacggcgccgagcggatcaccccggaactcgccctgggctgggcaacccgtggctcggcacgcctgctcgggcgcagcgacatcggcgagctggcccccggcaagcaggccgacctggccttgttcaagctcgacgagctgcgcttctcgggtagccacgacccgctctcggcgctgctgctgtgcgctgccgaccgtgccgaccgggtaatggtcggcggcgcctggcgagtggtcgacggtgccgtggaagggctcgacctggccgccctgatcgcccgccaccgcgaggcggcgagcgccctgatcgccgggtga

SEQ ID NO: 323021 - DNA, 3552 bp, Pseudomonas aeruginosa
atgacgatcaccgtcgatgatgtaaagctgctgaaatcccagcgcctcaccgatgaggacgacggcggcggccgtgccaccgggcaggccgtggtggatcgcgagatcaacaacctgtttcccgatatctcgcgcctggaccggaccatcggccggatcaacctgcgcaaggccttcgccggcatcagctcgaacagcgccgagccgtacctgggcgctcatgccatcgtcacgcgggcgccggccgatccgcgtgtctcggtgctgctgttcaacaccggtagccagaccgacgagcgccgcgacgcgcgcaacgccatcgagtccttcgtggtgccggccgtgtccgcctcgttcgaactgctgggcaaccagttgcagggccagcgcgccatcgcttgcgtgcagcgcgaagaacagcggctacccgagattggcgaggtctatcagttggtgttcgagtcgcgctcgcagtatgtccgcatcaccgacgtcgaggcgcggctcgaacagttcgcccacgactacggcaacggcaacttcgtgaacttcacccggcgccggctggacctgtcgatcagcgcgccactgggcgcgaccttccccggcggccaggtgactccaggcggtaccaccagcccgaaaagccaggtgctcagcacccaggtcgccgatgccgcgcggtactacggcatcagccccctggccgaggctgtcagccgcggcgccctgagcctgcgggtcaagtcggtctattcccagctggtgcccagcaccacccgggagaacgcgctggtcgaccaactggccggctaccagcggcgcctgttcgctgcggccgggccggcgcggacggtcaacctgaatgtcgcgaacataggcagcggcaggtcgcggacgttcctcggcaccggctgcgcgccgggttcgctgtcgctgagcgccggcggcggtgtgttcgccgacgaccgcaagggaggcctgcgctacatcagcggttcgaactggattgccagcggtaccgtcgactacgagagcggcgcaatcgagatggcggcctccggcagcggctggagcgggacagcgagcgccacctaccagcctgccgcggcggcgacgggcgaagcggtgaccggggagatccctatcgaactgggcaaccgcggcttcgtctacaccctgtcgctgtccgaagcgccgccccagccgggcaccctggtggtctcgttcctcgccctgggcaaatggcaggagatccgcgaccagggcaacggcgaattggccggggaaggcaccggcacggtggacttcgcgaccggctcggtatccatcaccctgagcgcgctgccggacgtggggagttcgctgatctacgcctacgtcgggcagaacgatgcggcgctgacccagcgcaccggcaccagcgtgcaggcgcgcgcgcggatcaaccggacgttgccgcaccaggggctgttgcccggctcctacaaggcgacgttcaaggtcggcggggtagagcgcaccgtgctcgatagcggcaacggctcgctcagcggtaccggtggcagcggccagatcaactatgccgacggcaaggtcagcatggaattgagcgccaccccggatgccgggagtgggatcgtgcatacctaccagcagggcagcgtgacggacagcccgctggcggtgacctccgacagcaccggcatgtgcatcggcactctccccggggcgccgctcaaggcgggcagcgtgcgcctatcgtggatcaccaagcgtcgccaggcggcaccgaccctcggtgctgacatgggcaccggggcgctgccgatcttcgaatcggagatcaccgtggacaactcggtgaccgacgacgccgccggtggctgggccgggcgcgccgggacgatcaactacgagaccggcgaattcagcctgaaggtggccggcaactacgtgttcaaggagtacacctactacaccgacacggtcgacaacttcggcatgaagaagctgcgcctggtggccaccgataccacgttgctggaggggttcggcggcacgctgagcgtgcgcgcgcagagccgcggcgtcgagtacggcgagcagaccgattcgcagaccgtcgcgccggtgaccctggacctgttgcctggtgtggccgagccgatcctgccgggctcgctggtgttcacctgggccggcgaggtctacgtcgaccgctccggtgtgctctacaagaacatcaacagcagcaccaacgccggcatcgccgtcggctcggtggactacgccggccgtaccgcgacgctgaatacctatggctcgggggcggcgccgacggtcacgctgctggcctgcctgaccaccaacgccggcttcagcgtcaccagcatgaccttccgcacgccgggggcgccgctgcgttctgcgagcctgcaggtgacggcggttcgcctggataccgcgcagatcgtgaccaccacggcggacgcgaacggtaagctcaatggcgcggtgatcaagggtagcgtcgatatcgtgaccggcatcgtccggctgcgcttcaccagcaatctggaggacaccactggggccagcgatatcccggtgattccgctgctgctgcgctacaacgcggtcgtcttcacctcgctgccgctggacgccaccctgctgggcctggacccggtgcgactgccggcggacgggcgggtgccagtgttccgcgagggtgacgtgatggtggttgcccataccgccgagaccacggtgccgagtcctcaagctggcggcgtgctgcagctcggccgcgaccagcaggccgagatcaaggtggtggacgccaacgcggtggaactggcctcggcgggctacagcgtcgacctagaacgcggccgggtgacatgggccaacccgctggtcctgcaggatgccgagggcaacccgctgaccctgccgctggtggtgcgtgaccgggttgagcacatgaccctctgcaccgaggtccaagtgaacggcgagctgggaatctcctcgccgctgccctgggatctgccggcgggcgaaacgctggcgtccagtgcgctgagctggggcgacctgcaggcgcggctgcaccactggttcacccagcggacctgggatatcggctcgccgaactggaccgacgagccgaagggcgacgggaccaccgccaactacaacagcctcgcctatccgccgctgatcgccaaccgcggtgcgatcgatgcgaagtgggcgctggtgttcaactcctcgaccagtttcagcgtggtggaggagaagctgggggtcatcgccaacggcactaccaccaccgacacggcgccgatcaacccggagacgaacacgccgtacttcaccatccgcaaggaaggctggggcagtggctgggcggccggcaacgcggtgcgcttcaacaccgactcgtgcctggggccgatgtggatcgtgcggacggtactcagcggcaagggcaccgtcgaggacgatgaattccacctgcagatcagaggagacgcggactga

SEQ ID NO: 323022 - DNA, 1008 bp, Pseudomonas aeruginosa
atgaccgctcgacagtacagctatcgggacgccggcgcaccgccggcgctcttcccgtcggcggtgacgccgttccagaagctcaagagctacctgcgcgcggcgctggtcgatggctacggcaacaagccaccggcagggtggaccgtggtaagcgagttcgacactgccatcaccctggctccggcgtccaactgtgcacagatcacgttctgccagcacttgccaagtagtagcggtagcagctaccgggacttcgtcgggatctttgtacatgagggcatgctggatatcagcactccgcttccaaagggggtcaacacgcgatcacgtacgtggtcggcggataccaaccccaccagcaatgatgcccatatcctctatctgggctacatgtactggaactacgccacctattggcagatctgcgcggatgccgagacgtttgtcttttgcatgctggcggataggggctatgagaatacgagcgaggactacagcctcggcctctatgtcgggcagtacgagagctttagtggcgcctctggcgtccagggattcatcgccgtcggtggcgcccaggggtatcagagttcagccagccgaagtaccaaccggtcctttgggagtgggttcagttcactgcgtgaccagcgctcgggggagatcatccagggtggcggcgccgccctgggggcgctgatggaccagatgcagtaccagagcatgtactacgacaggccagagggagagaatccgccctattggcgtatgcagcagccctatgtggcgaacggcgcgaactacgtcggcctcctgaagggtgtgtgtttcgacccgatcctgggccactaccggcatgggcacctgctggatcggctcggcctgcccctggccgcaacctcggtggcggaggcggtgcagatggatggcaagacctattacgtggatatggaccgttgggggctctggttcctgtctgtcgatccggcgtggtggccagcatga

SEQ ID NO: 323023 - DNA, 861 bp, Pseudomonas aeruginosa
atgagcgggctgatgctgcaggtggtgccgccggtacaggtcaggcccggcacctggctgcagcgcttcggcattgggccgaagtcgctgcgcccgcctgtggaggtcgcctggtcgggggccaggcaggcgatctaccagaccctcgccgtgaaggtcacccgtgaaggggaggagacctcggcgcgcaagatcgccacgctgtatcgcggggcggttgtcaccgcgactgcaatgacggcgtctttccaggtctacgagggcgagacggtgcagcgcttcgaggcatcgggcctgcgcggacagttcgtgatccaggtcaccgacgaaggcgacccgcgcctggggatcattcgctggccggtcctcgatgccgatacgcgcctgctgtcctatgacctgaccgaaggctcgggcggtcgagatccgaccgacccagcgaaggtgcgggcggtcgtcacggtcgacggcggtgctgcggcgcgccaggtggtggtcatcgagcgcaagctcgatggcgaatggcgggtggccggcgtggggcagacggccgagtccgggcgcgccgaaatcgctctggaggtgacggccggcgggaccacttacgcgatggggctggatgactggggcgcggtgttcgagccgcgtctcgccgtcagcctgggccagcgcgtgcgtccgacgatcttctctggctggctctacgaggtgaccgaggccggggtactgccggcggctgagccggagtggtggccgattgagggcgacaaccccagccgccaggtcggcacggcccgtctgcaggcgacgcgttactaccgcccgctcagccacgggccctttcctgtcgaggctctatga

SEQ ID NO: 323024 - DNA, 1761 bp, Pseudomonas aeruginosa
atgatcaatgcgagtttcggcgccccctggcagagggcggcgccgctttccgtgcgcgccgtcctgctgcgctggcagcgcctggtgcttgccgatgcgcgtagcggcgggctgtggggctccggccggcccctggcacggcgttgcgccagtggctggtccggtgtaccggtgcgtgatgcgggctgggggagtggctggaagcacgccgagcagcgcaacgcggcagcccgcagcgcttgggacagcacccggatgctggacgtggagagagagctaggctgggatcggacgctgcgtccgcgtgatcggcgcctgtcgctgatctacaacccgcgccccgcggccaaggacgccggccgtccacccggctggcggcgctcggccgagttcgaccgcttccgcgatgcgctctcggagaggcgtgccagtctctacatcccgaccgggctgctcgacttcaatttcggcccgacccgctacaccccagcgaacacgcccgacgtgttcttcgacttccgctacgtggcgccggtccgtggtgtccgtccggtggacgccggggcgcgcagcagctacggcagcccggcccgcttcgatgcgttgcggcggattccctgggcatgggggcggccgaccgatccggtgccgacgggcattgtctaccccgactatccggggccggtggtaccgatagatccacccaccgagcccgagatactggagacctacatgataggaaacacggtcaccctggtggtgctgccgagtcgcacgccgctggatgcgaccagcattcgcatcggcctggatatcgactcgttcgcctggtcgttctcggctgacctgttcggtcgcacctcgctggacctggcggcgccggatgccaacgggccgaagacggtagaactggagatcaacggctggacctggcggtttctggtcgagcgttacagcggcagcggcaagcatccgagtgagcgctacaccatcagcggcgcgagccgcacccaactgcttgacgcgccctatgcgccgaagcgcagcgcggtgaacacggcgccgctgaacgcacggcaggttgtcgacgaccagttgcagtacaccggcttttcagtgtcctgggacgtcgagaacatggggccgccggactggacgctgccggccggcgccttcagctatcaggatcagacgccgatgcaggtcatcgtcaagctggccgaggtcgccggcggcatcgtccgtccgggcctgatggacgactcggtggcgatcctgccgcggtatcgtgaggcgacctggtactgggacaccgcaattcccgaccggatcatcccggccgccatcgtcgccgagtggggcagcgagtggagtccccagccggcatggaatttcgtctacgtcagcggtaccagctacggcgtcagcgtgcaggtgcggcgcgccggtaccgccggcgaggagtcggcgcctgatgttatggaggactggatgaccggcaccgaggtggcacgctcgcgcgggatctgcgagttgtcgaagggcggcaaccaggcgatcgagacgcggcgtatcccgctgttccagaaggatgatggggtaccgggcctggtgcagccgggaatgctggtcgaggtgagggacgaacaggcgacctggcgcgggctctgcctggccaccgatatctcggccgagggggtaggggctagccgcgtttggcagaccctgcgcatcgagcgccactacccgggaggctcctga

SEQ ID NO: 323025 - DNA, 237 bp, Pseudomonas aeruginosa
atggcgacggtcaacccctggcgtcggttcatcgggctcttaccgggcggcgcgcgcacggtgggggaggtgatcgacgtcgacgagggcgccggcacctgccgcgtccgcctgcgaaacaacgtcgtgatcgcggcccggggcacggcggtgccggccgggcagatggcgttcatcagcgatggcctggtgaccgggccggcgccgcagctcccccagttcgatatcgaggtttga

SEQ ID NO: 323026 - DNA, 630 bp, Pseudomonas aeruginosa
atgctgattaccgagcagcagctgctgcagatatttccgaacgccggcccgcaagccggcgtttttgttggtgcgttgaaccgcgggatgactcgcttcggtatcacttcgcccgtgcgagtcgccgcgtttctcgcccaggtcggccacgagagcagccagttgacccggctggtggagaacctcaactacagcgcgcgcggtctggcggcgacctggccgagccggtaccgcagcgccgacggcaagccgaacgctctggccctgaacctggcgcggcatccgcaggctatcgcgaacaacacctatgcctcgcgcaatggcaacggagacgaggtgtccggtgacggctggcggtaccgcgggcgcggactgctacagatcaccggccggtcaaactatcgcgctgccgccgccgggctgggtcagccgctggaagcggagccggaactgcttgagcaaccggagtgggcggcgctgtccgccgcctggtggtggtcgacgcacggcctgaacgaactggccgaccggggcgagttcgctgccatcacccgccggatcaacggcggcctgaatggccaggcggagcgcctggcgctgtgggagcgcgccaaggcggtgctgtcgtga

SEQ ID NO: 323027 - DNA, 369 bp, Pseudomonas aeruginosa
gtgatctcggcccgcgtgatttcgatcgcgctggcctgcctgctattggtcggcctcggcgccgccggcggtggctggctcggcgcgcggcactaccggccgcagctcgatgctgcgctggcggatctggtcgcctgccgcgccgccaggggcggcctggaggacgcagtggcggagcaggtccggcaggtcgccgcgctgcgtcaggctggcgaacagcggtcccgggatgccgcgcaggcgatggggcggggccggcagcaggccgccgagcagtatgccgcggcacaacacctgctgagccagcggaccgccggcgagcagtgcgcggctgccgatgcggtcattgatcaggagctgggtctatga

SEQ ID NO: 323028 - DNA, 261 bp, Pseudomonas aeruginosa
atgagggtggtgctaatgctggtgatggttgcgctggcgggatgcgcaggccaagtcgagcctgagccgcgaccggtgcgcgtggaagtgcctattgaggtgccgtgtcgtgcacctgatatagcagagccggcgtgggccacggcggggctgcggagagacgacgacctgcaagtgaaggtgcgcgcgttgcttgcggaacgccggcagaggatcggatacgaggaggaactgaaggccgccgtggcggcgtgcaaatag

SEQ ID NO: 323029 - DNA, 684 bp, Pseudomonas aeruginosa
atgaccagtcctgttttcccctggatgggcggaaagcggcgccttgccgaccgtctcatccctctcttcccgccccatgaatgctatgtcgaggccttcgccggtggtgcggcgttgtattttctgcgtccagttcctgctcagactgaggtgctgaacgacttgaacggcgatgtcgtgtgcctctatcgggtggtgaagcatcacctcgaggagttcgtgcgccagttcaagtgggcgatctcgtcgcgtcaggtattcgagtggcagaagatgacacgaccagagacgttgaccgacattcagagggccgctcgtttcttctacctgcagcaccatgctttcggcggtaaggtcagcgggcaaacgttcggcaccgcgacaacaggcccggccgtcaacctcctgcgcatcgaggaaaacctgtcagctgcatggcagcggctggcgggaacctatgttgagaatctgccgtggcttgagtgcgttgagcgctacgatcgcccgcacacctttcattacatggacccgccgtactggcagaccgagggctacggcgtggacttcccgttcgaagagtacgagcggatggccgacttcatgcgccgctgcaaggggaaggtaatggtcagcatcaatgaccatccagatatccgccgggtgttcgaaggcttccatatttag

SEQ ID NO: 323030 - DNA, 267 bp, Pseudomonas aeruginosa
atgctggtgattcggctgaaaagcaagtggaccctgaagttggaccgccagataggcagttccggcaaacacgggatatgggcattccactgctctgaaagcactttcgcgccgtcttcgaacgacctgcggcgcactgcggcgatccttccagccgagcccaaggaaggccagacggtggacgtatcgatctgcgagaccgcgcactcgccggatggctggattgccgtcggatcaggcgttgctgcttacgaagcggagcgctga

SEQ ID NO: 323031 - DNA, 687 bp, Pseudomonas aeruginosa
atgtgtggcaggctttcgcagtacacgggacttcacgagttcgtcgacgcgctgtcgattcccaacgcgctggtcaaccttgtcggcgagcagcccgagcgctacaacgtcgccccatcgacgaccgtgacgacgctcagattggaaggggacgccctggtcgtccaggcgatcagatggggatggaggccgttctgggcccgtgatcgcgcggcgccgataaacgctcgagtcgaaaaggtggcgcatggacgcttcttcagcaccgcgtggcgccatcgcgcgctgacgccgatctcgggctggttcgagtgggtcgatggaggcgaggcgcggaagcaaccgttccatatccaacaccgggacgggagtccgatcctatgcgcggccatcggccagtttcctggcctcgatgacgaaccggcagatcaccatgggttcgtgatcattaccgcggacgccgagggcggcatggtcgacatccatgatcggcgtcctgttgtgctgtcacccgaactggcacgcgagtggcttgaccctgcgacgccgccggaacgcgcggagcagatcgtgctccaccagggtgagccgagcgagtcgttccggtggtacgcggtcagccgagacgtggggaacgtccgaaaccagggcgcccatctgatcgagcctcagcgctccgcttcgtaa

SEQ ID NO: 323032 - DNA, 516 bp, Pseudomonas aeruginosa
atgtcctattccgatcccaggcatcgccacggtcagcgcctgacccaatggctcgcagcgatccggcagcacgcagcatggctgtatgccgctgatgagcagtacctgtatctggtggccgaggcaaacgaactctaccagtgcggaatcgtgggcctgcaagacaggcacgatatggtcaccgacgcgctcggcatgtactcctgggcgatcgagcacggcataacgcgcgagacgcactactgctcggactgctgctacgacgtgctcgacggcggcgtcgtcgtcgggagcgtggacgacgagggcatctaccacgggcccgcacccgcacgacagcggctgggctacctcggccgggatcccctggacgggataacatacttgcgcctgggccaggcgcttgagcgcgccggcgttgtgcgcggtctggagatcgaactcgacgcaggcgggacgctgctgcttgtcgagcagatccccagcgacttccggccgtggcgttggcccacctga

SEQ ID NO: 323033 - DNA, 630 bp, Pseudomonas aeruginosa
atgctgattaccgagcagcagttgctgcagatacttcccaacgccggccatcacgccggcttttttgtgcccgcactgaatgctgccatggggcgcttcggcattacctcgccggtgcgggtcgccgcgttcctcgcccaagtcgggcacgagagcgcccacctgacccagttggttgagaaccttaactatagcgcccgcggcttggctgcgacctggccgagccggtacctcggtgccgatggccagcccaacgccctggcgcagcgcctggcgcgcaatccgcaggcgatcgccaccaatgcctacgcatcgcgcaccgggaacggcgatgaggcctccggcgacggctggcggttccgcggtcgagggttgctgcaaatcaccggccgtaagaactaccgggctgccggggccggcctcggcctgccgctggaggctgagcccgagttgctggagcagcccgagcacgcggccaggtcgagcgcctggtggtgggcggcgcatgggctcaacgatctggccgattcgggcagctttgcacttattacccggacgattaacggcggcatgaattgtcaggcggagcgcctggcgctgtgggagtgggcgaagagggtgctgtcgtga

SEQ ID NO: 323034 - DNA, 189 bp, Pseudomonas aeruginosa
gtgatctccgcccgtgcgttctcggtcgcgctggcctgcctgctgctggtcggcctcggcgctgctggcggtgtctggattggcgcgcggcactaccggccgcagctcgatgctccgcgggcggatttggtcgcctgccgcgccgccaggggaagcctggaggccgcagtggcggagcagggcaggtag

SEQ ID NO: 323035 - DNA, 2841 bp, Pseudomonas aeruginosa
atgcaaacctcgctcataaacatagcactcagcattgcattatttcttgtgccgactctagcaggagcaaccgaagaaacgattatcattaccagccagatgaacactaatactcgaccttggcttgatgagaaagactggcaatggctaaaagattacgagctaacagtcggtatagtctccccagaccatcctcctatttcaatcattgaggataatagataccaaggaatttctgcagattatctatccttgcttctacctcgaccaccaaaagtaaaaaagtacccgtctcgcaaattagctttagatgcccttcaaaatggagaaatagatatactagagcgcggcaacatagtagaagcgcaagagagaaatctattctttagtgacttctatatgcgccaacagtcagttctagttcagtctatggcacaaccattcagttcagacaagccagaaaatatcttagcattagctatcgaaggagcaactgagaaagaagccaaaatacactatccccacagcctagttaaagagtaccactctccattaatcgcgctggaagaactagcgctaggagatgtagatggcgtcctattggagttatctagcgcccagtacctgatacaaacaaaatatatgctcgacttgcaaatagagaacttctccaatctcaactccaccggcttaagattcctcttcgcgcgccaccaaaaaaggctagaaaggataataaaccgaggactacctcttgttcaaagaaagcatggcgaagctattagacgcaactggagcgccggccatactttacactttcaggaccccaaaattggcttaaccacagacgaaagagaatggataaatagaaatccatatgtttcagtcgcagtgattccctcattaggcccacttagtcaactagactccaaaaacactacaagcggaatagctcacgactacctagatttaattagtcaacgcagcaggctaaaattcacttatgttcaggcacaaaacatttccgaagccgaggaattattacgggacggcaaggcgctaatgaccccatactttcctccacaagtaacatccactgccgacctagaggtactgcctccttatttgcatacatcacccgtattgatgacacttcaaaaagaaaacagaagacccagacgcctaaaaggactagaaagtttagaaggaaaaaaattagccatgacagaaggctattttctagaaaattacgttaaaaatgaatatccaaatatcaaaataacctcataccagaatactgtagaagcaatgcaaagcgtcgaacagggaagcaacgacgcaatacttaccaataactttatcggcccctacttatcaatgcagtacttcagcaaccgtataaagattgcagaaattttgagcaaccaacctattccacttggcatagccgtagcaaaggatcaggaagtcctaaagaatatattgagaaagtcacaactaaccataacaccagaagaagtttcacgaatcctttaccgctggcgaccaaacttttcagaagggaaaaaagatttctggaaagatcataaagaagcaataataaagacgacatcgatattcttaatgctaatcttagtttgcctaacctgggcattctatttagtccaacaagttaaaaaaacacgctcagccgagaaacgagcagaagcagccagtcaagctaaaacacatttcatcaccacattgaaccatgaaatacgcaatcctttaaatgctataatcggtcttcaagaaatcgcgcttgagcgaagcaaaaatgaaaagaaaacaacacatattttagaaactgcgaatgaggcagcccagaatctcctgctgcttttgaccaacgtcttagacctatcccgcatcgagtcaggaaaactcgaacctacactgcaaactataaacttaaaggaattcctacaaaaatctacaaatatagtaagaaatctagcacaacaaaagcgtcttaattttaccacttacatcagcgaaagcaccgaccttctcgtattaattgacaaaactagcctcaaccaaataatagcaaacttactcagcaattctataaaattcaccgagataggagaagtaagtatagaagcacatacatacattcacaacgagaaaacttttctacgtctaaccatcgcagacacaggagtcggaatcaacgaagaggaccagaaaaagttattccagcccttcagtcaagttggagaaaagacacaagctcacttatccggaagcgggctaggcttaagcataactcaaaaactattaggtctcatgggtggtcaactaagcttaagcagcaaagaaggtgtaggaacaagcttcactgtgagactaccgttatccttggtaaccgtgcccccctcccttcaaagcataaagactccaaaagaaaacactgagccactgtcagttctaattgcagaggaccatccatttaatcgcttagctttacaaatgcaacttgaaaaactaggccactcagttcaaactgccaacaatggtaatgatgcatggaaacattggagaccaggtaaatttaacataatcataacagataatgaaatgccgacttccagcggatcggacctaattgaaaaagtcagaaaggaagagcagcgctctgcttccaccccaagctatattattgttttaacagcaagtgccgagaaagatatgactaacttctttctctcacgaggagcggatgctgttctctataaacctgccacgacagcccagctagaatccgcgattttaaattacaaattagacccaaaatga

SEQ ID NO: 323036 - DNA, 957 bp, Pseudomonas aeruginosa
atggctgctgtgatgctcagtgagtgggcaaatgcaacggggcaaagtaggtatggttgtgcgtggtgggacactagtactagtacggtggcatctttcgatactgtagcgtttcagaaagcggctccgagtaatattattcttaagaatgttgccgtgggcggtgttatggcaagctatcctatttatatcgatagaggttatacgaagtgcaatattgatcttcttcccgggcaggttagagtgagtttcggggtaaacacagttatgcctctggtaggaggtatctatcaaacaggtttatccggagttggcataaggtttagcaatagtcagtcgctcattccgggggggtatagttaccgtaacgctccggcgatgattgcagatgttggtttgattaaaatggagatcgttcgtactggtgagttggttcgtgagggggtaattgattttgattttgaactcattggtgtagttcaagattgggaggctttcagagggaggtactttggtcaggggcaagtttctcgtctgggttattttgaggggtgtaagggggatgatttgaatgttcagatgggaagggtggcaatacaacagatcggccaaatgagatcccgcccgtttactttgagtgttctatgtagtggggggcccgctaaaggtgaaaaacttccagttaaggtctattttgagggctctactgctggccctggcgtgcttagacttacgcccggaggagctgaaggttttgggatttctctgaaaactactggtggattgaatttgcctttcgcaagatcccaagcgcttggtatggactgggtgaggtcggaaatggatggagagcggtattcctttgaggctgtggctgactatattagtcttgctggctctggtgctaagcctggagtggctaatgcaacattgtcatatattttagagtacgattga

SEQ ID NO: 323037 - DNA, 1398 bp, Pseudomonas aeruginosa
atggggcgacctgcagggtggatgcaggagttgacggggcgaggggcaatgcgctcgccaggtgccccgtcacttcgccgagagatcgagcggctattttgggaacagatcgcaaccgggatcacaagcgaaagggcggcagaggctattagcgtatcgtcagcggtaggcacacgctggttccgtcatcgcggcggaatgccattattcatgtcgaaccacatatcaggaaggtacttgtcgttcgctgagcgagaagagatcgggttgctccgggcgcaaagtgttggtgtgcgtgagattgctcgccgtcttggacgaagtccgtcgaccatttcacgggagctgactcgtaacgcagcaactcgtagcggccggctcgagtatcgcgcttcagtcgcgcagtggaaggcggaattggttgccaagagaccgaagccggcgagattggtgaccaacccgcaactgcgccattacgtgcaagagcgcttggaaggcaaggttcataacgctaatggccgtgagattgccggtcctctacaggcaccattcaagggacgaaataaaccacatcgtggtgaccgtaaatgggtcaatggttggtcacccgaacagattgccaaccggctgcaaatcgactttccggatgacaagtccatgcgtatttctcacgaagccatatatcaggctctctacattcaagggcgaggcgctctcaagcatgaactggtgagttgcctgcgtactgggcgggcgttgcgcgtaccaagagccagggcgcaggccaaagcatgggcacatgtcagcgaggatgtcatgatttccagccgtcctgctgaggtggaggatcgcgccttaccagggtattgggagggtgatctgatcattggcctgaaccgatccgccatcgggacgctggtcgagcgctcaagccgatttaccatgctcgttcatctgcctcgcgaggaaggttacgggctgactccccggacgaagaacggccccgctcttgctggctacggtgctgtcaccatgaccaatgcattgaagagggccgtgactggcttacccgttcagctgtggcgatcattgacttgggatcgtggaaaggagttatcggatcacgtccgctttaccattgagtctggagtaaaagtcttctttgccgaccctcacagtccatggcagcgcggtacgaacgagaatacaaacggtcttctacggcaatatttcccgaaaggcaccgacctgtctcgttggagttaccaagagatcctagccgtagcccatacgctgaacactagacccaggaaaacgctcggctggaaaacacctgccgaggtactgaacgactatctaacatctattcagcaacccagtgttgcgacggccgattga

SEQ ID NO: 323038 - DNA, 570 bp, Pseudomonas aeruginosa
gtggtctgttcagctttcgatgtggcgcggtcttgctactacgtccaccgtcttcgacggcggcgtgtcgatgctcgccgcgtggcgctacgcagccaggtcaaccagttgttcagccagagtcggggctcggccggcagccgcagcatcctgggcatgctgcgcgaagagggcgtgaccatcggccgtttccgagtgcgtaggttgatgcgtgagctgggcctggtcagcaagcaaccgggctcgcacgcctacaaacaggccacggttgagcggccggatatcccgaatcggctgaaccgcgaattcgcgaccgagcatcccaatcaggtgtggtgtggcgacctcacctacgtctgggcgcaaggccgttggcactacctggccgcggtgctggatctgcatacccggcgggtgatcggttgggcgttctcggccaagccggatgccgagctggtgatcaaggccctggacatggcctacgaacagcgcggcaggccacagcaggtgctgttccattcagaccagggcagccagggtggattcaaccggtcgttgcaacacctttga

SEQ ID NO: 323039 - DNA, 279 bp, Pseudomonas aeruginosa
atgagcaagcaacgacgtacgttttccgccgagttcaaacgagaggctgccgccttggtgctggaccaaggctacagccatatcgacgcctgccgttcgctgggggtggtggactcggccttgcgccgttgggtgaagcagctcgaggcggagcgccagggtgtgaccccgaagagcaaggcgttgacgcctgagcagcaaaagatccaggagctggaagcccggatcaaccggctggagcgggagaaagcgatattaaaaaagctaccgctctcttga

SEQ ID NO: 323040 - DNA, 594 bp, Pseudomonas aeruginosa
atgactgagctcgtgcttgaatctccctttaattccgccctgctgctgatggatttccaggaattcgtgctgaacaacttcgtgcccgcacctcgcgcagccgaggtagtggcccgcacctccagatttctttccagggtacggcaaaccgatatgcttgtagttcatgtaacggtgggctgcccgcccgatggtccgccaatggacaggcgcaacaggctattccgcgagctacgtgaaagtggcttgatcgaaccgggaagccccgggttggcgatcaccgccgccttgcagccgatcgaaagcgaaccggtcattacgaagagtcgcgtcggcgccttcacgggtacggaactggacgagcttctctgggcgcatgatattgaaacattgctcatcgctggagccactacctcaggcgtagtgctgacgacggttcgccaggcgttcgatctggactaccagttggttgtgctcagagacggctgtgtcgatggcgatgcagagttgcatgactacctcatggccagagtcatttccgaccacgccacgatcaccgaaatcgatgaagtggcgaaaactctacgcatgtag

SEQ ID NO: 323041 - DNA, 1215 bp, Pseudomonas aeruginosa
atgcaaggcaacatgaacgaacccgctatcgactgctggcaacgcaacctcgccgtgtgcttgttcggagccttcaccaccgtcttcgccatgacacttatcctgccgttcctcccggtctacataggtcaactcggggtatcgggccacgctgcaatcgtgcagtggtcgggtatcgcctacgccgccactttcgtcaccgccgggttggtagcaccgctttgggggatgcttggcgaccgctacggtcgcaagcccatgctggtccgagctagcctgggaatggcgatcaccatgttgctgatggggctggcctccgatatctggcaattcatcggcttgcgcttgttagcgggaatcgccggcgggtactcgtcgggggcaacgatcctggtcgcggtgcaagctccgaaatcccgttcggcatgggcattgggtcttctttcctcgggcgtgatggccggcaatctgttagggccgctggttggcggcttcctgcctcctctgatcggcatacgagccacattctggggcgccagtggattgatcttcattgcgtttgtcttcacgaccttcatgttgcgcgagactgcacgcccctccgtccccgccgtcgaagaacctcccaaggtcggttggtcgaatatgcccaacaaggcggtgatcctcgccatgctggcgacaggcctgctgctgatgattgccaacatgtcggtcgaaccgattatcaccgtctatatcgaaacgctgctcgaggactcgaggcgggtgacgtctgtggcgggtctggccatgtcggcggcagcgctcggaagcatcatctccgcgacctatctgggtaaggtggccgaccggattggctacggcgtcatcatgatagccgcgctgagcgtcgcggccgtcctgctgattccccaggctttcgtatatgcggggtggcaactcatcgccctgcgcttcctgatgggcatggcgcttggcggcctgcttccgtgcatggccgctgtaatccgccatagcgtcccggagcgattcgtcggctcggcaatgggctggtcgctatccgcgcaattcgccggccaggtaatcgggccggtaatcggagggttcgtcggtggccagttcgggatgcgcagcgttttcctggtaaccagcctgttgatgctggcaggggcgctattcaactggcgagcccttgggcactccacccgctag

SEQ ID NO: 323042 - DNA, 657 bp, Pseudomonas aeruginosa
atgacggtcattcagcaggctgaagagcggctgcgccgcttgattctggatatggagatcggccctggagagcgcctgacggagcgctggctcgaagggcagacaggggcctcgcgaagctctatccgcacggcactggttcgtcttgaggctgaaggtctcgttgcgagggagggccggggatggctggtgccgcccatcgatcttcaggaaatagaacaattgttcgtataccgggagatgcttgaggtaacggcagttcgcctcggtggaaaagaggcggaagaaagctatctccgggagggggaggccatactggatgcggtgccgataaatgcctcggcagaagagaccgagtctgccggacgccaattccacctttggattgccggtttggcccgcaatgaattcatcagtcgggggctcggcgaggccctgacgcgcctccagcgtgtcagatggttggagagccaaccggaacatcacggctgggccgagcaccgcgccatcatcgccgccttgagggcatgcgatatcgaacgcgccgcggggatggtcgaatcgcacgtccgggagacaagggaccggttgctggaaactctccgaaaagaccggcgcagtctcagggcacgcggaatcaccattcttcctgagtga

SEQ ID NO: 323043 - DNA, 1035 bp, Pseudomonas aeruginosa
atgagactgccccgcccgcgttttgccctttccgccgccttgctgctttgcctttccggttgcgtgtcggaactcgattcgggcgcctatggcagcatggacgatccgcgcaacgcgcagatgctggacctggtggaccaggcgctgaaggggaacatggccgtggtactggtggccgacgtgatgccgcacaagtccctgagcgatgcgctgaccatgacccagtggacgccaacggcgatctgggagtacgagaaggacccgaaggtgaccttcggccgcaagttccagaccaacgcgctgcagcggaagcccgacgagacctatctgttcaaggccttcgaggtgcatatcctgccgcccggcaagtacctgctgaccggcggcgacgactaccagatccatggcttgctcgaccaggtcggcgcccgcagcggtccgcccggttcgggccatggcgccaacggcaccgcgtacctgtcccccgagctgtatcgcgagtactaccgggaagaagtctggaaagatgccacctatggcagcgagatcaagaccgagaaggtctgcaccgccgtgcatgtggcctcgggcgcctgcgtgagctggggcgagcagcaatacacgcagacgacccagggctcccaggccggctattaccagcagaccgactcccgcgacgtaccttcgatcaagatccaggcacgcttgccggtcgacaaggcgctggccagcttcagcgtgcagggcgggcaattgctgctggccccgcgcatgcacctgaagacccccggctacaagtaccagcagtcgaagtgccgggcgatcgatccgaagaagatcgaatgcccattggaaaacctgaccgtctacacctggccggcgccgatggacttcagccagtccctgatcgcccagcgggccctgagcgacaagcaccggcaactgctgtccagactccagcccctgcagatcacgccgctgcgcaagcagggcatggaagacccggtctggggcgtgccgctgtcattgaaatag

SEQ ID NO: 323044 - DNA, 597 bp, Pseudomonas aeruginosa
atgaacgtatatcgcaaggtttcccgcagtgccgcgacttggctgtgcgccgcgctgctggccgcatccggccatgcctgggccgaagactggtgggtggtacacaagggcgacgaccctgccgagcttgacgtgttcctggccgatgccgattcgctggcacccgtgccgggtatcgaaaacgcctggcaggtgcagatcgccatgctgttcgactccttccatctgctcagcgcgcaccagtaccgctgcgatacgcgagaggtgaaggtggtcaacgccaagaccttctccaacaacgggcaacccacgaacctccagttcaccttcgccaagggctggaccccgctgcccaacgaaagccatgaggctgtcctccagttcatctgcgcgccgcaggagcgcgaacgcaatggcatgcgctccaccggcaggggcgtgccattgcaggcggtgatcaccgccgtcggcatggtcgagatggagcgcgcccaggccaatctcgccgaggcccggcgcaagctcgaagaggccaagagcgatcgcgtcatgggcgaactcgatcgtctgctcggcaacgaaccccggaagccctga

SEQ ID NO: 323045 - DNA, 291 bp, Pseudomonas aeruginosa
atgaagtggtatagccgcatcagcctgggactcagcctcgcggtcgcgagcgctttcctggtggcgtactggcgatcgctcgacagccatagctatcccaatatgaatgcgcctgggctgatcgcctacctgctggcctttcctgcctgcgccctgttgctgcattccactgcgttggcattcgtgctccagcagcgaaagctgggaagcgctcgcgaaagagcgctgcaatggacgatcaacctggcgctgtggatggcgccgctttgtttcatatttgccagtctttaa

SEQ ID NO: 323046 - DNA, 378 bp, Pseudomonas aeruginosa
atgaaaaaaagccccctgctgatactgagcgtactcctcgccgcgtgcggccccgacaagctgatttccgacctgccgtcgccgaacgggcaataccacgtcgaggttcggaaatgcccggagaaaggttcgatcacctggggcgaagaaatacaggtctccctcctcgaaaccgggaaatcggaaaagtgccatgcagtcgtgcggtcgctggcgcaattcgacctgcgcgcatccgcggaccaattgcaactggagtggctgtccgatacggaactcagggcctggcaccctagcttcgagcccgggaaccaaccgaacggctcgcgcctgaagcacgatgcgccggtgaagatggtctttgcgccgaagcgctga

SEQ ID NO: 323047 - DNA, 1080 bp, Pseudomonas aeruginosa
gtgatccccgtcgcccctattcccctgatcgtcccgctcatctacctgtcgtcgttcgtcgccggcatctggctgctggtctggctatcgctcctggccttcagcccgcgcgcgcgccagcgcttgcgccgccgctggccgagccgcggcctgctgatgctgctcctgctgatcccgttgggactgcgcgcctggctggagatcggtctctggcagtacgagcgcgaacgtgcacgcgaggaagccgcgcacagcgccgtgctcgagcgccctacccgcctcggaggcatcgagatgcctgccggcacccggctgaagctggaactcaagcaccagccggaaagcttccgagaagccgaattccccaccccggtgacgatccgcggcgtcgccacccgccacctgcaacgctggctgcagagcgagcaggacaacccgcaggacccatggaaaaccaccggcgtccatcccacttcgctgcgcctgcgtggcgagggagtcgccgagatcgaaggctggcgttgcgacgccagccaggaaatcgccttcgccagcgagcgcgacgggcgtcccgccgccttcgaaggctgtagcctggcgaccggcaaccgcgccgacgacatcgacttccccgccggtgcgcgattgttcgccagcgatggcatggtctacaccgacggctaccgcgacgccgagcgctggcgggtaatgccggaaaccgggcaacgggtgtcggtgcgcggcatcgcgctgagcgacggcgccctggccttcgaccgcgaccgccgcctgtacggcctcggcggtacggtcctcgccgaggccttgcaactgggcgcctggcactacccggcaggcaccgaggtcagcctttcaccccgcgccgcctggcgcgcgcaacatccgcacgcctggctgttcagtcctacccgcgaagccgcttcgcatgcctccggcgagcgcctggaacacggcgtctcgctgttgcagacgctggacggccaggaacttgagcacctcgacaaccgcgcggcaggggtcatcgacttcatcgaactggagatcggcgacgaacgctga

SEQ ID NO: 323048 - DNA, 1545 bp, Pseudomonas aeruginosa
ttgaagaccctgaacgcccagttcctgctgtcctatgcactgatgttcggcctggccgcctgcgcctcggtggcgttgtacctgagcatgtcgatctcgccggaaaccatcaacgtggccggcgcgcagcgcatgctcagccagaagatggcccgcgaggcgctgcaattgcgactcggcgccggcgacccaaaggccctggccgcgaccatcgcccagtacgaacgctcggccgccgacctggatacgggcaatgccgagcgcaacgtgagccggatgggcgcgccggagatcgccgcccagcggcagaaggtggcgcagatctggggccgctaccgggccatgctcgaccaggtggcacagcctgccagccaggtcgatctgcgcggcttctcgcagtattccaccgagctgttgggcgagctgaacaacctggtctcgctgatgagcgcgcgcgccgacagtgtccagcacacccagatgtggatcgccttcggttgcctgttggcgatcctggtgctggtggtgcttggccggcagttcggcctggcgccgctgatgcggcagttgcgtgggttggaagtggcgctgaccgaggtcggcgcggcgaacttcacccatgccctggcggcgggccatgcggacaacgagatcggccgcatcgtcgctggctacgagcggatgcgccaggacgtcagcggtttgctggcgaacgtcaagcgcagcgcggcagagaccgacaaggacgtggccgaggccctggagcaggcgctcggcgccggcgaccaggtggcgcgccagcaccaggacctggaccaggtggccaccgcgatgaacgagatgagcgccaccgtggccgaggtcgcccgccacgccaaccatgcggcgcactccacgcgcgacgccgcggccctggcccacgagggacggcgtctggtggagcacgccagcagccagaccggtgcgttggcggaggaactggagcagaccgccctggcgctgaacaccctgcaccagcatgcgggcagtgtcggccaggtgcttacggtgatcagcagcatcgccgagcagaccaacctgctggcgctcaatgccgccatcgaggcggcgcgggccggggaggccgggcgcggcttcgccgtggtggcggacgaagtgcgttcgctggccaaccgtacccagcagtcgacccaggagatccaggggttgatcgagcagttgcaggacggcgccaacgatgcggtcgccgccatgcgcggtagcgccagccatgcccagagcaacctcgtcgaggccgacagcgcggcccaggcgctggggcgcatcgtcgccacggtggaagaactggacggcctcaaccagcagatcgcgaccgccgccgaggaacagagccaggtggcccaggacatcgaccgcaacatcaccaacgtttccggactctccgagcaggcccacgaagggaccgccgcagtgctttcggccaaccagagggtcaaggagcacatggctggcttgcgcgtagtgctcggtcgcttccgtacctga

SEQ ID NO: 323049 - DNA, 1239 bp, Pseudomonas aeruginosa
gtgcacgcccgccgcctgccccgcctcttgccgctcgccctcgccttcctgctttcgcccgccgccttcgctgccgacacgccagccgccgagctgctgcgccaggccgaagccgaacgcccggcctacctcgacacgctccggcaactggtcgcggtggacagcggtaccggccaggccgaaggcctcggccagttgtccgcgctgctcgccgaacgcctgcaggcgctcggcgcgcaagtccgcagcgcaccggcgacgccctcggccggcgacaacctggtggccaccctcgatggcaccggcagcaagcgcttcctgctgatgattcactacgacaccgtgttcgccgccggcagcgcggcgaagcgtccgttccgcgaggacgcggagcgcgcctacggacccggcgtggccgacgccaagggcggcgtggcgatggtgctgcatgccctggcgctgctcaggcagcaaggcttcagggactacggacggatcaccgtgctgttcaatcccgacgaagagaccggctccgccggctcgaagcaactgatcgccgagctggcccggcagcaggactacgtcttctcctacgagccgccggaccgggacgcagtgacggtagccaccaatggcatcgacggcctgctgctcgaggtgaagggtcgctcgtcccatgccggctcggcacccgagcaaggccgcaacgccattctcgaactgtcgcaccagttgctgcgtctcaaggacctcggcgatccggcgaaaggcaccacgctgaactggaccctcgccaggggcggcgagaagcgcaacatcattcccgccgaggcttcggcggaagccgacatgcgctactcggacccggccgagagcgagcgggtactggccgacgcccggaagctgaccggcgaacgcctggtcgccgataccgaagtcagtctgcgtctcgacaagggtcgtccgcctctggtgaagaaccccgcctcgcagcgcctggcggaaaccgcacagacgctctacggccgaatcggcaagcgcatcgagccgatcgccatgcgcttcggcacggacgccggctacgcctacgtgcccggcagcgacaaaccggcggtgctggaaaccctcggcgtggtcggcgccggcctgcacagcgaggcggaatacctcgaactatccagcatcgccccccgcctgtacctgacggtggcgctgatccgcgagctgtccgccgactag

SEQ ID NO: 323050 - DNA, 468 bp, Pseudomonas aeruginosa
atggcgaaatcctccgaacgattcgaatccctgcgccgggatatcgacgcactggcccgccggctcgacgtgccgtcggtgctgatcatgcgttccctgccccggcacatgcgcgtcgaggcctccgccggacgcctggaggacacctacccgatcggcgccgaaggccgcaagagcgtccatgaagacggcgccaaacccctctactgcgaacgcgtggtcgaccgcgacgccccattgcacgtgcgcgactcgcgccaggagacggaatgggccggcaacgaggatgaagtcgagttcggcctgagcaactaccttggctatccggttcatgcgcccgacggcaccccgtacggcaccgtctgcgtactcgacagccgaccgcgcgactattcggccgaggaacgagccctgctggaagaattgcggcgcaaggtcgaggcgctgctggcggaaaccgtctcatga

SEQ ID NO: 323051 - DNA, 219 bp, Pseudomonas aeruginosa
atgcccatcgaaatcaggctggacgtcatgctcgccctgcgcaaggccaggtccaaggacctggcccaggccatcggcatcaccgaacagaacctgtcgctgctcaagcagggcaaggtaaagggcattcgcctcgctaccctggaggccatctgcgcctacctggcgtgccagccgggagacctgctggagtacctgcccggcccgaccgaggagtga

SEQ ID NO: 323052 - DNA, 558 bp, Pseudomonas aeruginosa
atgacaagcgaccgcctggccggctacagccgcctgatggctaccctgaccctgctgttgatcgccggcatgctgctgctcaacgccgcgtgctggatcttccccgacctcgccagcgagcacggcctcggtttcgctctcaccgccaccggtgtcgccggcgacctcggcgttgtggcgcgggacatgccgctctggcaggccctcggcggcatcctcctgtcgagcctgccgctgctggtcctggccagtggactgcaggcgctgcgaaggctgttccagcactacgggcgcggcgagtatttctgcgaagacgccgcggcgctgctcggcaaggtcggcctgtgcctggcttgctgggtgctggcgaacttcctgctggaaccgctgctgacggtctgggtcaccttcctccaaccccaggggcaacgcatcgtcagtctcagcttcggttcggcggaactggtcagcctgttcgccgccgcctcggtgatggtgatcgcgcgcatccagcgcaaggccgccctgctcgccgaggaaaaccgccagttcgtctga

SEQ ID NO: 323053 - DNA, 717 bp, Pseudomonas aeruginosa
atgctcaaggccgccaatacccgtgaaaccgtgcgcatggcgctgctcagcgaacgcgccgatggcgccctggcctacaacccggcgcagagcgtcgaactgtcggtcagcggcaacgagttcagtcgcctggagaagaccttcgactaccgtcccgccgccgaccagcgcaacctctacgtggcggtctggagcgacagcggcgccagcctgctggtcgacgagatgaacctgcaggaagcccaggccgcgccgccgagcgtaccgccggcgccgaaacgcatcgcctacgacttcgagagcggcatcggcggctggagcggcgtgcatgccagcgcccgcgccacgcgcgtcgccagcgccgggcggctggccctggaagcctaccagcggcgctacgccggcaccggcgcgagcaccagcctgctgggcaacctggaagcaggccggacctacgcgttcagcgcggacgtacgggtcggcgacggtcgcggctcgcaggccatgacctatgcctacctctacctggaaagccagggtcggcccggcgaatacctgcccctgggctacaaggtggtcgagaatggccgctgggccagcctgcgcggccaggtgcaattgccgaaggggccgatcaagcgtgctgaactgatgatcctcagcggtaaccagcaggagtcgatgttcatcgacaacgtccagttgctgcagaagtag

SEQ ID NO: 323054 - DNA, 1110 bp, Pseudomonas aeruginosa
atgaagaaatccctgctctgctccaccctagccctggcggtagcctctgccgcccaggccgcgccgaagaccgtcgacatcatggtcctctacacccccgcggcgacccagaccgcaaatggccgcgacatcgatgcgcggatcgccagctacatcgagttcgccaacaccgcctacgagaagagcggcgtcaacctgcgcctgcgtctggtgcacaagcagcgcctggactgggccgactacccgacggtgaccggcgccaacctcgatcgcttcatgcgcgacccgcaggtgcagcgcctgcgcgagcagtacggcgccgacctggtcagcctggtcaaccgctcgcagaacagcggcaacggctacatcacctgcggcatcggctacatgggctcgggcgataagaacagcgggcgcttccacggcaacgccaaggacattgcctacaacctcaccggggtcgactgcgggctcaacaccttcgcccatgaagccggccacaacatgggcctgcgccactcctacgaacaggacctggagtccagctactacgatccgcgctacgcccacagcggcacctacgaatggagccgcggctacggcgtgcaggggcgcttcgccaccgtgatggcctacccgcatgccttcggcaccaacaagcaggctccgttcttcgccaacccgcgcctggtcaacgccgaatgcgccaaccagccctgcggccgcgaagaacacgccgacgccgtacgcgcgctgaacagcatggccacgcagatcgccgactttcgcccgaccaaggtacccggcacgctcaacccgggctccggcggcgacacgccgcccccgccggacctgccatggtgcacgaaagccaagctcggcggcctgctcggcgatggcgagttcgccagcatggaaggctggcgcgcatggtccggcaacgcccagctgagcctggtgaacgtcgccaagggctgccgcgacaatgccttgctggtcgacgtgcgtggcttcgatctgctggtccgccccattgccccccctgcgcgccggcagcggctaccggctgagcggcaaggtcatgctcaaggccgccaatacccgtga

SEQ ID NO: 323055 - DNA, 480 bp, Pseudomonas aeruginosa
atgctcgccccgacccccgtcacgacgcccgcgccacgcgagcgggtgacgctctggcaaggcgaactgcgcagccgcgaaggcgcccagggcattcccgaatacctggcgcaggtcgaacccgccctgctcgacacgctggcgctcggccaggtgctggaaatgagcctgccggggcgcgagcggcccttgcaggcacgcctcgccagcacccataacagcgccggcctgccggtctggcgcggcggcctggtggacggcgacgaggcggaaagcctgaccgtggtgcgcggcagcctggaaacccacatcaatgtcgccaccctcgacggcagctactcgatcatcgtcgacaaccgcagcggcaagacccgggtgatcgacgagaacgacatcgccgcgcgtagcgacccgcacggcgatcatgtcgacgcgccgctcgccgagctgccaccgatgccgccgcccgcccagggctga

SEQ ID NO: 323056 - DNA, 867 bp, Pseudomonas aeruginosa
gtgccggccccccaggtcatgccggccaaggtcgcgccgctgccaacctccttcaggggcaccagcgtcgatggcagtttcagtgtcgacgccagcggcaacctgctgatcacccgcgacatccgcaacctgttcgactacttcctcagcgccgtcggcgaagagcccctgcagcaaagcctggaccgcctgcgcgcctacatcgccgccgaactccaggagccggcgcgcggccaggcgttggcgctgatgcagcaatacatcgactacaagaaggaactggtgctgctcgaacgcgacctgccgcgcttggccgacctcgacgccctgcgccagcgggaagccgcggtgaaagccctgcgcgcgcggatcttcagcaacgaagcgcacgtggcgttcttcgccgacgaggaaacctacaaccagttcaccctggagcgcctggcgatccgccaggacggcaagctcagcgccgaggaaaaggccgccgccatcgaccgcctgcgcgccagcctgccggaagaccagcaggaaagcgtgctgccgcaactgcaaagcgaactgcagcagcagaccgccgccctccaggccgctggcgccggcccggaagccatccgccagatgcgtcagcaactggtgggcgccgaagccaccacccgcctggagcaactcgatcggcaacgctcggcctggaagggccggctggacgactatttcgccgagaagagccggatcgaaggcaataccgggctgagcgaagccgaccgccgcgcggcggtcgaacgcctggccgaggagcgcttcagcgaacaggaacgcttgcgcctgggcgcgctggaacagatgcgccaggccgagcagcgctga

SEQ ID NO: 323057 - DNA, 435 bp, Pseudomonas aeruginosa
atgaatccactgatcaagaccatcctgtcgaccaacgccggtgccggcctggccatcctgcgtatcgtcaccggtcttaccctgatgtcccacggttcgcaaaagctcttcggcatgttcggcggcgccggcctgaacggcatggcgcagtggttcgaatccatcggcctgacccctggctacctgctggcgaccctggccggcagcgccgagttcttcggcggcctggcgctggtgatcggcctgctggtgcgtccggcgtcggtggtggtgggcttcaccatgatcgtggcgatcttcagcgtgcacatcggcaatggcttcttcatcaccgacaacggctatgaatatgccctgaccctgctgatgatcagcgtggcgctgctgatcgatggcgccggcaagttctcgctggacggcaagctgtcccgctga

SEQ ID NO: 323058 - DNA, 1431 bp, Pseudomonas aeruginosa
atgacgcgtctgttgctgctttcgctttgcctgctggtgctcgcacccttgccggcggctgcgcgcatcaccggccagccggacaactggcacagggaacagccggagacccgcgacctggcgagcatccgccgcgctggcgtgctcaaggtgctggtcaaccagagccgcaacagctcgggcgaggtgaagggcgagccgatcggcgtcgagtaccgtcgcctgcgcgccttcgagcaatacctcaacagccgttcgccgtccgcgcggaacctcaccctcaagctcatacccaagcccaaggaccagttgcttgccgccctgcagcgtggcgaaggcgacctggtcgcccccggcgaactgctgccggcgcacgacggcctgcaggtcagcccgagcgcgccggtgcgcgccgatgtgccgctggtgctggtggcgcgcaagggcaaccggcgctacacgcgcctggagcagttgtccgggcggaccatcccgctgccggccggcagcgccgccgagggcgccatcgaactggtcaaccagcgcctggcgcaacgccgcatggcaccgatccggatcgaaaagctggacgcttccctggccgtcgaggatgtgatggaaatggtccaggcaggcatcctcggcttcaccgtggtcgagcagcccatcgccgaacgctgggccaaggtgctgccgaagctgcgcgtcgaccgccacctggtgctggacaatcgcgccgacatggcctggtacgtgcgccgcgatgccagcaccctgcgcgcgaccatcgaccgcttcctcgccgactaccgcgcgccggccgaccaggacgtggctttccagcgcgtctaccggcgcgcctacaaggtccgcaaccccctcggcgcggcggaccgcaagcgcctggaagcggtccgtccactgctgcagcgctacgcgcggcagagcagcatggactggctggcgctggcggcggtggcctacaaggagtcgcatctgaacccgaaggcgcgcggttccggcggcgccagcgggctgatgcagatcaccccggcggcggcgcgcagcgtcggggtcggcaatgtgcacgacaaggacagcaacgtgctggccgccagtcgctacctgaccaagatccgcaagcagttcttctccagcaagcacctcgacgaacgcgagcgcctggcgttcaccctggcggcctacaacatgggcccggagcgggtacagaacctgcgcacccaggcgcgtcgccgggggctcgatccgaatcgctggttcttccaggtcgagcgggtggctgcggaagagataggcatgggtgtggtgagttatgtcagcagcgtcaacaagtactaccttgcatatgaacgcgaacgggttcgcctggagcccggggtgcgtgcgaagacggcgacggctcaaaaataa

SEQ ID NO: 323059 - DNA, 129 bp, Pseudomonas aeruginosa
atgtccctctccgggggaccggatcaatcagagcatggcagtcttggcaagttcctctccgacagcggctgcaaacggaggcattgggtagataatccgggcgccgaagaacccgatctgcgattataa

SEQ ID NO: 323060 - DNA, 804 bp, Pseudomonas aeruginosa
atgcaactcatcgatatcggcgtcaatctgacccacgccagcttcgccccggaacgtgaagcactgctcgcccgcgcgcgcgccgccggggtggtacagatggtcatcaccggcaccagcctggccgacagcgaacaggcgctgcagctctgcggcgaactcgacgagggcggccggctgtttaccaccgccggcgtccacccccacgaggccagccactggaacgccgacaccgctcgcggcctgcgcgccctgttcgacgacccgcgggtacgcgcggtgggcgaatgcggcctcgacttcaatcgcgacttctctccccgtccggcccaggaaaaggccctcgaggaacaactggcactggccgtcgagctacagcgtccggtgttcctccacgaacgcgacgccagcgagcgcctgctggcgatcctgcgcgacttccgcgatcgcctgccggccgccgtcgtacattgtttcaccggcgagcgccgggcgttgtatggctacctcgacctcgacctgcacatcggcatcaccggctggatcaacgacgagcgccgcggcacccacctgcatgatctggtaggcgagatcccggtcggccgtctcatgctggaaagcgacgcgccctacctgctgccgcgcagcctgcggccgaagccgaagaacgggcgcaacgagccggcctacctggtcgaggtgctcgactgcgtggcccgccatcgcggcgagagcgcggagcgcctggccgctcacaccagcgccgcggcgcgggagttcttcggcctgccgacgatcgactga

SEQ ID NO: 323061 - DNA, 1473 bp, Pseudomonas aeruginosa
atgggcacctggatcagcgacattccactgaaatacaagttctgggccgtcaacgcggtggccttcttcaccaccctgctgctggtgttgttcgccatgcagcaggaagccgccgggcgcaacgcttccgcccagcgcgccgccgccgccgagggcgagctggttcagagctggccagccggcagcgccctgcccgcccgcagcaacctgctgccgctggaacaggccgcgagcctgggcggcaccgctgcccaggcgctgggcaaggggcagggttggatcgagttgtccggcgcgcgccagggcgataccccgctgctcggcgcctgggtcggccagaccggctccggccagcgcttcgccgtgctcgccccggccagcgacctgtggcaggtcttcgccgaccgggccggcgcctacgccgtcgccgtgctggtgctgatgctggcgctgctggcggcctcgcaactgctgatccgcttcatcctcacccacctgcataccctcaaggacgtgatgctgcacgtcgagaagagcggcgacctgtccgctcgcgtaccgctgcagggacgcgacgaagtcggccagatggccagtgccttcaacgccatgcaggccggctaccagcgcatcgtcggcaccgtcgccgcggccgctaccaagctcgacgaaggcgcccaggcgctggcccgcagcatgggccaggtacgccagggcatgctcggccagcagagcgagaccgaccagaccgccaccgcgatcaacgagatgtccaccacggtcttccatatcgcccagcacgccgccgacacccgtgaccagtcgcaggaagccgaccgcctggccggcgccggccagcaggcggtgagccgggtcagcgcgtcgatcgccgggttgtcccagggcgtccaggacaccgccgagatgatccagaagctggccgaggacagccagaagatcagcggcgtggtcaacgtgatccacggcatcgccgaacagaccaacctgcttgccctcaacgccgccatcgaggccgcgcgggccggggaaatgggccgcggcttcgcggtggtggccgatgaggtgcgcaacctcgcccgtcgcgtgcaggactccaccgacgagatcacccagatgatcctcgccctgcagtcgggtacccgcgacgccgtggagttcatgcaggaaagctcgctcaaggccgacggttgcgtcagccaggccggcgacgccggcgaggcgctggcggcgatcgccaacgcggtggcgcagatgcgtgaaagcaacacgcagatcgccgtcgccgcggaacagcagagccaggtcgcggaagagatgacccgttcggtggtgggcatccgcgacgtcaccgaactcaccgtgcagcagaccgtcgagtcggcggccaccagtcagcaactggtcgacctggcgggcgatctgacccgcgccatcggccagctacgcctctga

SEQ ID NO: 323062 - DNA, 360 bp, Pseudomonas aeruginosa
atgggcaaacgtcatcccaacctgctcgcctggcaatggcgcggctatgccgccaaccaccgcaacccgaccaacctggtcctgcacctgatcgccgtgccgctgttcatcgtcgctgcgatcctgctgctcggcggcctgttcggcctggacctgctgcaggtggtgctcggtgtcatcggcatcggcgccggcctggcgatccaggccaagggacacgcgctggaggaacaggcacccgagccattcagcgatcggcgcgacgctgtcagtcgcctgctcgtcgagcagttcgtcaccttcccccgcttcgtcctcagcggcgcctggtggcgggcttggcgcgaacggcataagtga

SEQ ID NO: 323063 - DNA, 489 bp, Pseudomonas aeruginosa
atgccgtcaacgcgtcaattaatcgtctttctctgttgcctggggctgcctcttgcccaggccgcggagcccgtgccgctgggcggacgtccgatcgtcaccctgcagcggtccggcgacgctcccgtacggctgaccctgtccgacctcgaagccctgcccagcgagaccctggaagcccagctccccggcgaggccaacgcccgctggcaaggcgtgcgcctcagcctgttgctgcgccacctggacctggcgccgcccacgcgcctgcgcgtgctggcgctgaacgactactcggcgatcatcccgtacagcgacctcgacagctaccagcccatcctcgcctatcgccgcaacggcgcctacatggcgatccgcgaacgcggaccgcttttcatcatctacccgatggcccgctatcctgagttgagaaaccaggtctactacaaccgtaccgtctggcaggtcagctccatcactcttgagtaa

SEQ ID NO: 323064 - DNA, 1578 bp, Pseudomonas aeruginosa
atgactgtgccgctgctcgatccgacaaagctgcgccggcaacgccagatcatggggctgttgctcggcctggtgctgctcatggcgctgatcgccggggctgcgctgtggctggcggtgcgccaggcccagcaactggcccagccgaacctgcacaacgagctgtggcagacctactcgctgcgcgccgaactggatcgcacgctggacgccgcgcggcacaccgagagcggcgaaggccaagccgacgacctggcgatccgtctcgaagtcctcgccagcctgatcgcgccgctgcgccgccagtcgttgttcaggcatctcgccgaaccgcgtccggaggtacaggccaccctgcaacgcctgatcgagctcagcgatcgctggtcgaaccaggccccctggggcgatcccgtcgccgcgcgccgcctggccgcggagatcgtccagcaggttccgcccttgctcgaaccgacccaccagatcgtcgtcgccagcaacatcgccctgaccaaccagttggacgtcgaccgcaagcgcctgcaccgggcgttctacgcgttgttctgggcgctgctcgggatcggtgccggcggtgccctgctggtgctgcgcctggtcaccgacttcaaacgcgcacagcaactggccgggcatctgatcgagcttaacgccaccctggagaaacgcgtcggcgagcgcacccgccagctcagcgaaggcaaggcgctgctgcatttcatcctcgaggccagcccgagcgacgtggtcctgctcagcgcctgcggcgccagcatccattacgtcagcccacgcctgctcaagcgcctgggttgccaggcccaggacgacttcaacctgccccggctgttcgccagcaccagcgaatacagccgcctgcagaacgccctggaggcgcgcggccaggtggatggctgggaagcccagctatgcggggaaacgccttgctgggcggtgatctgcgcgcgccacctggaaatcgacggcgagccggcgaccctgatctggtgctacgacatcagccggcgcaaggccatggagcaggaactgcgcctgctggccagcaccgataccctgaccggcctgcacaaccgccactcgttcctgcaccaggcggaactcatgctcaaggccgccgaacgcttccgccacccctgcgtggcgctgatgctggacatcgaccacttcaagaacatcaacgacagccacggccacctgaccggcgaccgcgccctgcaacgtgtcgccgagaccctgcgccagggcctgcgcgaggtggacctgctcggtcgcctgggcggcgaggaattcgccgcgctgcttccagaggtcagcctggaccaggcgctggacgtcgccgaacggctgcgcgccggcgtcgaggcgctacgggtgagcaatcccgacggcgaaccgctgcggatgaccgtgagcatcggcgtcgccctgcgcagggacgccggggacgacctggaaagcctgctggtgcgcgccgacagcgcgctctaccaggccaagagcggcgggcgcaaccgcaccgagtacgcgcccgcctga

SEQ ID NO: 323065 - DNA, 798 bp, Pseudomonas aeruginosa
atgaatttttccgaattgatccaggcggtccgccgcgacccttcctcggtggtagtaccggccagttggggccagggccgcgccaccttcggtggcctggtggtggcgttggcctacgaggccatgcttgcggtggtcgaggcggggcgtccgttgcgctccatcggcgtcagcttcgtcggaccgctggcccccgagcagccggcgagcttcagcgcccggttgttgcgcgagggcaaggcggtgagccaggtacaggtcgaggtccgtcagggcgagcaggtggtgacgctggtccaggccagtttcggcgtcgcccgcgcgtcggcggtggcggtggaagcgttgccggcggccgggatgaagggccccgaagagagccaggagctgccctatatccgtaacgtgaccccggagttcactcgctacatcgccatgcgctgggcagtgggcggcctgccgttctcttcgaacaagtcgcgccagatgggcggctggatgcgtttccgcgacgaacccgagggagagcccatggaggtttcccacctgctggcgctgctcgactcctggccgccggcgctgttgccgcacctgggcaccccggcgatggccagctcgctgacctggaccgccgagttcctccagccgctgccgcagcagggcagcggcgactggtgccgttacctggcggagatcgaggaggcgcgcgacggctacggtcacgtggcggcgcggatgtggagcgccgacggccagttgctggcgatcagccggcagatggtcacggtgttcggctga

SEQ ID NO: 323066 - DNA, 771 bp, Pseudomonas aeruginosa
atgacggggttcatcgatgaactgctggccgaggtgatcggccagcaggtggcgttgatgtcggcggtcgcccgcctggaggcgcgcacggatggcgaggcactgcacgacctgcgcatcgccctgcgccgtctgcgcagcctgctgcggccgatccgcggagtccccggcgtcgaggagctggagcatgccgccgccgaggtcgggcggctcagcgggccgatccgcgacctggaggtgctgctgccggcgctcgccgccgaagggctgcgggatgcgctggcggtgcgccggccggtgctggagtccggctacgtggcggttctcgccagccagccgctgcaccgcctgcagctttgcctggacgtctggccggccctgttgcgtacggcccagcggcatgccgtgctggatggcctgcacggccgggtgcgcaagcgcctgcgccggcaatggaagaccctgcgcgccgagctggcggacaccacctacgagcactggcacccgctacggctgcggatcaagcgcgtgcgctacgggctggaggcctatccgcacgattgcagcattcccggctcgctgctggcgccgctcaaggcggcccagtcggcgctgggcgattggcacgacctcgaacagtggctgttgcgatgccagcgcgagccggacctggcgcccgtgcgcgaggtctggacggcacgcttcgaactggcccgggagcgtgccggacgggccctgtcgacattgcagcaggcgcttgccgggcactga

SEQ ID NO: 323067 - DNA, 2007 bp, Pseudomonas aeruginosa
atgaacgcgattccgcgggtcgcgctggtctggctgctggtggcgcaggtactggtgatcctgccgcacctggcctacatgccgctgtggatcgcggccatgtggctcggttgcgcggcctggcgggtgcaggtcttccgcatgcgtgccggctatccgcgcgcctgggtcaagctggccctggcgctgctcgccggggccggggtctggttgtcgcgcggcagcctggtgggcctggacgcgggggcggtgctgctgatcgccgcgttcatcctcaagctggtggaaatgaagacccgccgcgatgcgctggtactggtgttcctcggtttcttcgcagtggtggtgggctacctgttcgacgacggtttcctcgccgcgctgtacagcctgctgccggtgaccgcgttgctggcggcgctgatcggcttgcagcagagcgctttcgccagccggccctggccgaccctgcggctggccggcgggctgttgctgcaggcgctgccgctgatgctcctgctgttcctgttcttcccccgcctggggccgctgtggtcgttgccgatgcccggcaacaagggggtcaccggactctcggagagcatggcgccaggggatatcgccgagcttgggcgctccgccgaactggcgttccgggtccgcttcgagggcgcaccgccgccgcgcgagcagctctactggcgcgccttgaccatggagcgtttcgacggacgacgttgggctcaggcgccgcaatggccgggcgaggatgctctgcactggcagaagcgtggccccgagctgcgctacgacgtgatcatgcagcccagttcgcagccctggctgttcgccctcgacgtggcgcagaccgaccagaccgacacgcgcctgatgagcgatttccacctgcagcggcggcagccggtcgagcaacgtctgttctaccgagtcagttcctggccacaggcgctgcgcgagtccagcatcgatccgcgcacgcgctggcgcaacctgcagttgccgatgcacggcaatccgcgcgcgcgagcgctggccgacgagttgcgccaggcccatgcgcaaccgcaggcgctggtcgcggccctgttgcagcgcttcaaccacgagcccttcgcctacaccctgaaaccgccagcgaccggcgccgacggggtggacgatttcctgttcgacacgcgcagcggcttctgcgcgcattacgccggggcgatggctttcgtcctgcgcgccgcgggcattcctgcgcgagtggtggccggttaccagggcggcgagctgaatccggcgggcaactacctgctggtgcatcagttcgacgcccacgcctgggtcgagtattggcagccggagcagggctggctgagcgtcgacccgacctaccaggtggcgcccgaacggatcgaacaggggctggagcaggccctggccggggacagcgagtacctcgccgacgcgccgctgtcgccgttgcgctaccgtggcctgccctggctcaacgacatgcgtctggcctgggacagcctgaactacggctggcaacgctgggtcctggcctaccagggtgagcagcagggcgccttcctgcagcgctggttcggcgggctcgatccgacccgactgggcctgttgctcggtgccgcggcgatattgtcggtcggtctgctcgcgctgttcctgctcaagccctggcaaggccgtgacgatctgcgcagccgccaactgcgccgcttcgaacgcctgctggagatgcatggcctgcgccgttcccccggcgaagggctacgctcctacggcgagcgcgccgcccgcgtcctgccggcgcaggcgccagccatcgcggccttcgtcggcgcgttcgaagcgcaacgctatggacacggcggtgccgatgatccagggttgcgtctgcgcgcattgcgccgggcgctgccctggcgcctggtgcgcacgcccacgcgggatggccggggagaggagcaggcatga

SEQ ID NO: 323068 - DNA, 954 bp, Pseudomonas aeruginosa
atgcgcctgcgcaactggccgcgctggcagcgctggctgaaccggcggataccgccggcgagcagcgtcgagctgaaccagcgccgcgtattcatcctgccgacccgccagggcggcgctttcggcctggcgctgctggtgatgctgctggcggcgatcaactaccagaacagcctggcctacgggttgaccttcctgctgctgtccctgggcgtggtgaccatcctccatacctatcgcaaccttgccggcctgcgcctcaccgtgttgggagcggacccggtgttcgccggcgagcgcgccggtttccgggtgcgcctggaaagcccgcggcgggcgcgccaggccatcgccgtcggctggccggagcggccgctggaatacgccgacctggcaggcgacgcggctgccgaggtgctgctgttccacccgaccgagcgacgcggctggctgcggccggggcgcctgcgggtggagagtcgctttcccctcggcctgctggtggcctggagctgggtcgacctgcgccagcaggcgctggtctaccctcggccgcaggccggcgagccgttcctcgcgccgggcgcggaggatgccgaggaccaggggcgcgcgctggcgagcgcgggcgtcgacgactaccagggactgcgcgcctaccagccgggcgactcgcggcggcgcctgcactggaaggcgttttcccgtggccaggggctgctggtgaaggacttcgccgcgctcggtggggaagacctgtggctggaattcgagcgcctcggcggggatctcgaaagtcgcctgggccgcttgtgccatgcagtcctggaactctccgcgcggcagcagccctatggcctggcgctgcccggcacacgcctgcaaccggccagcggcgaggctcagcgcgaggcctgcctgcgtgcgctagcgttgttcggagcggcgcgatga

SEQ ID NO: 323069 - DNA, 918 bp, Pseudomonas aeruginosa
atgctgaacaccctggaagcctgcctgaaggcggtcgatgagattctcctgggcaaggaccgccaggtgcgcctggccctggcctgcctgctggcccgtgggcacctgttgatcgaagacctgccggggatgggcaagaccaccctcagccatgccctggcgcgggtgctcgggctcagtttccagcgcatccagttcacctcggacctgctgccgggcgatatcctcggtacctcggtgttcgacaaggacagcgggcaattcgtcttccatcccgggccgatcttcgccgaactggtgcttgccgacgagatcaaccgcgccacgccgaaaagccagagcgccttgctcgaggcgatggaagaaggccaggtgaccatcgagggcgccacccggcccttgccggaaccgttcttcgtcatcgccacgcagaacccggccagccagggcggcaccttctccctgccggaatcgcagctggatcgcttcctgatgcgcctgtcgctgggctaccccggacgcgcggcggaacgctcgctgttgctcggcgaagcccggcgcgatctgctgccgcgcctggaacccttgctcgaccacgcggcgctggccgctttccaggccgaagtgccgaaggtccgcgccagcgatgcgctggtggactacgtgctgcgcctggtcgaagcgacccgcacgcagccggccttcgccctcggcctgtcgccgcgcggtagcctggcgttgctcgccgcggcgcgtgcctgggcgctgctggcgggacgcgactatgtgattccggaagacgtccaggcggtgttgccggcggtcgccgggcatcgcctgcgcgaccaggcggaccccaccgggcacggtggcggcgcgctggtgcaatggctgttgcgcgaagtcccggcgctctga

SEQ ID NO: 323070 - DNA, 699 bp, Pseudomonas aeruginosa
atgtccgcctgccagtcccccatcatcgtcgccctggatttccccacccgtgaggccgccctggcgctggccgatcagctggacccgaaactgtgccgggtgaaggtcggcaaggaactcttcaccagttgtgccgcgggtatagtcgagaccttgcgtggcaagggcttcgaggtgttcctcgacctgaaattccacgacatcccgaacaccacggcgatggcggtgaaggccgccgccgagatgggcgtgtggatggtcaacgtgcactgctccggcggcctgcgcatgatggccgcctgccgcgagacgctggaggccttcagcgggcccaggccgttgctcatcggcgtgaccgtgctgaccagcatggagcgcgaggacctggcgggcatcggcctcgacatcgagccccaggagcaggtgttgcgcctcgccgccctggcgcagaaggccggcatggacggcctggtctgctcggcccaggaagcgccggcgctgaaggccgcccatccgggcctgcaactggtcacgccgggcatccgcccggccggcagcgcccaggacgaccagcggcgcatcctcaccccgcgccaggccctggacgccggctccgattacctggtgatcggccggccgatcagccaggccgccgacccggccaaggcgctggtggcgatcgtcgccgaactgggctga

SEQ ID NO: 323071 - DNA, 894 bp, Pseudomonas aeruginosa
atggatcgtctggacagcatgcgcgtgttcctgcgcgttgccgaaaccggcagcttcaccaaggccgcggacctgctggacatgccgcgggcgacggtctcggcggcggtccagcagctcgaagcgcaactcggcagccggctgctgcatcgcaccacccggcaggtccagctgacccacgacggcagcgtggtgctggagcgttgccgccacctgctggaagacatggaggagctggagagcctgttccacgacggcagccgcgccagcggccggctcaaggtcgacgtgccgagccgggtggcgcgactgctgatcgccccggcgctgccggaattcttccgccagcatccggacatcgaactggaactgggctccagcgaccgttcggtggacctggtgcaggagggcgtcgactgcgtcctgcgggtcggccagttgggcaacagcagcctggtggcgcgacgcctcggcgagatgcaactgatcaattgcgccagtcccgcctacctggaagagcatggcgagccacggacgccagccgacctcgaccggcactgggcggtcaactatgcctcgcccagcagcggccgggtgttgccctgggagtaccgcgaggatgggcgcaccctgacccgcgcgttgcgcagccgggtcacggtgaacaacgcggaaagctacatcgcctgctgcctgtccggactgggcctgatccagatccctgcctacgacgtgcgcgagcacctccaacgcggcgagctgcgcgaggtgctgccgcagtggcgggccgaagcgatgccggcgtacgccctgtatccgcaccggcggcatctgtcgcggcgggtcagggcattcgtcgactggctggagcaactgctccgcgcccgcctctag

SEQ ID NO: 323072 - DNA, 642 bp, Pseudomonas aeruginosa
atgccacctacgtttatccaaagaacccggaccaatagcctggagtccctactctacttcctggatccgcagatgccccatgcagcgcttttgcttcctcccagcgcgtccccgctgccggaagtggtcgggttctggcgcgatgccggccctaccctctggttcgccaggaacgccgatttcgaccggcgcttccgcgagcgcttcgcccacctctacgagcttgcctgcgccaacgcgctgcgcccggctgccgatgaagccgaggaccatctcggcctgctgttgctgctcgaccagtacccgcgcaacgccttccgtggaaccccgcgcatgtacgccagcgacgcccaagcgcggcgctgggcggagcgggctctgggacaaggcctcgaccgccaggtcggggacgcgctgcggctgttcttctacctgccgttcgcccatgccgagaaccttgccgaccaggatcgctcggtagcgctgaaccacggactcggccagcccttcctcgcccacgctcgtgagcatcgcgagatcatccgtcgcttcgggcgctttccccatcgcaatccgatcctcggtcgcccgtccagcgccgaggaactcgccttcctcgccgccggcggcttcgccggctga

SEQ ID NO: 323073 - DNA, 891 bp, Pseudomonas aeruginosa
atgcatttgtcgcccgaatccctcgaggccttcgtccaggccgtttccctcggctccttcagcgccgccgcgcgcaagctgggcaagagccagtcgaccgtcagcgaggccattgcccggctggagatcgacctcggcctggaactcttcgatcgcagtggccgccagccgcaactgaccgaggccggacgcaccctgctgggacgggtcgaggaggtcctcggcgcatccgaccgcctgcgccgggtcgccgcgctgctcgccggcggctcggagccacgggtgaccctggcgctatccgacacctaccattcggcgcgctacgaggcgcgcctggccgaactggacgagcgttaccctgagctggagttcgaatgcctgatcgccgaggaccaggacgtgatcgcccaggtcagccgcggccgcgccaccctcggcctgctcgccgcgcagccgcactacccgccggagctgggcgtggcggcggtcgccgagcgtgccgagttcggcctgttcgccgccgtcgaccatccgctggcgggtctggagcgggtcagcgagcgcgacctttccgaatggcgtctgctgcgcctgaacacctatagcgagaccggcgcggcgatcaacgacggcctgccgtccagcggcgggcgctgctggtcggcgcccaactacctgttgctgctggaaatggccacccacggcttcggttgggccgagctgccgcgctggctggtcagcggctacgccaacggacggctgaaggagttgccggtgtccggctggccgcgcagccaggcggtggacgtggtctggtcgcggcagcggccgttgggaccggcggccaactggttgctggaccgcttgctggatcgcgacctgcctatctag

SEQ ID NO: 323074 - DNA, 471 bp, Pseudomonas aeruginosa
atgacccacacccacaccgccctcgacaagactctcaaggagcggatcttccacgccctggccttcgagggcctggccgtcctcctcaccgcgccggtgctgtcgctggtgatgaacaagcccctggcgcacatgggtgcgctgacgctgatgttctccaccgtggcgatgctctggaacatgctcttcaacagcctcttcgaccgcgcccagcggcgcatgggcttccagcgcaccctgcaggtccgggtgctgcatgcgatgcttttcgagctgggtctgatcgtggtgctggtaccgctggccgcctggtggctgtcgatcggactggtcgaggcgttcctcctcgacatgggcctgatcctgttcttcctgccctacaccatggccttcaactggagctacgacgtcctccgcgcacgcctggtggaaagccgccaggccaaggccgccggttgcgacgccggctag

SEQ ID NO: 323075 - DNA, 912 bp, Pseudomonas aeruginosa
atgagcccatctcccgtccgcattctcttcgtcgatgacgaggagcgcatcctgcgcagcctggccatgcagttccgccgccattacgaggtgctcaccgagagcgacccgcggcgcgccctggagcgcctgaagacggaacggatacaggtgctggtcagcgaccagcgcatgccgcagatgagcggcgccgaactgctggcgcaggctcgcgagcgctatccggagaccctgcggattctcctcaccggctattccgacctcgatgccgccgtcgacgcgctcaacgacggtggcatcttccgctacctgaccaagccctggaatccccaggaaatggccttcaccctgcgccaggcggcggagatcgccagccgccagggcctgccggcgccgcccgcggccacgctggcggcgccgctgagcgtgctgctgctcgacgacgacccggaaaccctggactgcgtcggggccttctgccatgccggcgggcatcgcctgctgcgcgcgcgcaacctggccgaggcgctggtgtggctgaacaccgaaccggtggaggtgctggtcagcgacctgaagctggccggggagcataccgcgccgctgctgaaatccctggcccaggcccatccacgcctgctcagcctggtggttacgccgttccgcgacacccaggccctgctcgaactgatcaaccaggcgcagatattccgctacctgcccaagccgatccgcaggggattgttcgagaaaggcctgaaggcggccgccgagcaggccttgctgtggcgcgggcgaagcctgccggaggtcgaccggctggccgaggtgccgcgcgacgagcgcgagaaggaacgggtcggcagcctgctcggcatgctcggccgcctgcgcgagcggctgacggcctga

SEQ ID NO: 323076 - DNA, 1302 bp, Pseudomonas aeruginosa
atgtctccgagcgcgttgtcccgtctgttgcgcccggtggaacccctgactccggcgatgagcatcagcgacgtcgccgaccgcctgctgatgccggagcaccgtgccttcctctcgctgccggtggtcgacgacgagcgccgggtcctcggcctggtcagccgctacaccctccaggacatcttcatgcagcgtttcggccgcgacctctggggccgccatccggtgcgcgacgtcatgaaccgggcgcccctcagcgtctccctcggcgccagcctggaggaggcggcgcagcaggtcaccggtcgcctgcagtatccgatcaccgaggacttcgccctggtcgacaaagagggccgctaccgtggcctgggcaccgtactcgacctgctgaaggccatggaggcgcgcatcgcccagcgcaaccgggtgctgcgcaaggcgctggtggacctcaaggagtcccaggcgcaactggtgcagtcggaaaagatggcttcgctcgggcagatggtggccggggtcgcacacgagctgaacacgccgctcggctacgtcggcaacaacctggcgctgctggaggagctgagcgatcccttgttgcgcctggccgatgcccaggcggcgctggtcgactgcctgggcgacccgcagtgcgacgaagcgcgcctggcgcaggcgctgcaggcggccgacgcggtgcgccgcgaagccgccgtcgaacagttgcgcgaggacctgcggcaattgttcgtcgatacccgctacggcctcggccagatcggcgagctggtttccgggctcaaggacttcgcccgcctggaccgcgccttcagcgaggaggtcgacctcaacgactgcgtgcgcaacgccgtgctgatcgcccgcaccgccatcaaggacaaggccgagatcagcagccagctcggcgagctgccgcttatcgcctgcgcgccgtcgcagatcaaccaggtgctgctgaacctgctgaccaacgccgcgcaggccatggagcgtttcggtcgcatcctgctgaagagctgggccgacgagcgccaggtgttcctctccgtgcaggacaacggcaagggcatgcccgccgaggtcctcgggcggatcttcgacccgttcttcaccaccaagccggtggggcagggcaccgggctcggcctgtcgatcagctacaagatcatccagcaacatggcgggaccatccgcgtggcctccgaaccgggccgcggaacccgcttcctcatcagcctgccgcgagagcaggcccgcgaactgaaacggagcgcctga

SEQ ID NO: 323077 - DNA, 168 bp, Pseudomonas aeruginosa
atgccctggtacgcctggttgatcatcgtcctcgccctgggctccatcgtcggcggactcctgctgctgcgcgactcggcgaagaagctgccgttgagcgaggaacagctcaaacgcatccatgaacgcaacgccgagctggacgcgcaggaggcgaaggaccgctga

SEQ ID NO: 323078 - DNA, 765 bp, Pseudomonas aeruginosa
atgctcgggcgtctgataccgcttctacccattctgttcctgctcgggggcttcttcaccgggcacatcgcgctgctgacggcggtcatcgtcctgctctacatcatctgggtgacctacgccgagcgctggctgccgaccctgctctggtggccggtgagcctcgccgccagcgccctgatcgccatccactacctgcccggcttcattcccctgcgcctgttcccctgggaccttgccagcgccagcccgccgatccagatgatctggctgccctgggacaaggccctggtcgcccttaccctgctcgcctggtggctacgccggccgaagcagccgctggtgtcgctggatatcaccgcgctggccttctgcctgaccttcttcgtggtgccgctgctgtcgatcatgaccaatgccgcgagctggcagccgaagtggccggatgccttctggtggtggctggtactgaacgtcggggtggtctcgctggccgaggaggcgttcttccgcggcctgctgcaaagccagttgatccgctggttcggcgcctggccaggaatcatcgtcgcgaccctcgcctacgccgcgctgcacctgctggtgaacccggtgtatgcgctactggccgggatcgccgggctgggctacggcatggtcctgcacttcagcgggcggctgtcgctggcggtgctgctgcacgcctcgatcaacaccctgcacttcctcctgctgagctacccgttccgcctgatctccgagtga

SEQ ID NO: 323079 - DNA, 624 bp, Pseudomonas aeruginosa
ttggacgatcagaaagcccgggaagtgatgctggagctggtggctaccggacagctcaccgatccggaaagcgcccgcggcaagctgctgcagaccgccgcccacctgttccgcagcaaaggctacgaacgcaccacggtgcgcgacctggccagcgcggtgggcatccagtcgggcagcatcttccatcacttcaagagcaaggacgagatcctgcgctcggtgatggaagagaccatcctctacaacaccgccctgatgcgcgccgccctggccgacgccgaggacctgcgcgagcgggtgctgggactgatccgctgcgagctgcaatcgatcatgggcggtaccggcgaggcgatggcggtgctggtctacgagtggcgctcgctgtccgccgaaggccaggcgtacatcctcggcctgcgcgacatctacgagcagatgtggctggacgtgctgggggaggcgcggctggccggctactgccagggcgatccgttcatcctgcggcgcttcctcaccggcgcgctgtcctggaccaccacctggttccgtccggaaggaccgatgagtctcgaccagctcgccgaggaggccctggcgctggtgatcaaggacgcctga

SEQ ID NO: 323080 - DNA, 1803 bp, Pseudomonas aeruginosa
atgcaaaagaccgtacgcatcggctgcgcctcggccttctggggcgacacctgcaccgcggccgcccagttggtgcgcggcgcgccgctggactacctggtgttcgactacctggccgagatcaccatgtcgatcatggccggcgcccgcctgaaacagccggacgccggctacgccaccgacttcgtcgaggtcctcgcaccactgctgggcgagatcgccgagaagaagatccgcgtcatcagcaacgctggcgggatcaatccgcaggcctgtgccgccgccctcgccgcggcctgcgagaaggccggggtgcagctgaagatcgccgtgctccatggcgacaacctgcaagcgcgccaggccgaactggccaaggccggcatccgcgagatgttcagcgacgcgcctttcccgccgatgtgcgtctcgctcaacgcctacctcggcgcgccgggcatcgtcgaggccctgcgcctgggcgcggatatcgtgatcaccggccgggtggtcgacagcgcggtggtcagcgccgccctggtgcacgagttcggctgggcctgggacgactacgaccgactggcccaggccgccctcgccgggcacatcgtcgaatgcggcgcgcaatgcaccggcggcaatttcaccgactgggagcaggtgccggactatgagcacatcggtttccccatcgtcgaggtcgaggccgacgggcgcttcgtggtgaccaaggcgcccggcaccggtggcctggtcagcgaactgagcgtcggcgaacagatgctctacgagatcggcgacccacgcgcctacctgctgcccgacgtggtctgcgacttcaccgaggtgcgcctgcgccaggtcggacccgaccgggtcgcggtggaaggcgcgcgcggcctgccgcccaccgaccggtacaaggtcagcgccacctatccggacggtttccgctgcaccgccagttgcctgatcgccggcatcgatgcgctgaagaaggccgagcgggtcagccaggcgatcatcgccaggaccgaggaaatcttcgccgagcgcggctgggagccctaccgcgaggtcaacgtcgaactgctcggcagcgaagccacctatggtccccatgggcgacggcaggacagccgcgaagtggtggtcaagctggccgtccggcatccgcgcaaggaagccctggtgctgttctcccgcgagatcgcccaggccgccaccgggatggcgcccggcctgaccggcatcgtcggcggccggccgacggtgtatccggtgatccgcctgttctctttcctgatcgacaaggcgcaatgcgcgttgagcgtggagatcgacggccagcgccatccgctggaactgcccgtcctcgaagccttcgacccggcacgattggccgaggcgcaccagccgccacgcccggagcagcccgccagcgccagcgtgccgctggtgaagctagcggtggcgcgctccggcgacaagggcaaccacagcaacatcggggtcatggcgcggcgcccggagtacctgccgtggatcgccgaggcgctggaggaaggcgccgtggtggactggatgcagcatgtgctcgacccgcagaccggccgggtcggccgctggtacctgccgggcagccacagcctgaacttcctgctggagaacgccctcggcggcggcggcgtcgccagcctgcgcatcgacccgcagggcaaggcctttgcccagcagttgctggagtttccggtggcggtgccgcaggcgctcgccgacgcgctggaaacgcaaggcagataa

SEQ ID NO: 323081 - DNA, 879 bp, Pseudomonas aeruginosa
atgagctacgactcgatcttccgacctggcctgttcgacggccagaccatcatcgtcaccggcggcggcagcggcatcggccgctgcaccgcccacgagctggcggccctcggcgcccacgtggtgctggtcggacgcaaggcggaaaagctggagaagaccgccggcgagatcgtcgaggacggcggcagcgtcagctggcacgcctgcgacatccgcgaggaggaagcggtgaagacgctggtggcgaatatcctggccgaacgcgggaccatccatcacctcgtcaacaacgccggcggccagtatccctcgcccctcgcctcgatcagccagaagggcttcgagaccgtgctccgcaccaacctggtcggcggcttcctggtcgcccgcgaagtgttcaaccagtcgatgagcaagaccggcggcagcatcgtcaacatgctcgccgacatgtggggcggcatgcccggcatgggtcactccggcgccgcacgctcgggcatggagaatttcaccaggaccgccgccgtcgagtggggccatgccggcgtgcgggtcaacgcggtggcgccgggctggatcgcgtccagcggcatggatacctacgaaggcgcgttcaaggcggtgatcccgaccctgcgcgagcacgtgccgctcaagcgcatcggcagcgagtcggaagtcgccgccgccatcgtcttcctgctctcccccggcgccgccttcgtcagcggcaacacgatccgcatcgacggcgccgccagccagggcagccgcgccttcccgctattcaagggcaagccgggacagagccgcgcgtacaacggcttccaccgcgcctacctgcccgacgtactgaaggaccaggaggactga

SEQ ID NO: 323082 - DNA, 1617 bp, Pseudomonas aeruginosa
atgcccgcgatccagtcggaactcgacgtcaacggcgaggacttcgcccgcaaccgcgaggccatgctcgccgccgtggccggcttccgcgagttggagcagaaggtcctggacaaggccgccgaggccaggccgaagttcgagaaacgcggccagctgctgccgcgcgaacgcctggcgctgctgctcgacccgggcgcgccgttcctcgaactgtcctcgctggccggctacaagctgcacgacgacaaggacggcacccaggccggcggcgggatcatcgccgggatcggctacatcgccggggtgcgctgcctggtcagtgccagcaacagcgcgatcaagggcggcaccatctccccgaccgggctgaagaagaccctgcgcctgcagcagatcgccatggagaacaagctgccggtggtgaccctcaccgaaagcggtggcgccaacctcaactacgcggcggagatcttcgtcgaaggtgcgcgcggcttcgccaaccaggcgcggatctccgccatgggcattccccaggtcaccgtggtgcatggttccagcaccgccggcggtgcctaccagccggggctgtcggactacgtggtggtggtgcgcggcaaggccaagatgttcctcgccgggccgccgttgctcaaggccgccaccggcgagatcgccagcgacgaggaactcggcggagccgaactgcacgcgcaggtcgccggcaccgcggaatacctggcggaaaacgacgccgacggcgtgcgcctggcccgcgagatcgtcggcatgttgccgtggaacgcacaactgccggcgcgcccggcgcgctcctggcgcgaaccgctgtacccggtggaggagctgctcggggtggttccggccgacccgaagaagccctacgacgtccgcgagatcgtcgcgcgcatcgccgacggctccgagttcctcgacttcaagaacgagttcgacggccagaccgtctgcggccacctgcgcatcgagggccacgcctgcggcctgatcggcaacaacggaccgatcaccccgcagggcgcggccaaggcggcgcagttcatccagctctgcgaacagagcaacacgccgctgctgttcctgcacaacaccaccggcttcatggtcggcaccgagtcggagcgccagggcgtgatcaagcacggctcgaagatgatccaggcggtggccaacgcccgcgtgcccaagctgaccctggtggtcggcggctcctacggcgccggcaactacgcgatgtgcggacgcggcctcgacccgcgcttcatcttcgcctggccgaacagtcgcaccgcggtgatgggcggcgcccaggccggcaaggtgctgcgcatcgtcaccgaggagaaacacgccaaggaaggcaaggaagccgacccgaagatgctcgacatgctggaaaccgtcaccgcgcagaagctcgacagccagtccaccgcgctctacggcaccgccagcctgtgggacgacggcctggtcgacccgcgcgacagccgcaggctgctcggctacctgctggatatctgcgcggaagccgaggcgcggccgctgaagggcaacagcttcggggtcgcgaggttctga

SEQ ID NO: 323083 - DNA, 1221 bp, Pseudomonas aeruginosa
ttgggaaagagcaagcggatcctgccggaaaacaatgatgcccaggaggaaagacaacccatgatcttcacccaggaacacgaggaactccgccgcaccgttcgcagcttcgtcgagcgggaaatcaaccccaacgtcgaccagtgggaaaaggacggccgcttcccgatccacgagatcttccgcaaggccggcgagctcggcctgctgggcatctccaagccggagaagttcggcggcatgggcctggactacagctactcgatcgtcgccgccgaggaattcggcagcatcacctgcggcggcatcccgatggccatcggcgtgcagaccgacatgtgcaccccggccctggcccgcttcggttccgacgagttgcgcgaggagttcctccgcccggccatcgccggcgagatggtcggctgcatcggcgtctccgaggtcggcgccggctccgacgtcgccggcctgaagaccaccgcgcgcaaggacggcgacgactatgtgatcaacggcagcaagatgtggatcaccaactcgccgtcggccgacttcatttgcctgctcgccaatacctccgacgacaagccgcacgtcaacaagtcgctgatcgtggtcccgatgaagaccccaggcattaccctcagtccgcacctggacaagctcggcatgcgcagttcggagaccgcccaggtgttcttcgataacgtccgcgtaccgcagcgcaaccgcatcggcgcggaaggcgccggcttcatgatgcagatgctgcagttccaggaagaacggctgttcggcgcggccaacatgatcaagggcctggagcactgcatcgacgtcaccatcgagtattgcaaggagcgcaggaccttcggccagccgctgatcgacaaccaggtcatccacttccgcatggccgagatgatgaccgaggtcgaggcgctgcgcgccctggtctaccaggccaccgagctgtacgtgaaaggcagggacgtgacgcgcctggcttccatggccaagctcaaggccggccgcctcggccgcgaggtcagcgacgcctgcctgcagtactggggcggcatgggcttcatgtgggacaacccggtctcccgcgcctaccgcgacacccgcctggtatccatcggcggcggtgccgacgagatcatgctcggcatcatctgcaagctgatgggcatcctgccgggcaagaagaaaggctga

SEQ ID NO: 323084 - DNA, 795 bp, Pseudomonas aeruginosa
atgagcctgccgcattgcgagaccctgctgctggaacccgtcgagggcgtcctgcggatcaccctgaaccgcccgcaaagccgcaacgccatgagcctggcgatggtcggcgaactgcgcgcggtgctcgccgccgtgcgcgacgaccgtagcgtgcgggcgctggtgctgcgcggcgccggcgggcacttctgcgccggcggcgacatcaaggacatggccggtgcccgcgccgccggggcggaagcctaccgcacgctgaaccgcgccttcggcagcctgctggaggaagcccaggccgccccgcaactgctggtggcgctggtggaaggcgcggtgctcggcggcggtttcggcctggcctgcgtgtcggacgtagcgatcgccgccgccgatgcgcagttcggcctgccggaaaccagcctcggcattctcccggcgcagatcgcgcctttcgtggtccgccgcatcggcctgacccaggcccgccgcctggccctcaccgccgcccgcttcgacggccgcgaggcgctgcgcctgggcctggtgcatttctgcgaggccgacgccgatgccctcgaacagcgcctggaggaaaccctcgagcaactgcgccgctgcgcgccgaacgccaacgccgccaccaaggccctgctgctggccagcgaaagcggcgaactcggcgccctgctggacgatgcggcgcgacagttcgccgaagcggtgggcggcgccgaaggcagtgaaggcaccctggccttcgtacagaaacgcaagccggtctgggcccagtga

SEQ ID NO: 323085 - DNA, 1986 bp, Pseudomonas aeruginosa
atgcccagcttcaacaagatcctcgtcgccaaccgcggtgaaatcgcctgccgggtgctgcgcaccgcccatgaactgggctaccgcagcgttgccgtgtacagcgaggcggacgccgacgcccgccatgtgcaactggccgacgaggccgtgtgcatcggcccggcagcggtggcgcagtcctacctgaatctcgaggcgatcctcgacgccgcccgtcgcagcggcgccgaggcgatccaccccggctacggcttcctctccgagaacgccgaattcgcccgtgcctgcgaagccgccgggatcgtcttcatcggcccggatgcggaagccatccacctgatgggcagcaagcgcctgtcgaagatcgccatgctcgccgccggggtgccgtgcatccccggctacgaaggcgccgaacaggacgacgcgaccctgcggcgcgaggccgaacgcatcggctacccactgatgatcaaggccagcgccggcggcggcggccgcggcatgcgcctggtggaggaacccgaccaactgctggagcagttgcgcaccgcacgctcggaagcgctgggcgccttcggcagcgccgaactgatcctggagaaggccgtgctgcgcccgcgccatgtggagatccaggtgttcggcgaccgccacggcaacctgctctacctcggcgaacgcgactgctcggtgcagcgccgccaccagaaggtcatcgaggaagccccctgcccggtgctcgatgccgacctgcgtcgcgccatgggcgaggcggcggtgaaggccgcggcttcggtcaactacgtgggcgccggcaccgtcgagtttcttctcggcgaggatggccgcttctacttcctggagatgaatacccgcctgcaggtcgaacacccggtcaccgaactggtcaccggccaggacctggtggcctggcagatccgcgtcgccgagggccatccgctgccgctgcggcaggaacaggtggaactgcgcgggcatgccatcgaggtccgcctctacgccgaggacgccggtcgcggcttcctgccgcagaccggcacggtgctgcgctgggacccggaactgctgcccggcgtacgcatcgaccatggcctggtcgaggggcaggcggtgacgcccttctacgacccgatgctggccaagctgatcgcctacggggcgacccgcgacgaagcccggcgcaagctgatccgcgcgctggagcgctgcgtgctgctgggggtcgacggcaaccagcggttcctcgccaacctcctggcgcatccggacttcgccgccggcgaggcgaccaccgccttcatcggcgaacgcttcgccgaagaccccagcctgcaaccgcgccagccgggcgccgaggaactggccctggccgccgccctgctctaccaggtcggcgccgaggccagtgcgcaccagcccggcctggccggctggcgcagcgccgccggggcaccgtggaagatcgtcctgaagcacgccgaacagcgcctggagatcggcctggacgtcctcgaaagcggtcgccggccgcgactgctggcgcgcctggagcgacgcgagatcgccgtgcgcctgctcgactgcgacggacgctgggccagcgccgaactcgacggcattcgccgccgccacgcctaccacctggacggcgggcgcctctggctatacggccacggcggcaacctcgaactgctcgacgtcacccacgccggcgccagcgcccaggtcggcgccagttccggcacgctcaaggcgccgatggacggcgccatcgtcgaggtgctggtcggcgagggcgaacgggtcggcaagggccaactgctgctggtgctggaggcaatgaagatggaacacccgctgaaggccggagtcgacggcgtggtccgccgcgtccaggtcggccgtggcgagcaggtgcgcaaccggcaggtgctggtcgaggtggaagccgacgcctga

SEQ ID NO: 323086 - DNA, 825 bp, Pseudomonas aeruginosa
atgtcactgcacggcaagaccctgttcatcaccggcgccagccgcggcatcggccgggagatagccctgcgcgccgcgcgcgatggcgccaacctggtgatcgcggcgaagagcgccgagccgcatccgaagctggaaggcaccatcttcagcgtcgccgccgaggtcgaggccgccggcggccaggccctgccgctgcaactcgacgtgcgcgacgagcaggccgtggcggcggccatggcccgcgccgccgaacgcttcggcgggatcgacgcgctggtcaacaacgccggggcgatccgcctggtcggggtggagaagctggagcccaagcgcttcgacctgatgtaccagatcaacacccgcgcggtgctggtctgcagccaggccgccctgccctacctgcgcaggagcgccaacggccacatcctcagcctgtcgccgccgatcaacctggccggcaggtggttcgcccagcacggcccctacacggtcaccaagtacggcatgagcatgcttaccctggggatgcacgaggagttcgggaaatacgccatcagcgtcaacgcgctgtggccgaagaccatgatcgccaccgccgccatcgagttcgagctgggcagccgtgacgccttccgccgcgcgcgcaccccggcgatcatggccgacgccgcgcacgccattctcaccagcgaggggcgcagcctcagcgggcgcctgctggtcgacgaggaattgctgcgcgagcgcggccagagcgatttcgagcagtaccgctacgacccggagggtggcgcgctggtgcccgacctgttcctcgactga

SEQ ID NO: 323087 - DNA, 1827 bp, Pseudomonas aeruginosa
atgacccacgccgacctgatcactttcaaccgtttcgttgcccgcctgcctgccaccttcggccgcgtgccgcgcatgctgcgcggcctgtactacaccgcgatccgtaaccgcgagaagagcctgtccctgggctgggcgctggagcgcgcggcacgcctgtacccggacaacccggcggtgctcgacggccagcggcggatcagctacgccctgttcaacggctgggccaatcgcctggcgcgcgccttcaaggccgagggcgtaggccacggcagcgtggtcgcggtgatgctggaaaaccgcgtcgagctgctggcgatcctcgccgccctggccaagctcggcgccatcggcgcactggtcaacaccacccagcgcggcaaggtcctggtgcacagcctgaacctggtgaagcccggccacttcgtggtcggcgaagagttgcgcgaggtgttcgaggaagtccgccaggaggtgctcggcaacgccggccattgctactgggtcgacgacggcgacaccctcggcgatcccggctcgccgccgatgggctggcgcaacctgatgcgcctggcccagggacagacctcggagaacctcgaggacaccggcagggtgcggctcaaggactcctgcttctacatctacacctccggcaccaccggcctgccgaaagcctcgatcatgagccacggcaagtggatcaaggcctacggcggcttcggccattccggcctgggcctgggccgcgacgacgtgctctacctgaccctgccctgttaccacaacaacgccgtgaccgtctgctggagcgcggcgctcgccggcggcgcggccatggccctgcgccgcaagttctccgccagcggtttctggaaggacgtgcaacactaccgggcgacctgcttcggctacatcggcgagctctgccgctacctgctgaaccagccaccgtgcgccgaggaacgcggcaatagcctgacctgcatgatcggcaacggcctgcgcccgtcgatctgggccgagttcaagcaacgcttcgagatccagcggatcaccgagttctacgcttccagcgaaggcaacatcggcttcaccaatgtattcaatttcgacaatacggtgggcttctccccagccacctacgccatcgtccgctacgacctggagaacgaccacccggtgcgcgacgccaagggcttcatggagaaggtcggcaagggcgaggtcggcctgctgatcagcgagatcagtgcgaagtggccgttcgacggctacaccgatccggccaagagcgaagcggtgatcctccgcgacgtgttcaagaagggcgacgcctggttcaacaccggcgacctgatgcgcgacatcggtttcaagcacacccagttcgtcgaccgtctcggcgacaccttccgctggaagggcgagaacgtttccaccaccgaggtggaaaacgccctcggcgccttcgacggggtcgaggatgcggtggtctacggcgtggagattcccggcaccaacggccgctgcgggatggccgcgctgcgcctggccgatggcgtcgaactggaccgcgacgctctcgccgcgcacctcgaccgcgagttgccggcctatgccacaccggtgttcctgcgcctgctgcgcgaagtcgagaccaccggcaccttcaagtacaagaagaccgacctcaagcgcgacgcctacgatcccgcgcgggtcagcgacaaactcttcgtcaggttgcccggcagcgccggctaccagccgctggacgcggagctgtaccaggcgttgcaggagcagcgctaccgcttctga

SEQ ID NO: 323088 - DNA, 423 bp, Pseudomonas aeruginosa
gtgcctgccgcgccgaaaacagcttcgaagaaggtcgcgccagccgcggagcaggttgccgaacccaagccgccggccaagccgaagcctgcggctgcgccgccgaagccggccagcaggccggtcgccaaggacaagccggcgccggcgaagcgcgcttccaccgctcgtctcgaccccgaggtacgcaagccgctgccgagcgccaagctggacctgcgcctgccgaaggaactggtgcagaagatggcgccgcccggcacggaagagacccataagcccaagccgctgttgccgccgatgttcgaggaaaaggacgacagcgacttccgcctcaacggccagttgctctatcgcgaccgcgaactgggcgtgtcgcggcccctggaaggggccgagttgcagttcgagttccgccagtag

SEQ ID NO: 323089 - DNA, 840 bp, Pseudomonas aeruginosa
atgaccgcgccgctggccggcgccttgctctatatcgcgcagaccggcaatgccctgcatggcggcctggtgctgttcagcctgggcctcggcatcggcatgccgctgttgctgctggtgacggtcggcagccgcttcctgcccaagcccggtccctggatgaacctggtcaagggcgtgttcggcttccttttcctcggcaccgcctggatactcctgcgtccgctgctcggcgaggcgctgtggatcggccttggcggcgcgttgctgctggtcctggcctacgccgcgctgcacacggcgcgaggcctggcacggcacgcggtgctgttcggcgcggcgggctgcatcttcggtctctggggcgcggcgatgctgctgggcgccgcggccggggccgacgacccctggcgtccgctacaggtgtatgcggcggcgaaccggggcgctacgccgacggccagcgcccacgaggcgttcctcacggtgagccagccggccgagctggaccgtcagttggctgcggccaaggccgagggacaatgggtgctgctcgactactacgctgactggtgcgtgtcctgccggatcatggagaaacaggtgttcgccaagcccgatgtgctcgccgccctgcagggcgtgcgcctgctgcggctcgacgtgaccgcggacaacgccgccagccgcgagctgctgcaccgctaccaggtacccggcccgccgagcctgatctggatcggcccggaaggcgaggagcgccgcgcgcgccggttgaccggcgaagtcgacgccggcggcttcctcgcccattggcaggcgacccgggagcgcggctga

SEQ ID NO: 323090 - DNA, 837 bp, Pseudomonas aeruginosa
atgctgagtttttccctggggccgctggtggtctcgctgcaacacctgctgctgttcctcgccctcggcgccgcgctgctcggcggttggctggcggcgcgcggtggcgggcgcaacgccgagccggtgctgttcaacctgttgttgctcggcctgctggtggcgcgcctggctttcgtggtgcgctactggccgcagtaccgcggcgacttcgcacagatgctggatatccgcgatggcggtttcctcgcctggccaggcctgctcgccgccgtgctcggcgcgctgttctgggcctggcggcgaccggcgctacgtcgctcgctgggtgtcggcgccagcctcggactggcgttctggctgcttggcagcctgggcctgggcatctacgagcgcggtacgcgcctgcccgaactgagcctgcgcaacgccgccggcgagtcggtgcaactggccgatttccggggccgcccgctggtgatcaacctctgggccagctggtgcccgccgtgtcggcgcgagatgccggtgctgcaacaggcgcaggcggagaatcccgacgtagtgttcctcttcgccaaccagggcgagagcgccgagaccgtgcgccatttcctccagggcgagaacctgcgcctggacaacctgctgttcgacaacggcgggcagcttggccagcaggtcggctcggtcgccttgcccaccaccgttttctacaccgccgagggccgcctgctgggcagccatctcggcgaactgtcccgcggcagcctggcgcgctacctcgaagccttcgagccggccgctgccgcccccgcaaccaggagttccgaatga

SEQ ID NO: 323091 - DNA, 771 bp, Pseudomonas aeruginosa
atgagactgccgcgcaacctgatcacccttggcctgggcctgaccctcctcaacgccggcctggccacggcggcggaggagctgccggcgccgatccgcatggtccaggagaagggcgcccgcatcctcggcagcttcgacgccccggatggcctgcgcggctatgccgccgaataccagaaccagggcatggcgctgtacctgacgcccgacggcaagcacgtactcaccggccacctgttcgacgcccagggcaaggacctcagccgcgaaccgctggagcgcctggtgtatgcgccgctggccaaggaaatgtggcagaagatggagcagagcgcctggatcgccgatggccgtgccgacgcgccgcgcgtggtctacctgttcagcgacccgaactgcccgtactgcaccatgttctgggagcaggcgcgaccctgggtggatgccggcaaggtgcagttgcggcatatcatggtcggcatcatccgcgaggacagcgaagccaagtccgctgcgctgctggccagcaaggacccgcagaaggccctgcacgaccatgagcaggcgggcaaggccagcaccctgaagccgctggcgaagatcccggcggcggtgcgcaagcagctcgccggcaacatggaactgatggagtcgatgggcgccgcggcgaccccggcgatcttctatctcaatgccgaggggcgcatgcagcagcaacagggcgcgccgcagccggaccagttggcggagatcctcggtccgcgctga

SEQ ID NO: 323092 - DNA, 1314 bp, Pseudomonas aeruginosa
atggacgacgcattcagcgaggaaggcagcgcgcagccgcgccatgacgctcagcgtccggcgctcgccccgcggagcgacggtttcgacatccacacctaccatcccgacttcgtcgccgatccctatccgctgttgcggctgatccgctcccgtgcgccggtctgccgcgaccaggcctcgatctggtggatcagtcgctatgccgatgtctcggcgtgcctgcgcgaccgccgtttctccgccgaccccgctcgccttggcgccgccagctggttcggccaccagcaattgcaaccgctggcgcgcttctacgacaacttcatgctgttcaacgacgcgccgcggcacacccgcctgcgcaggctgttcgctccggccttcggccccgacgccgtgcgccgctgggaagcgcgcatcgaggtgctggtggaagaactcctcgacagcttgctggagcgccgcgagcccgatctgctcagggatttcgccgaaccgctgacgatccgggtggccgccgagctgttcggctttccccgcgaagataccgggcaactgctgccctggggccgcgatctggccgccgggctcgatctcgccgccagccacggcgatgccgggcagatcaaccgcagcgcggccgccttcagcgactacctgcaacgccaggcgcgcggctggagcgatggctcttcgcgcccgccgtccggcgcggcgccgagcatcctcgacggcgccgcgatgctggaggccggactgggcctcgaggacctggtagcggcctatgccatggtgttcatggccgccttcgaaaccaccatcagcatggtcggcaacgctacgctggcgctgctcacccatcccgaccagctcgacctgctgcggcggtgcccggagttggcggcgaacgcggtggaggaactgctgcgcttcgatggcgcggtgcgcggcggcgtgcgttgcaccctggaggaggtggagatcggcggccagcggattccgcctggagagaaggtctggctgagcttcctcgcggcgaaccgcgacccggagatgttcgccgcccccgaccgcctgcagttgcagcgagcgaacgccaagcagcacgtggcgttcgcccatggtccgcactactgcctgggcgcgtacctggcccggctcgaattgcaatgcgcattgcgcggcctggtgcgtcgccgtttcgccctggcctcggaaccgacggacctgcgctggcggcgcagctcggtgttccgcaccctggagcgcttgccgatcgtcccggaaggcgacgctcagaagacctgcgagtag

SEQ ID NO: 323093 - DNA, 912 bp, Pseudomonas aeruginosa
atgaccacccgcatccgggccagcctgctggccctgcccctgctgctgccctcgttccaggctatcgccgcgctgccggggatgaacctcggccagacctccttcctcgacggcaaggccctgcccggcacgctgttccagcagttcgtgaatatctacgaggccgacgacttcatggacgccaacggtcaccggcgcccgctcgacaaccgcctgcgcaccctgctcgccaccagccacttcgcccacatcagccagcaccagctgttcggcgcctactacggcgcggaaatcctcgtcccggtgctgctcgccgatcccgacttcgaaccccacgccggcagcgccaacggcctcggcaacctgatcgtcagtccgttcatcctgcaatggccgcagaccgagctgttcggccggccctactggcagcgcctgaacctcgccttccagttacccaccgggcgctacgacaggcatcgggcgatcaatcccggcagcaaccactggagcttcaacccgcactacgcgctgacctgggaattcgccgaaggctgggaagccagcgctcgcctgcagtacctgttgccgggcaagaatcgcgacccggcggcgccgttggccgacgactacctgcaaccgggccaggcgttccacgccaactactcggtatcgctggcgctggatgcgcattggcggctcgggttgtccggctacagcctgcgacagatcaccgacgagcgggtcgacggccacgaccgcccggactcccgcgagcgggtcgatgccatcggcccggcgctgatgttcggctggggcaagtcgcggctgttcctcaacgcctatcacgaatacggcgcacgcaaccgcagcgagggcagccggctgatcctgcgctactcgcaggtcttctga

SEQ ID NO: 323094 - DNA, 645 bp, Pseudomonas aeruginosa
atgcagctctacagcttcttcaacagctccacgtcctatcgggtgcgtatcgcattggccctgaaaggcctggattaccaggtagtgccggtcaacctgcggcagggcgagcaactgcgcccggccgaccgccagcgcaacccgatgggcgcgctgccgaccctggtcgacgccgacggccgccggttcagccagtcgctggcgatcatcgactacctcgacgccgtgcagcccgaaccgcgcctgatccctctcgacccactgcatcgcgcccaggcgctggaactggccctgctggtggcctgcgacatccatccgctgaacaacgtgcgggtgctcaagtacctgacccaggtcctcggcatagacgccgaggaccgccagcgctggtacgcgcactgggtcgccgagggcctggcggcggcggagaccctgctgaaccgacaccgtcgcggcgccttcttcgccggcgccgcagcgggcatcgtcgagtgctgcctggtaccgcaactggccaacgcccggcgcatgggctgtgacctggcgccctacccggcgttgctcgaactggaggggcgctgcctggcgctcgaagccttccagcgcgccagccccgagcgccagcccgactacctgccggactga

SEQ ID NO: 323095 - DNA, 1347 bp, Pseudomonas aeruginosa
atgcctacgcccgacaagaacaacaagatcgacgtccaggccttcatcgatgcgcaggcggtttccgccttccagttgcgagtcctgtcgctgtgcttcctgatcgtcgccatggacggattcgacaccgccgccatcggcttcatcgccccggccctggcccacgactggcaactgagcccggcgcaactcagcccgatcctcggcgccgcactggccggcctggccctcggcgccttcgccgccggcccgctggccgaccgtttcggacgcaagagcgtgctcctgctctcggtgctgttcttcggcggctggagcctcgcctcggcctacgccggttcggtggaaaccctggccctgctgcgctttttcaccggcctcggcctgggcggggcgatgcccaacgcgatcaccctgacctccgaatactgcccgcgccggcaccgcgcgctgatggtcaccgcgatgttctgcggcttcaccctcggctcggcgctgggcggcctgctcgccgcgcggatggtcccggcgctgggctgggaaagcgtgctgctgctcggcggcggcctgcccctggcgagcctgccgctgctctgggcatgcctgccggagtcggtgcgcttcctcgcccgccgcgcaccggacgcggcgcgcctgcggcgcatcctcgaacgcctggggcgcctacccgacggctgggccggacgcctcgaactgcccgctgacgagtccgacggcacctcgcccctgcggcagatcctcggcgccgagctgcgcggcggcaccctgctgctctgggccacctttttcatgggcctgctgatcatctacctgctgaccaactggctgccgacgctgatcggcggcaccggcttcagtctcggcgaggcggcgacgatcagcgccatgttccagctcggcggcaccctcggcgcactcctcctgggcagcgccatggatcgcttcgacgcgcaccgggtgctgagcctggcctacgtcggcggcgccctgttcatcctcggcatcgccagcctctaccacagcttcgccctgctggcgctgtgcgtcgccggcgtcggtttctgcatcagcggctcgcaggtcggcgccaacgccctggccgccgatttctatccgacccgcagccgcgccaccggggtcagctgggccctcggcctgggccgcatcggctcgatcgtcggctcccttagcggcggcgccctgctcggcctgggcctgggcttcagcggcatcctcgccctgctggcgatcccggcgctgctcgccgccgtggccgtgcatcgcctgggccggcgccgggtcaggccttctcccaccactctctga

SEQ ID NO: 323096 - DNA, 699 bp, Pseudomonas aeruginosa
atgagccatctcttcgcgcccgaagcgcccgtcagcctcaccatccatggcagcgaccagaccttcccggtgcggcgggtctactgcgtcggccgcaactacgccgcccacgcccgggaaatgggcttcgatcccgagcgcgagccgccgttcttcttctgcaagccggccgacgcggtggtcccggtcgccgccggcagcaccctggagctggcctacccgagccagaccggcaactaccactacgagatcgaactggtggcggcgatcggcaagggcggctgcgacatccccctggagcaggccgaggaacacgtctggggctacgcggtgggcctggacatgacccgccgcgacctgcagatgcgcatgcgcgagatgggccggccctgggagatcggcaaggccttcgaccgctcggcgccgatcggcccgctctaccctgccagccaggtcggccatccgcgccacgccgccatcagcctccaggtcgacggcgaggatcgccagcgcagcgacatcgaccagttgatctggtcggtggcggaaaccgtcagctacctgtcgcgcttcttcgagctgcgccccggcgacctggtcttcaccggcaccccggaaggcgtcggcgcggtcgagcgcggcgagcggatgctcggcgccatcgacggcctcggcgaactcagcgtccgcgtggtctga

SEQ ID NO: 323097 - DNA, 1062 bp, Pseudomonas aeruginosa
atgcataacgacaattccaccgagaagcgcgccgacttctatcgacgcatccgccagcagcacctcaccccgctctgggaagccctgcacagcctggtcccggcgcaacccgccggcggctgccaggcggcgctgtggcgctatcgcgaactgcgcccgttcctgctcgaggcaggcgacctgatcagcgccgaggaagcggtgcgccgcgtgctggtgctggagaacccggaccttcccggccagtcggcgatcaccccgagcctctacgccggcctgcaactgatcctgccgggcgagatcgcccccagccaccggcacacccagtcggccctgcgcttcgtcgtcgagggctacggcgcctacacctcggtggacggcgaacgcacccgcatggagccgggcgacttcatcatcactccgtcctggacctggcacgaccacggcaaccgcgccgccgcggaaggcggcgagccggtggtctggctggacggcctggacatcccgatgctgcgtttcttcggcgccaccttcgccgagagctacggcgaaccggtgcagccgttgcgacgtggcgaaggcgacagcctcgcccgctacggcagcaacatgctgccgctgcgccaccagccgacgacgccgacctcgccgctgttcagttacccctacgcgcgcagccgcgaggtcctcgagcgcctggcgcgcctcgaacggcccgatccctgggaaggccacaagctgcgctacgtcaacccggccaccggcggctgggccatgccgaccatcgccacctgcctgcaactgctgccggccggcttcctcgggcagcccgcgcgcagcaccgacgccagcgtctattcggtggtggaaggcagcggcgtggcgcagatcggcggccggcgcttcgccttcgaggccaaggatctgttcgtcgtgccctcctgggccgagctgcgcctggaagccggcgccaccgactgcgtgctgttcagtttctccgaccgccctgtgcagcaggcgctcggcatcctccgcgaatcccgcgaacccctcgcccactga

SEQ ID NO: 323098 - DNA, 915 bp, Pseudomonas aeruginosa
atggactggacccgccgcctgcgcctgcaacacctgcaactgctggtcagcctgatggagaccggcaacctcagcggcaccgcccgggccgcacacaccacccaaccgggcctgtcgaagtggctcaaggaactggaggaggacgtcggcgcgccgctgttcgagcgtcacgcccgtggcctgcgcccgacgccctatggcatgaccctgttcaaccacgcccagcgcgtgctcaccgagatggagcgggcgcggcagaacctcgaggcgatgcgcagcggcagcggcagccgggtgctcctcggcacgtcgccggcctccgcgccgagcctggtgccgcgcgcattgcgggcgttcctcggacgctaccccggggcccaggtggaactgctcgaaggcaccatgaacggccttctcgagcggctggagaaacgccagctcgatgtggtggtggggcgcctggacaactatgcgccgcgcgccagcctgcgctgcgaggtgctctacagcgaggcgatcgtggtgatggcgcgccccggtcaccccctggcccaggccgccgcgctggactgggaagacgtgcggcgctacgactggatcgtctggccgcccggctcgccgatccgcagcaagctcgacatggccctgacccagggcggccggcagccgccggcctaccgcctggagtcatcgtcgatgctggccaacatcgaattgttgcgtggcagcgacatgctatccatcggctcggcgcgggtggtcgagcacctcgccgggctcggcctggtggccaggctggcgctggagattcccggcgagggcgcggtgggcatgtgctggcgcgacgaaccgcatcgcgaccgcgccagcgaagacctgctggcctgcctgcgcgaaggcgcggcggccgagtag

SEQ ID NO: 323099 - DNA, 519 bp, Pseudomonas aeruginosa
atgtccgccccgatccttctcagcgcccaccatcgcgccatgcatgcgctgtacagcgagcaccatggctggttgcagaactggttgcgcggcaagctgggctgcgcggcggacgcggcggacctggcccaggacaccttcctgcgcatcctgctcaagcgcgaactgcgcgagatcggcatgccgcgcgcgttcctgcggaccatcgcccgcggcctggtgatcgaccactggcgtcgcgaggaactgcagcgcgcctacctcgaaagcatcgcccacctgcccgaggcacaggcgccgtcgcccgaggcgcgggaactggtgctggaactgctggaggaaatctcgcggatgctcgacgggctcaagccgaaggtccgcaccgccttcctcctggcccagtgcgaagacctcagccaccggcagatcgccgaacgcatgggggtttcccagcgtagcgtcgagcgctacgtggccgaggcgctgtaccactgctacctgctgcgctacggcgaatga

SEQ ID NO: 323100 - DNA, 999 bp, Pseudomonas aeruginosa
atgagcggagccgtggacgggacgcgcggtagggtcgacgaagcggtggtcaggcaggccatccactggctggtccgcctgcgctcgcagccgggcgacgatcgcctgcagcgcgcctgcgcggcctggcgcgcggagcacggcgagcacgagcgggcctggcagcaggtcagcgcgctcaacgaagaactgcacggacgcttcaaggcgctgcccggcggggtcgcctacggcaccctggacagcagcgcgcagcgcctgcagcggcgccaggcgctgaaactgctgtcgctgctggtggccggcggcgccgtggcctgggtcggtcgcgacagcctgccctggcagcgcctgagcgccgactacagcaccgccaccggcgagcgacgcagtatcgagctggtcgacggcacccgcctgcaactgaacaccgacagcgcggtcgacgtgcgctacgacgccggccagcgcctgatcctcctcgcccgcggcgagatcttcctcgccagcggcgccgatacgcaatcgcccacgcacaggccgctgcgggtacgtaccgcgcaagggctgttcgaggccctcggcacccgtttcaacgtacgcctgcaagatgccgccacctgtctcagcgtcagcgagggttcggtgcgcatcgatgccttcggcgcgcgtccgctgcaggctccggtggccgaggcggggcagagctatcggatcgccgccgacggcgtgcggcgcctcgaacggccgcagatggacgccgtggcctgggccgatggcctcatcgtcacccgcgacatgcgcctggccgatttcctcgccgaggtcgcccgctaccgcaacggctacctcggctgcgccgcggaggtcgccgacctgcgcctgtccggggtctatcgcctggacgacaccgacaagctgctgcaggtgctcgcgcggaccctgccggtgcgcctgcagcgacatacccgctggtgggtgagggtggtcgccgcctga

SEQ ID NO: 323101 - DNA, 2463 bp, Pseudomonas aeruginosa
atgaccgccaccgccgtcgtcctccgcaatgccccgtcgtccctcgatttcccccgcgcctcgcgcctgagccgttcggtgcgcgcggccctgctgtcgttggccatggcggccggcgcggcgccgctctgcgcctcggccgccgaagcggcggcggaacaggcgcggccctatgcgatccccgccggacagttgggcgacgtgctcaaccgcttcgcccgcgaggccggcatcaccctctcggccactccggcgcagaccggtggctacagctcccaggggttgcgcggcagtttcaccgtgcagcagggcctggcccggctgctcgccgacaccccgctggaagcggaagaccagggcgacggcagcttcgtcttgcgcgaggcgccggcaaaggacggcgatgtgctgaacatgcaggcggtggaggtcttcgccctcggcaacaacctgggcagcaccgatggctacctggccacccatagccagatcgccaccaagaccagcaagccgctgctggaaaccagccagaccgtctcggtgatcacccgcgagcagatcgacgacaccgcctccaagaccgtacagcaggcgatgcgctatacccccggcatcttcaccggccaggtcggcgcctccaaccgctacgactacgtggtgatgcgcggcttcgccgacaacagcgtggacaacatctacctcgacggcctcaaggccatgggcgacagcggtaccttcagctcgatgcaggtcgacccgtacttcctcgaacgcatcgatgtgctcaaggggccgtcctcggtgctctacggccgtagcctgccgggcggcctggtggcgctgaccagcaagaagccgttgtacgaggactaccgccagatcaccggcagcatcggcaacatgggccagaaggagatgggcttcgatttcagcgggccgctcgacgaggagaagcgcatcgcctaccgcctgatcggtctcggcaagggctcggacacccagttcgatcacgtcaaggaggagcgctacgccatcgccccgaccctggccatcgacttcagcgacgacaccaccctgaccctgcaaggctacctgcaacacgatcccaacgggggctaccacggcggcgtaccggccgacggcaccctgtcgcaccacaacggccggcacatctcccgcgagttcttcgatggcgagccgagcaaggacgacttcgaccgcacccagcggatgttcggctaccagctggagcaccgcatcgacgacgtctggtcggcgcggcagaacttccgctacctggactccgacgtcgacctgtcgcaggtctacgcctacggctggagcgccagcgagccgaacaagctgaaccgctacttcagcggcgcccgcgagcacctgcaggcgtatatcgtcgacaacatgctgcaggccgaattcgccaccggcgcggcgcgccacaccctgctcaccggcctcgactaccagcgccggcgcaccgtggtcgactggcgttccggctcggcctcggcgctggacgcgttcaacccggtctacggcgacgacgccatcagctatttcccggacgacaaccacacccgccgcctggagcagaccggcgtctacctccaggacctgatcgacatcgaccagtggcgcttctcgctcggcctgcgccaggactgggtcagcgtcaccgacaagaaccgcagcaccggcagcaaggccgacgatgactgggagaaattcaccgggcggatcggcgcgctgtacctgttcgacaacggcctggcgccctacgtcagctactccgagtcgttcaacccgaacgcctattccgacgcctccggcacgcccctggcgcccaccgagggcaagcagtgggaactcggcctgaagttccaggcgccgggcagcaacagcttctacaccgcctcgctgttccatatcacccaggaaaacgtcgcctccaaggaaccccaggacaacttctacacctcggtcggcgaagtgcgctcccaggggctcgaactggaggcccatacccagctcagcgacaacctgaaactgctcggcagctacacctacaccgacatcacctacaccaagtcgctggacggcaaccagggccatacgccgaaccaggcgcccaagcacatggcttcgctgtgggccgactatgccttcgacgccggcccgctcagcggtctgagcatcggcggcggcgctcgctacgtcggcgagacctgggcggacaaggaaaacaccttgcgggtgccggactacaccctggtcgacgcgcggatcggctacgacctcggcaagctcggcctgaaaggcctggacgtcagcctcaatgccaacaacctgctggacaaggactacgtggcgtcctgctacagcctggacttctgctacttcggcgagaagcgcaacgtcaccgcgacggtgaactaccagttctga

SEQ ID NO: 323102 - DNA, 1149 bp, Pseudomonas aeruginosa
atgcgccccgtcctggtcctgctgcaccgctatgtcggtctggctaccgcgctgttccttttcctcgccggtctcaccggcagcctgctggcattccatcatgaaatcgacgaatggctgaaccccggcttctacgccgtgggcgagggcggcgagcgcctttccccgggcagcctggtgcaacgcgtcgagtcacgctatccgcgacaactggtgtggtacatggagtatcccgaggcgggcgggcatccggcgttgctcgccaccgtgccgcgcgaggccggcgccaaggtcgagcacgacgtgttctacctcgacccggtcagcggcgaggaagtcggcaagcgcctctgggcggcctgctgcttccagccggcgaacctggttccctgggtcctggagttccaccacaacctgaccctgccggggaactggggcctgtacctgatgggcggggtggcgatgttctggttcctcgactgcttcgtcggcgcctggctgaccctgccgcgcggccggccgttctggagcaagtggacgacagcctggaagatcaagcgcggcaacgcctaccgcttcaacttcgacctgcatcgcgccggcggcctctggctctggctgctgctggcgccggtggcgctgagcagcgtcgccctgaacctgcctagccaggtgttcaagccgctggtatcgctgttctcgccgatcgaaccgagcgtctacgaggcgcgcgggcggctgcccagggagcaactgggggagacccgcctggactacgaccgcaccttccagttggccagcgtcgaagcggcgcggctgggcatcgccgagccgatcggcgagctgtactacagcttcgaatacaacttcttcggcgccggcttcggcgaccacgacgaccccatgggcaagtcctggctgttcttccacggcagcgacggccgcctgctaggccaggaagtcgccgggcagggcagttggggagagcgtttctaccgcttgcagtacccgatccacggcgggcgcatcgccggcctgccgggacgcatcgccatcgccgccctcggcctggccatcgccgggctgtcgctgaccggtgtctacatctggtggcgcaagcgccgggcgcgccactggaacggccgctag

SEQ ID NO: 323103 - DNA, 2760 bp, Pseudomonas aeruginosa
atgcgcatccccccatacttcccccgccttggcgccctcggcctggcctgcgccctggccctgcccgcgcaggcggccgagcgcgcctggagctacagctacaacgccctcggcctgatcgagcgcgccgacggtccgcgcaccgatgtgcaggacgtcaccctctatgcctacgacagtcgcggcaacctgacccaggtgaccaacgccctcggccaggtcacccgcctcggcgactatgacgagcgcggcaagcccggcagcatcaccgatgccaacggcgtcaccagcagcctcgcctacaccggcgtcgacggctggctggcctccgtcagcaccgccggcagcaccacccgcttcgactacgacgcggtcggccagatcacccgcgtcacccgtggcgacggcagttggctgagctacgaatacgacgacgcacggcgcctggtggcgatcggcaacaacctcggcgaacgcctcgaatacgacgtcgacaccaagggcaatcgcaccgcccagcgcatcaaggacgccagcggcagcctggtgcgccagcagcaatgggcctacgacgagcttggccggctgctccgtgcggtcggcgccggcggccagacacgcagcttcgcctacgacctcaacgacaatccggtcggcgaaaccaacccgcgccagttcgcccacagccaggccttcgacgccctcgaccggctggtcggccagagcgatcctctcggcggcaagacccaactcgcctacgacgcccaggacaacctcaccgaggtcaaggacccgcgcggcgtcaccacccgctacgaatacgacggcctcggcaacctgacccgactggtcagcccggacagcggcaccaccaccttcgagcacgacgccgccggcaacgtcatccgccgcaccgacgctcgcggtgcggtcaccgagtatcgctacgacgccctcaatcgcctgatcgagcgccactcgccgagcgacccgagcctcgacgtacagtaccgctacgacctcaccgccgacggcaacaagggcatcggccgcctgggcgccatcgaaggtgcccgcgacagcctggtgtaccgctacgacgagcgcggcaacctggtcgagcaggtacgcagcatccgcctcgaccagcagaccctgctcgaccgcgtgacctaccgctacgacgcggccaaccaactgctggagatcggctacccctccggcctcgccatcggctacccgcgcaacgccggcggccaggtcgccagcgtgaccctggcagtaggcgacaaggcgccgagccccctggtcgggcagatcgcctacctgcccttcggcccgctgcagcgcctgacctggggcaacggcatcgccctcagccgcgagtacgaccaggactaccaactgctgcggcagaaggtcggcccctggcagagcgactaccagcacgatgccaatggcaatatccagcagcaccgccacagcctctggggcaccctggactaccagtacgatccgctggaccgcctgaccgaggaacgcggcgtccagggcgggcgcagctacgcctacgacgcggtcggcaaccgcacccaacgcagcgacaaccccgcctcaggcggcaccgccagcagccaggactaccagtacgcgcccgacagcaaccgattgaccgccatcggcgcgcaagcggtgaccagcgacgccgccggcaacctcacccaggaccgcgccgcgcgcaaactggcctacgacgcccagggccgcctgcaaagcgtcagcctcgacggccagcaggtcgccgaataccgctacaacgccctcggccagcgcatcgtcaagctcacccccgagagcgtcaccacctacctctacggtcccgacggccagttgctcggcgaagccgaacacgacggcagcggccggaaactgcgagcccagtactacctgtggctggacagcctgccgctggccaccatcgacgccgactacgacgcccagggcaaggtcggcaacccgaccctgctctacctccatggcgaccacctcaacaccccgcgcctggccaccgacgccagcggccagatcgcctggcagtggcagtccgacgccttcggccgcggcgaagcgctgagccagggcagcacccaggtcaacctgcgcttccccgggcagtactacgatgcggaaagcgggctgcactacaactacttccgcgactatgatccggagactgggcggtatgtggagagtgatccgattggccttggtggtggactgaatacctatggatacgtagaagcaaatccagtactacggacagactccctagggcttatgcaggatattggatgtattacgccaccaagatcaactgcagagttttggtttccatgcaaaccaggtggaggagctggagcatccgctagcggtgcaactgggttaggcctttggtgcgttctaaacggaacgtgtgctgccaataacgcagacgaagagtgtcctgtaccgggtgcaaccccaggcgagaaaacacgagggccttctcaggtttgggagaaaccaggtgacagcaataccgctgatgatgattttgataatctatcgccaacggatgtacaggaaatacccgtaggacgtaaaggaacacttccagacgggcggactgtagtagtcagacctgtcagcagcgacggccgaccaaccattgagattcaagacggtagaaacaggataaaaattagatatggacagaaatag

SEQ ID NO: 323104 - DNA, 510 bp, Pseudomonas aeruginosa
atggttggaatcatcgacgaacaaggcacgcgttacgccacctggacctacgacaaccaaggccgcgccatctccagcgaacacgccaacggcgccgaaaaggtctccctcgcctacaacgatgacggctccaccaccgtcaccaacgaatacggcaagcaggccacctaccgcttccaggtgatccagggcatcaagcgcatcgtcgccatcgaagggcaaccctcgcccaactgccccagcagcaattccaccttcacctacgatgaccagggcctgctcaccagcaaacgcgacaacaacggcaacctgaccacctaccagtacaacgcccgcggtctggaaacctcgcgcaccgaggccgccggcactgcgcaggcgcgcaccatcacaaccgactggcacccgaccctgttcctcccggtgcaggtcagcgagcccggccggatcacccgctaccagtacgacgccgagggacgcaagaccggcgagaccgtcaccacccgctga

SEQ ID NO: 323105 - DNA, 528 bp, Pseudomonas aeruginosa
atgaccgaagaacgcctgctgcgccgcgacgaaatccccctggtctgggagatcgaccgcagcgaagtgatcgaacacctgtattccgtcgaggccggccaactggtgctgcgccccgagttctacgacatgcgcggctggccggagggcgaggccgagcattacacgccgatcctgctcgactgcttcgaccgcggcggctggttcctcggcctgttcgaccagggccgcctgatcggcgcagtagtcctcgacccgcgccgcctcggccccgagcgcgactggctgcaactgaagttcctccacctcagccacgcctaccgccgccgcggcctcggcgcccacctcttccacctcgccgccacccaggcccgccacctcggcgccagcgcgctctacgtttcggctacgccgtcgcagaacacggtggatttttatacgagactcggatgccggctgtgcatagagccggatgaggagttgtatcggttggagccggaggatgttcatctggtgttcaatctatag

SEQ ID NO: 323106 - DNA, 852 bp, Pseudomonas aeruginosa
atgcgatccgacctgcacgaggccaaccggctgtcgtggaacgccgccacccgggcgcacaacagccacaaggccgaccaggccaccttcttccgcaacggcggttccacgctctatcccgaggaactgcaactgctcggccatctcgacggcctgcgcctactgcatctgcaatgcaacgccggacaggacagcctgagcctggcgcgccttggcgcccgcgtcaccggggtcgacatcgccgacagcgccatcgacttcgcccgccagctgtcccgcgacagcggcatcgccgccgacttccagcgcgacgacatcctccgctggctgcccgtcgccgccacccgcggcgaacgcttcgaacgggtcttcgcctcctacggcacgctggtctggctctccgacctcaagcgctgggccgacggcatcgcccaggtactggttcccggcgggcgcttcgtcctggtggagttccatcctttcgccctgtacttcgacccacactggcaaccggcctacgactacttcagccgcgagccgatcgccgagagcggcgtcagcgactacgtcgccgagtccggcgccagcctggcgccctccggctaccgcgccggcgtcgagaacttcagcaaccctcatcccagctacgagttccagtggggcctggccgatgtgatcggcgccctgctcggcgccggcctgcaactcgaacggctggaggaatacccctacgccaacggctgggccggcttcgacggcatgcgcgacggcggcggcggacgcatgctgccgcccgccgatcgtccgcgcctgccgctgatgtacggcctcagcgcaaggaaaccacgatga

SEQ ID NO: 323107 - DNA, 222 bp, Pseudomonas aeruginosa
atgacctcccgtctgctgcccgccctgttgctctcgtccgcattcgccgtcctggccggctgctccaccccgaccatcgtcaccctcaacgatggccgcgagatccaggcggtggataccccgcgctatgatcgtagttccggcttctacgaactggagcaactggacggcaagcgcacccgcgtcaacaaggaccaggtgcgcagcatcaaggacatgtaa

SEQ ID NO: 323108 - DNA, 924 bp, Pseudomonas aeruginosa
  misc_feature (815)..(824): n is a, c, g, or t
atgtctgccgtttccacctcgttgttgcttttcctcaacctgctgaccccggctcaggccgcccagcccgtgccgctggccgatggccgcatcgagatcgctgccggcgagagccgccagcgctacctcgaccttgcccccggcgagttgcagttgctcgacctggaggtcgaccgcggccgcgtccgcctgcgcgccaccacgcccgacggcaaggcgttgcgcgcgacggagctggccggacgccagtcgctcggcctgcaggccggcgagcgccagggcctgcgcctgaccttcagcgccgacgaagacaccgcactgaccctgatccccacccagcgcctcaccccgcagaccccggcgcttgattcgccggcgccgcagagcccgaccctgcaacgcctgcaggcggagcttgcggaaaagcgccccggcgcgctgaaggcgttctggaagcaggtagcgaagcagggcacgccgctggtggagccgctggatgccgaacgtgtgctggtcaccttcctctggcgccagcagcgtcccggcgacgtgcgcctgctgtggccgaccccggaggtcaacacccgccgcttcgaggccctggccggcagcgacgtgcgctacctgagcctgccgctgcgccgcgacgcgcgggtttcctaccagctcagcgccgacctgccggacctgcaacaggccgatcgcggcaccttgcgcctggcgttgcaggcggcggcgcggccggacccgctgagccgcacgccgtggctcaacagccgcgcgctgccgcgggccgagcaggcctcgctggtgcnnnnnnnnnncctgccgagacctgggaccagccgcgcaaggacgtgccgcgcggcaaggtggagcgcctcggctatagcagccaggccctggccaaccagcgccagctga

SEQ ID NO: 323109 - DNA, 705 bp, Pseudomonas aeruginosa
gtggagcgcctcggctatagcagccaggccctggccaaccagcgccagctgacgctctacacgccgccgggctacgaccccgagggccagcgctatccgctgctggtgctgttcgacgaggaccactacgcgcgcgacgtaccgaccccgaccatcctcgacaacctgatcgctgccgggcgcatccgcccgaccctggcggtgattgtcggcaatgtcgacgccagcagccggggccgtgagctgccctgcaacgaggccttcgccgacatgctcgcccatgagctgctgccctggttgcagcagcgctatgcattgagcgaggagcctgccgatcgcgtgctttccggttccagctacggcggactggcctcgggctgcatcgcctaccgttatccggaacgcttcggcaaggtgctgagcctgtccggctcgttctggtgggggccggacgagcagcagccgcagtggctggtacggcagttcgccgctggcgagcgtttgccgctggtgttcttcctcagttccggcctgctcgaggagcccgaggcggacggcattctcggcagcaaccgcagcctgcgcgcggcgctgcaaggcaagggctacccgctgcactaccgtgagttccccggcggtcacgactacgcggcgtggagcctggagcttgccgaagggttgcaggccttgttgccggcgcattga

SEQ ID NO: 323110 - DNA, 918 bp, Pseudomonas aeruginosa
atgcgccgactcttgcgcccggtattctgcgccgcgctcttctgcctgtacccagcgctggtccaggctgccgccgaaagcgaaatcctcggcctgttccagcgctggcaggccgcccacgggcaacgcagcggcaaggccctggaaggggtctatgcgccgcgcctggactactatggccgcgcgcagacgcgcgagcgcaccctctccgccaagcaggccttcttcgcccgccatcccgacttcgagcagcgcatcgtcgctgcgccgcagatcgtgccgggcgaccaggaaggccgctacgaggtgcgcttcgtcaagcaggtacgcctcgacggacgcctgcgcaactatccggggctgctcctggccgagcgcgccgggccgggcgatacctggcgcttcgtcggcgagagcgacgagatcacccgctacgccgtcgacccgcggtacaccccgctggctcgcggccgcttcgccggtaccgaggcggacttcgcctgggtagtggcccacgcgccgaacagcgccgccttgtgcgacgaatacgaggattgccgctgcgacctctggagcgccgacgcgcgcgtcccgcccaagccgctgggcagttgcaccggcgcggtgctcagcgtcctcggcggcctcgacgacagcggccgcgagcgcctgcaactgctgcgtacctggtggaccagcacctggaccaagtcgtcgctgctggaaatccgcgacggccagtgggtgcgggtgctgccggacatctccaccacctgggacgacgccgaggccgaactggtgctgtacaaggccgacccgcagcagccgggccgagtgctggtgaccgaaaccgtgatggacgacgagggcgactggagccaccgcacccgcagcgaggcgctgcgccccgtaccctga

SEQ ID NO: 323111 - DNA, 1536 bp, Pseudomonas aeruginosa
atgcgcatccacgtctccttcatcgaccgtgtcggcatcacccaggaggtgctggcgctgctgggtgggcgcaacctgaacctggatgcggtggaaatggtgccgccgaacgtctacatcgacgcgccgaccctcagtcccgaagtgctggaggaactgcgcgcagcgctgctgggcatccgtggcgtgcaggcgatgaccgtggtcgacatccttcccggccagcgccgccgcttgcagctcgatgcgttgctggcggcgatggccgatccggtgctggcggtggacggcaagggcctggtgctgctggccaacccggccttcagcgagcgctgcggacgcgacccggccggcgagcggctggccagcctgttcgacgatgaaaccctggaggatgcgctggtcgagcagggcttccgcctgccgctgcgcgaagtgaccttcatgggccaggccctgctgctcgatgccacgccgatcaccgaagggccgggcgagggcgagcggcacctggccggcggcctgttgaccctctacgaaccgaaccgcatcggcgagcgcctggcggccttgcaccatgaccatgccgaggggttcgagatgctcctcggcgattcccagccgatccgcaccctgaagacccgtgcgcagcgagtggcggcgctcgacgcgccgctgctgatccacggcgagaccggtaccggcaaggaactggtggcgcgcggctgccatgccctgagtgcgcggcacaactcgccgttcctggcgctgaactgcgcggcgttgccggagaatctggccgaaagcgagctgttcggctacgcccccggcgccttcaccggcgcccagcgcggcggcaagccgggcctgctggagctggcccaccagggcacggtgttcctcgacgagatcggcgagatgtccccctatctgcaagccaagctgctgcgcttcctcagcgacggcagcttccgccgggtcggcggcgaccgcgaggtgagggtcgacgtgcggatcctcagcgccacccaccgcaacctggagaagatggtcgccgagggcagcttccgcgaggacctgttctaccgcctcaacgtgctcagcctggaagtcccgccgttgcgcgagcgcggccacgacatcctgctgctggcgcggcacttcatgcagcaggcctgtgcgcagatccagcgcccggtgtgccggctggcgccgggcacctacccggcgctgctgagcaaccgctggccgggcaacgtgcgccagttgcagaacgtgatcttccgtgccgctgcgatctgcgagagcagcctggtggatatcggcgacctggagatcgccggcaccgccgtggcgcggcagaacgacggcgaggtgggcagcctggaggaggcggtggagggcttcgagaaagccctgctggagaagctctacgtcagctatccatcgacccgccagttggctgcgcgcctgcaaacctcgcacaccgccatcgcccaccgcctgcgcaagtacggcatcggtccgcgcgcctga

SEQ ID NO: 323112 - DNA, 1743 bp, Pseudomonas aeruginosa
atgaagcaacggattcccaccctcctcgccggcgcctgcctggccatccccctgcacgccctcggcgccgccgacctgctggtggtcaacgccaggatcttcaccgccaatccgcagcaacccttcgccgaggccctggcggtggaggacgggcggatcctcgcggtcggcgacgaggccgggctgcgcgccctggccgatggcgacagccaggtcgtcgatctcggcggcaagcgcctgatgcccggcctgatcgacacccattcgcacgcggtgttcggcggcctggagctggccggcgcggacatgggcaacgaacaggtcggcctcgacgaactggaacggcgcctgcgcgcctggcgcgacaacggcaaggcgcgacatggcgacatgctcaatgtcagcggcatgcataccgcctactggagccaggtcaaggacttccgagcgcgattcgaccacggcgaatgggccgaccagccgctggccttcatcggcagcgaccaccacaccggctgggccaacgccgccatgctgaaacgcgccggcatcgacgccgcgcgggtccgcgccctgcccgaggaacagcgcaacaccatcggccacgacgccgacgccacccccaacggcttcctcgccgatgccggtctcgacgcggtgctcgcggtactgccggcgccgagcgcggaacagatgctagaagccggacgcagcgcggtgcgctacagcaactcgctgggcctgaccgcatggatggacccggccgccaatggctcgccgggcgatgccctgttcagcctcaggcccgacgagaacaccgtcggcgtgctaccggtctaccagcggctggccaagggcggcgaactcagtgcccacgtcgccgccctcctggtcgccaatccacgcagccggccggccgacctcgaggtgctggacaaggtgcgccagcgcttcctcggcagccccaacctgaccctgccgggaatcaaggtgttcgccgacggcgtaccggaatacccggcgcagaccgccgcgctcctcgagccctatcgcaacagcaggaagacgggcgaactgctgatcgacccggcgcacttcggcgaactggtcagcgccgccgacgcccgcggctggctggtccacgtccacgccatcggcgaccgcgcggtgcgcgaggcgctgaacggcatgcagcaggcgcggcgcgaccgcgacagcggcatcgcccattcgattacccacctgcaactggtcaatcccaaggagttcgagcgcttcaggccgcttggcgtgatcgcctcgatgcagctgtactgggccgccgccgacgaaaccacggtggacctgatgaagccctatatcagtgccttcgcctaccgctaccagtacccggcgcactccctgctgagcaagggcgcgaccatcgccggggccagcgactggccggtgtccagcctgtcgccgtggaaggccatccagcaggcggtgacccgcaagggcccgcagggcgtgctcaacgccggcgaacgcctggaccgccagaccatgttctacgcctacacccgcaacgctgcgcggaccatcggcctggaacaccggatcggcagcctggagccgggcaagcaggcggacttcatcgtcctcgaccgcgacgtgttcgaggtgccggagacgcaactgggcgaaaccaaggtgctgaagacctggttcgccggcaagccggtgtattccagcgagggctga

SEQ ID NO: 323113 - DNA, 924 bp, Pseudomonas aeruginosa
atggacaaattgaatgccctggcgatgttcgtcgccactgccgaaaccggtagcttcagccgtggcgccgagcgcctgggcaagacgccctcggcgctgaccaaggccgtcgcccacctggaagcggaactcggtgcccgcctgttcgagcgcactacccgcagcctggcgctgaccgaggccgggcagatctacctggaggcggcccgccagtccctggaaacgctgcgcacggcggggcaggagatcgaactgctggagtcggagttgcgcggcgaactgcgcctcgccgcgccgccgtcgttcgccgcggcgttcctccagcaggcctgcgccagcttcctcgaggcgcatccgcggatcagcctgcgggtggacctcgacgaaaccttcctcgatctcagcgaaggcggctacgacctcggcctgcgcgacggccccattgacctgccggggctggtggcgcggccgctggcgccgaaccagatcgtgctttgcgccagccccgcctacctggcgcggcaacccgcgccgcaaggcccggaggacttcgagcggcacgcctggctggtcttccagcacccttcgctgaaccagaacttctggtggatggagcgcgacggcgcccgccagcgtatcgaccagccgcgcccgcgactggccagcgacaactacgacttcctgctcgcccacctgctggccgggctgggcctgcagttctgtccgcagtggagtgtcgcgccgctgctcggcgaagggcggctggtgcgcctgctcggcgactaccacttcgacccggggccgttcgggccctccatccatgtcctctatccggggcaccggcgcaacacgcggaaggtccgcgcgttcctcgagcacctgcgcgccagcttgcagcgacaggggctgtgccatcggctgtaa

SEQ ID NO: 323114 - DNA, 384 bp, Pseudomonas aeruginosa
atgagcaagttgcgctttaccaccgaccacgaatggctgcgccaggacgacgacgggctgctgaccgtcggcatcaccgcctacgcccaggacgccctcggtgacgtggtattcgtgcagttgccggaactcggcgaacacgccgccggcagtgaagtggcggtgctggagtcggtcaaggccgccagcaacatcctgatgccgctggacggcgaggtggtggcgatcaacgacgcgctgccggacgccccggagctggtcaaccaggatccgctcggcgaggcctggttcttccgcttccgtccggccgacgccggcgcctgggaaaagctgctcgaccaggccgcctacgaccgcctgctgaacgccaacgccgacgcctga

SEQ ID NO: 323115 - DNA, 2880 bp, Pseudomonas aeruginosa
atgaccgataacctgaacctcggcgccatcgacctgggcaccgacgacgaattcatcgcccgccatatcggcccgcgtgccgccgacacccaggccatgctccagcgcctgggctacgactcgctggacgcgctgatcggcaacgtgatccccgacagcatcaagggcagcagcgtgctcgacctgccggccggcatgggcgaggccgaggcgctggccagcctgaaggcgatcgccgcgcgcaatcgcgcgttgcgttccttcatcggccagggctactacaactgccacaccccggcaccgatcctgcgcaacctcctggagaacccggcctggtacaccgcctacacgccgtaccagccggaaatctcccagggccgcctggaggcgctgctgaacttccagaccctggtcagcgacctgtccggcctgccgatcgccaacgcctcgatgctcgacgaggcgaccgccgccgccgaggccatgaccttctgcaagcgtctgtcgaagaaccgcaccagccaggcattcttcgcctcccgccattgccacccgcagaccctcgacgtgctgcgcacccgtgccgagccgctgggcatcgaggtggtggtcggcgacgagagcgccatcgaagacttctccgcctacttcggcgcgttgctgcaataccccacctgcgacggcgagatcgtcgactatcgcgaactggtcagccgcttccatgcggtcgatgcgctggtcgcggtggccgccgacctgctggcgctgaccctgctgaccccgccgggcgagttcggcgccgacgtggccatcggcagcgcccagcgcttcggcgtgccgctcggcttcggcggcccgcacgcggcctatttcgccacccgcgacgccttcaagcgggacatgccgggacgcctggtcggcgtctccatcgaccgccacggcaagccggcctaccgcctggccatgcagacccgcgagcagcacatccgccgcgagaaagccaccagcaacatctgcaccgcccaggtgctgctggccaacatcgccagcatgttcgccgtctaccacggcccgcagggcctgctgcgcatcgcccggcgcacccaccggctgaccgcgatcctcgccgccggcctggagcgcctgggcgtggccgtcgagcagaagcatttcttcgacaccctgagcctggccaccggcgcgcgtaccgcggcgatccatgccaaggcccgcgccgccgggatcaacctgcgcgagatcgatgccggccgtctcggcctgtcgctcgacgagaccgtccgccaggccgacgtggaaaccctctggggcctgctggccgaagagggccaggcgctcccggacttcgccgcccttgccgccagcagcggggaccgcctgccggtcgagctgctgcgccagtcggcgatcctcagccacccgatcttcaaccgccatcactcggaaaccgagctgatgcgctacctgcgcaagctggcggacaaggacctggcgctggaccgcacgatgatcccgctgggctcctgcaccatgaagctgaacgccgccagcgagatgatcccggtgacctgggccgaattcggcaacctgcacccgttcgccccggccgagcagagcgaaggctaccgccagctcaccgacgaactggaggcgatgctctgttccgccaccggctacgacgccgtgtcgttgcagcccaacgccggctcccagggcgagtacgccggcctgctggcgatccgtgcctaccaccagagccgcggcgacagccagcgcgacatctgtctgatcccgtcctccgcccacggtaccaacccggctaccgccagcatggtcggcatgcgcgtggtggtggtggcctgcgacgcgcgcggcaacgtcgacgtcgaggacctgcgcaacaaggccagcgagcacaaggaacgcctggccgcgctgatgatcacctatccgtccacccacggcgtgttcgaggaagcgatccgcgagatctgtgccatcgtccacgactgtggcggccaggtgtacatcgacggcgccaacatgaacgccatggtcggcctgtgcgccccgggcaagttcggtggcgacgtttcccacctgaacctgcacaagaccttctgcatcccccacggcggcggcggcccgggcgtcggcccgatcggcgtgcgcgcgcacctggcgccgttcctccccggccacgctcgcggcgagcgcaaggaaggcgcggtgagcgcggcgccgtacggcagcgcgagcatcctgccgatcacctggatgtacatccgcatgatgggcggcgaaggcctcaagcgcgcctcggaaatggccatcctcaatgccaactacatcgcccatcgcctggaggagcactacccggtgctctacgccggcggcaacggcctggtcgcccacgaatgcatcctcgacctgcgtccgctcaaggacagcagcgggatcagcgtcgacgacgtggccaagcgcctgatggacttcggcttccatgcgccgaccatgtccttcccggtggccggcacgctgatgatcgagcccaccgagagcgagtcgaaggccgagctggatcgtttctgcgacgcgatgatccgcatccgcgaggaaatccgcgcggtggaacgcggcgagctggacaaggaagacaacccgctgaagaacgcgccgcacaccgccgccgaactgctcggcgaatggaaccacgcctacagccgcgagcaggccgcctatccgctggccagcctggtggaggccaaatactggccgccggtgggccgcgtcgacaacgtctacggcgaccgcaacctgacctgctcctgcccgccgatcgaggcgtacagcgaggagtga

SEQ ID NO: 323116 - DNA, 1461 bp, Pseudomonas aeruginosa
atgcccctgctcgccgccgccctgctggtcgcaggcgcgattcccctcggtttcatctggatcctcaccagcgccaagttcgagataggcggcgccagccccggcgagagcaccgtcggcaaggtcgagaacatcgaccagcgcgccatggagcaattctgcaccggcgtgcgggcgacgcccgccggcacctggctggtaggccggcgcgaggtcggccgcgacgagcaggctccgcccgagggcgtcatcgacctggacctggtggcggccgcccagcccagggaagaagagtccgaaccccacctcttcaacttcctcaacggcatgctgctatccggcggcgatccggaaaccacctatgtctcgcgcctgggcgcggacggcgtgttccacgaagtggcgcggctcggcgagaccgcctgcctggaagtcacgccggacggttccagcgtcttcctgctcaccggcctgcggcgcccgggcaaggacaacggtcagcgcgagcagacagtggtgctgcgcagcgacgaccagggcaagagctggcggcggctcgaggaaggcttcatggccgaggcgaatcgactgggctgggctctcgcaccgcgcttccacggcaaggacgaagtctgggtctggggtgatttcgaatacggcggtgccgatggcggccaggaacccggccagccgagcgggctgttctattcgcccgaccgcggcgccagtgtcgagtcgatcgccacctccgcgccgctgctggtcgacctcgcctacgcccgcgagttggcgccgaacggcgtcagctggggcgactacaacggcaagcacgggcagatcaaggcacacgtcgcccaactggacgcggagcgcgccgcgatctgggtaagccagaccttccgctatggcccacccgaggggcgctacctgaccagctcgatattggtcaccacccaggccgaactgcgccgcgagggcggacgctggcagatgggcgcgatccggcgcaccgacggcgtggccgtcgagcgcctggaacagaacatggacggtcgggtgatcgcagtgctcgaccaccccgacgaatcgcgctcgctgatcgccgagctcgatcgcgacgcgctcgaatggaagatcaccggcaagctgcccagcccgttctggcccctgccgtccagttccgggctgcgcgagttctacatgggcaggaatgtgctgctggccaacaccatgagccactacgaagtgccgctgtggctgtatcccgacgaagagccggcgagcgtctccgccaacgcggtgtactactcggacgactggggctcatcctggcgccgcctggacatcgccggctacctcggcgtgctcggtttcgacgaggcgcacgaccgggtgttctgggcccgcggcaactggtacgacagccgcgacctcggcgtccaggcctacgacctgaactga

SEQ ID NO: 323117 - DNA, 756 bp, Pseudomonas aeruginosa
atgctgaaagtcctgatccagaccctgatcctgggggtgttgctgggggcctccgcggcccgtgccgaattgcccgccgactacaaggtggtgctgctgaccgagaacttcccgcccttcaacatggcggtggacgacaagaacttcgcccgcgacgacggcatcgacggcatcagtgccgacatcgtccgggagatgttcaggcgcgccggcatcggctattccctgagcctgcgcttcccctgggaccgcctgtaccggttgaccctggacaagcccggctacgggctgttctccatgacctacacccccgagcgggtgccgcagttcaaatgggtcggcccgctggccgacaccagttgggtgttgctggcgccggccggcagcaagatcgccgtgaagaatctcaaggacgccgcccgctacaagctcggcgcctacaagaacgacgcggtcagccagcacctggaggcccagggcatcccggtgatcaacgccctgcgcgaccaggaaaacgtgaagaagcttaccggcgggcagatcgacctgtgggccaccaccgatccggtcggccgctacctggccaagcaggaaggcgtgtccggcctgcagacggtgctgcgtttcaacgaggccaagctctacctggcgttgaacaaggacactccggacgaggtggtggagcgcctgcaaaaggccctggagcagatgcgccaggaaggcttcgtcgacgaagccgtcgccaactacctctga

SEQ ID NO: 323118 - DNA, 753 bp, Pseudomonas aeruginosa
atgcaaagaagcctgctcttcgcgctgctcgcaaccctgctgctggtcggcggcgcgcgcgccgaaaccgatcccgactacagcatggtcctgctcacggagaacttcccgccgtacaacatggcgatcaacggcaagaacttcgcccaggaagacaacatcgacggcatcgccgtggatgtcgtccgcgagatgttcaagcgcgccggcatcaagtacagcctgaccctgcgtttcccctgggaccgcatctacaagctggcgctggagaagcccggctacggggtgttcgtcaccgcccgcctggccgagcgcgaggacaagttcaagtgggtcggtccgatcggcccggacgactgggtgctgctggccaagggcgacagcccgatcaccctgggcagcctggacgaggcgaagaaataccggatcggcgcctacaagggcgatgccatcgccgagttcctcggcaagaacggtttcgaggccgacctggcgctacgcgaccaggaaaacgcgcagaagctggtcaagggccagatcgacctctgggccagcggcgatcccgccgggcgctacctggccaagcaggaaggcgtgaccggcctgaagacggtgctgcgcttcaacagcgaccagctgtacctggcgctcaaccgcgagactcccgacgaagtggtgcagaagctccaggcagccctggacggcatgcgcaaggaaggcttcgtcgaggacatcctcaacagctatctctga

SEQ ID NO: 323119 - DNA, 747 bp, Pseudomonas aeruginosa
atgtccatcttccgtctggctctcggctgcgtcggcagcctggccctgctatgcgctagcgccctggcgcgcgccgaaaccctggtcctgctgaccgagaacctggtgccgttcaacatggcggtgaacggcggcaactacgccaaggacgatggcatcagcggcatcagcaccgataccgtgcgcgccgcctgcgagcgcgcgcagatcgagtgccagctgatcctgcgcttcccctgggaccgggtctaccagcaggcgctgagcgagcccggctatggcgtgttttccaccgcccgtacgccggagcgcgaggacaagttcaagtgggtcggcccgctggcggtcaacgactgggtactgatggcccgcggcgacagcagcatccacctgaacagcctggaagacgccgcgcgctaccggatcggcggctacaagaacgacgccatcagccagcacctggtcgaccgcggcctgcaggtgcaactggcgctgcgcgacaacgagaacgtcgacaagctggccagtgggcagatcgatctctgggtcaccgccgatccgagcgggcgctacgtcgcccagcgcgagggcctcaaggaggtgaaggtggtccagcgtttccataccgccgagctgttcctggcgctgaacaaggacaccccggacgagctggtgcagaagttgcaaacggcggtcgacgcgctgcgcagcgaaggcttgttgaagcagatccgcgagcgctactga

SEQ ID NO: 323120 - DNA, 771 bp, Pseudomonas aeruginosa
atggcactggcaaaacgcatcatcccctgcctcgacgtggacaacggccgagtggtcaagggcgtcaagttcgagaacatccgcgacgccggcgacccggtcgagatcgctcgccgctacgacgagcagggtgccgacgagatcaccttcctcgatatcaccgccagcgtcgacgggcgcgacaccaccctgcataccgtcgagcgcatggctagccaggtgttcattccgctgaccgtgggcggcggcgtacgcagcgtgcaggacatccgcaacctgttgaatgccggcgcggacaaggtctcgatcaacaccgccgcggtgttcaaccccgagttcgtcggtgaggccgccgaccgcttcggctcgcagtgcatcgtggtcgccatcgacgcgaagaaggtttctgccccgggcgaggcgccgcgctgggaaatcttcacccatggcgggcgcaagcccaccgggctggatgccgtgctctgggctaagaagatggaagacttgggcgctggcgagattctcctgaccagcatggaccaggacggcgtgaagagcggttacgacctgggcgtgacccgcgccatcagcgaggcggtgaacgtgccggtgatcgcttccggcggcgtcggcaacctggagcacctggccgccggcatcctcgagggcaaggccgacgcggtgctcgcggcgagcatcttccacttcggcgagtacaccgtgccggaagccaaggcctacctggccagccgcggtatcgtggtgcgctga

SEQ ID NO: 323121 - DNA, 657 bp, Pseudomonas aeruginosa
atgctgatcattcccgcgatcgacttgaaagacggcgcctgcgtgcgtctgcgccagggcctgatggaagacgccacggtcttctccgacgatccggtggcgatggccgccaaatgggtcgatggcggtcgtcgctacccggacctgccgatccagatcggcggcggcatccgctcgctggaaaccatcgagcattacgttcgcgccggcgtcagctacgtcatcatcggcaccaaggcggtcaagcagcctgagttcgtcggcgaggcctgccgcgccttcccgggcaaggtcatcgtcggcctggatgccaaggacggtttcgtcgccaccgacggctgggccgaggtcagcgaagtccaggtgatcgacctggctcgtcgcttcgaggctgacggggtgtccgccatcgtctacacggatatttccaaggacggcatgatgcagggctgcaatgtcgaggctaccgccgcgctggccaatgccacgcggattccggtgatcgcctccggcggtatccacaatctcggcgacatccagaagctgctggacgcccgcaccccggggatcatcggcgccatcaccggccgggcgatctacgaaggcaccctggacgtggccgaagcccaggcgctgtgcgacaacttcaaggcctga

SEQ ID NO: 323122 - DNA, 261 bp, Pseudomonas aeruginosa
atggccagggcgaagagcaagacgccgatcctccagctggacgccgcgcaaacccaggacgcggtactggcgatcaagcgcttcatggaggaccgcttcgaactggagctgggttccttcgaagccgaggaactgctcgatttcttcgcccgcgagttcgccccgtacttctacaacaaggccatcctcgacgtgcagtcgtacctgaaggaacggttcgaaagcatcgagagcgatgtctgggcgctggaaaagagttga

SEQ ID NO: 323123 - DNA, 639 bp, Pseudomonas aeruginosa
atgcagacggtagccgtgatcgactacggcatgggcaacctgcactcggtggccaaggcccttgagcacgtcggtgccggccgggtgctggttagcagcgacgcggcggtgatccgcgaggccgaccgggtggtgttccccggggttggcgcgatccgcgactgcatggccgagatccgccgcctgggcttcgacgccctggtccgcgaggtcagccaggaccgcccgttcctcggcatctgcgtcggcatgcaggcattgctggagcgcagcgaggagaacgacggggtcgattgcatcggtctgttccccggccaggtgcgcttcttcggcaaggacctgcacgaagccggcgagcacctgaaggtgccgcacatgggctggaaccaggtgagccaggcggtggagcacccgttgtggcacgagattcccgaccaggcgcgcttctacttcgtgcacagctattacatcgaggccggtaacccgcgccaggtggtggggcacgggcactacggcgtcgatttcgccgccgcgctggccgaaggctcgcgtttcgccgtgcagttccacccggaaaagagccatacccacggcctgcaactgctgcagaacttcgtggcctgggacgggcgctggtag

SEQ ID NO: 323124 - DNA, 594 bp, Pseudomonas aeruginosa
atggccgaacgcaaggcatccgtcgcgcgcgacaccctggagacccagatcaaggtctccatcgacctggatgggaccggcaaggcccggttcgataccggggttcccttccttgaccacatgatggaccagatcgcccgccacggcctgatcgacctggacatcgagtgcaagggcgacctgcatatcgacgatcaccacaccgtcgaggacatcggcatcaccctcggccaggccttcgccaaggccatcggcgacaagaagggcatccgccgctacggccacgcctacgtgcccctcgacgaggcgctgtcgcgggtggtcatcgacttctccgggcggcccggcctgcagatgcacgttccctttacccgtgccagcgtcggcggcttcgacgtcgacctgttcatggaattcttccagggcttcgtcaaccacgcccaggtgaccctgcacatcgacaacctgcgcgggcacaacacccaccaccagatcgagaccgtgttcaaggccttcggccgcgcgctgcgcatggccatcgagctggacgagcggatggccgggcagatgccgtcgaccaaagggtgcctgtga

SEQ ID NO: 323125 - DNA, 399 bp, Pseudomonas aeruginosa
atgcccgtgatcgtcgaaaccctcgcccaacccagcgcccaggatcgcctggacctggcgaagatctacgccgacgcgccggactggctgttcgccccgcatgccgacggcgcggcgctggtcgcggccgggctggccgccggcgagctgatcgccgggcgcttcaacgaccgcctgctgggtgccgccctgctgcggcgcggcgacgacgcctggcagctgtcgcacctttgcgtgcgcggcatcacccgcggccgcggggtcggccgacgcctcctcgacgaggcccggcgcctggctgccgaagccggcaagccgctgcgcctggtcgccccggacgggcacctggaggcccgtgccctcgcggcacgccacgggctgccgctggacagcctctga

SEQ ID NO: 323126 - DNA, 237 bp, Pseudomonas aeruginosa
atgtccttttcctccgccgaacgcgccgccctgcttgccctcaagggggtcggcccgaccgtgctgcaacgcctggagcagatgggccttgacagcttcgtccggctgcgcgactgcgacgccgcgattatcctcgcccagggcgcggccctgaccggctccagttgctggaagaacagcccgcaggcgcgggcagcgatcgtcgccgtgctgcagcgcgcagccagcgacgcatga

SEQ ID NO: 323127 - DNA, 1107 bp, Pseudomonas aeruginosa
atgaacgacgtcgacgtactggtagtcggcgccggcgccctcggcctggcctgcgctgcgcgcctggccgaagccggccacggcgtactggtggcggagcgcgaacggctggtcggtagccacacctccagtcgcaattccgaagtgatccacgccggcctctactacccgcccggctcgctcaaggccgatctctgcctggaaggccgcgaacgcctgtacgcctggtgcgcccgccacggcgtcggccaccggcgcatcggcaagctgctggtggcggtggaagaaaacgagcgcgagaagctccaggccctggcggccaacgcacgcgcctgcggggtcgacgacctgatgccgctggacggcaccacgctgcgcgcgctggagccccaggtccgcggggtcgccgccctgctctcgccgagcacgggaatcatcgacagccacgcctacctgcaatcgctgcaggccgtcgccgaacgccacggcgcacaactggcgctggacacccgggtcgaccgcctggagcgccacgccggcggctggcgcgccgaaggacagagcgtcggcgaagcgttccggttgcgcgcgggctgggtggtcaatgccggcggcctgttcgcccaggcgctggcgcaacgcaccgaaggcctcgatccgcgcctggtgccggcgctgcacctgtgccaggggcgctatttctcctacagcggccgctcgccgttccgccacctggtctacccgatgcccgaggcgcgcaccgccgggctcggcatccacgccaccctcgacctcggcggccagttgcgcttcggtcccgacgtgaattacgtggacaacctcgactaccgcgtcgacgaatccctccgccccgccttcgcccaggccatctcgcgctacttccccggcatcgatcctcggcgcctggccgccggctacgccggcatccggcccaagctcggcgggccgggggaacccgccgccgacttcatcatccaaacccctgccgaacactgcctgcccggcctggtcaacctgttcggcatcgagtcgcccggcctcaccgccagcctggcgctcgccgaacgggtcgcccgcgcactctga

SEQ ID NO: 323128 - DNA, 2253 bp, Pseudomonas aeruginosa
atgaaagcattcggcaaggtcctggggctgttcttcctgggactcttactgctcgtcgtggccctgggcttcgccctgacccacctgttcgatcccaatgactacaaggacgaaatccgccagatcgcccgcgacaaggccaacctggagctggacctgaagggcgacatcggctggagcctgttcccctggctgggcctggaactgcacgacaccagcatcgccagcgccgccacgccgaccaagccgttcgccgacctgcagatgctcggcctgtcggtgcgggtcctgccgctgctgcgcaaggacgtgcagatgagcgcgatccgcgtcgaaggcctgagcctggacctggtccgcgacaagcagggcaagggcaactgggaaaacatcggcaagccggcccagccccaggccccggccgctccttccgccaccccgccggcagcggacggcaagggcgcccaggcgcaggcaccggagcaggcgccgcagaacgacagcccgcgcaccccgatcaagctcgacatcgacagcctcaacgtcaacaacgcccgcgtcacctataccgacgaagccagcggcaagcagtacaacgtcgagggcatcgagctgagcaccggcgccattcgcgaaggcagcagcattccgctgaagctcaacgcctacctcggcaccaaccagccggtggtacgggtcaagaccgagctgaccggcaacctgcgcttcgacaccgcgctcaggcgctaccaactggaagacgccaggctctccggcgaagcctcgggcgagccgctgcaaggcaagaccgccaccttctccgcccagggccagttgctgctcgaccagtcggcgcagatcgccgagtggaacggcctgaagctgagcgtcaaccagttgcgcgccctcggcgaactgaaggcccgcgagctggacaaggacaccaagttcagcggcggcctgtcgatcgcgccgatgaacctgcgcgagttcctcgccggcatcggtgtgaccctgccggccatggccgatgccaacaccctcggcaagttcgagctgaacacccgcctggccggcagccgcaacagcctgaatctcgaagacctcaagctgggtctggacgacactgccttcagcggccgcttcggcatcgccgatttcgccaggcaatcgctgcgcgcccagctcaagggcgacaagctcgacctcgaccgctacctgccggccaaggccaagcaagcccaggatgccgccagcgccacgcgcaaggcggaagtcgacgccaccgtggccagtgccgcccagggcaacacgccgctaccggaaaaaccgaccaggcaggcctggagcgacgcgccgctgctgcccatcgcgaccctgcgcaagctcgacctggacgtggcgctgaacttcggccggctgaccgtcgagaagctgccgatcgacgacgccagcctgaagctgcgcggccagggcggcgtgatcagcctcgacgacatgcgcggcgggctgtacaacggccgcttcaacgccaaggccaacctcgatgtacgccaggacagcgccgtgctgaccgccaccaagcacatcgccaacgtgccggtggagcgcctgctcgaagcccagggcaagaaaccgccggtgaaggggctgctcgacctcgatgccgacatccgcaccagcggcaacagcgagaaatcctggatcgaccatctcaacggcaacgcacgcttcagcctgatcaacggcgtgctgcccgacgccaacctggagcaacagctctgccagggcatcgctaccctcaaccgcaaggcccttgccggtactcacggcggcaaggacacgcctttccgcgagctcaagggcagcctgaacttcaccaacggcgtggccagcaaccctgacctgaaagtggccattcccggcctggcggtcagcggccacggcgatatcgacctgcgcgtgctgggcatggactatcgcatcggcgtggagatccagggcgacaagagcgacatgccggacccggcctgccaggtcaaccagcgctacgccggcatcgaatggccgctgctctgccgcggcccgctggaactcggcgccaaggcctgccgcctggacaaggaaggcatgggcaaggtcgccgcgaaactggccggcaatcgcctcaacgaaaaactcgaagagaagctcggcgacaaggtcagtccggagctgaaagacgcactcaaagggctgttcaaccgcaaatga

SEQ ID NO: 323129 - DNA, 1068 bp, Pseudomonas aeruginosa
atgacacctgaaggcttcaacggcgcggtcctcgactggtacgaccgtcacggtcgcaaggatctgccctggcagcagggcatcaccccctaccgggtgtgggtctcggaaatcatgctgcagcagacccaggtcagcaccgtgctcggttacttcgaccgtttcatggcagcgttgcccgacgtcgaggcactggccgcggcggccgaggacgaagtcctgcacctgtggaccgggctcggctactacagccgtgcgcgcaacctgcacaagaccgcgcagatcgtggtcgagcggcatgcgggggagttcccccgcgacgtcgagcaactcgccgaactgcccggtatcggccgctccaccgctggagccatcgccagcctgtcgatgggcctgcgcgcaccgatcctcgacggcaacgtcaagcgcgtactggcgcgctacctggcgcaggacggctatcccggcgaaccgaaggtggccagggcgctgtgggaagccgccgaacgcttcaccccgcacgcacgggtcaaccactacacccaggcgatgatggacctcggcgccaccctctgcacgcgcagcaagcccagttgcctgctttgcccgctggtctccggctgccgcgcgcacctgctcggccgcgaagccgattatccgcagcccaagccgcgcaaggcgttgccgcagaagcgcacgctgatgccgatcctggccaaccgcgacggcgccatactgctctaccggcggccttccagcggactctggggcgggctctggagcctccccgaactggacgacctcgacggcctcgaaccgctcgccgcgcgccattccctggccctcggcgagcgccgcgaactgagcggcctgacccataccttcagtcatttccagctcgccatcgagccctggctggtggcggtggaaggcgctccgcgcgccgtggccgagggcgactggctctggtataacctcgccaccccgccgcgcctgggcctcgccgctccggtgaagaagctgctcaagcgcgcagaacaggaactcggacgcggcacggccgcgtga

SEQ ID NO: 323130 - DNA, 273 bp, Pseudomonas aeruginosa
atgagccgcaccgtgatgtgccgcaagtaccacgaagagctgcccagcctcgaccgcccgccgtatccgggcgcgaagggcgaggacatctacaacaacgtgtcgcgcaaggcctgggacgagtggcagaagcaccagaccatgctgatcaacgagcgtcgcctgaacatgatgaacgccgaggaccgcaagttcctccagcaggagatggacaagttcctctccggcgaggactacgccaaggccgacggctacgtgccgccatccgcctga

SEQ ID NO: 323131 - DNA, 1083 bp, Pseudomonas aeruginosa
atgaccccatccctctctggcctgcctccgatccgcaccgcgttgatcggctacggcttcgccggcaagaccttccacgccccgctgatccgcgcggtaccggcgttgtgcctggagcacgtggtctcccgcgaccctgggcgggtgcacgccgacctgcccgaagcccgggtcagcgccgatccggatgaggccatcgaggccgccgacatcgacctggtggtcatcgcctcgcccaatgccacccacgccagcctcgccgaacgggccttgcgcgccggcaagcacgtggtggtggacaagccgttcaccgtcaccctggccgaagcccggcgcctcgccgacctcgcccgtgaacggcctgggcaggtcctctcggtgttccagaaccggcgcttcgacagcgacttcctcgccgtggaggccgccctgcaggccggcagcatcggcccggtgcgctacttcgagtcggccatcgagcgcttccgtccgcaggtccgcgaccgctggcgcgaacacgacctgcccggctccgggctgtggttcgacctcggcccgcacctgctcgaccaggcactgtgcctgttcggcataccgcagcgtgtgcacggacacctgcgccggctgcgcgagggtgcgcagaccgacgactggttcgaggtcctgctcgattatccgcactgccaggtagcgctgcgcgccagcatgctcgccgccaatccggcgccacgcttcaatgtgcacggcgaccacggcagcctgctcaaggccggcgccgacatccaggaagcgcaactgctccagggactgcaccccggttccgccggctggggccgcgatcccgacctgctgcagcacatcgatggccagggcctgcgccagtcgctggtcaccccggcaggcgaccagagccgctactaccaggcgctggccgccgccatccgcggccagtcgcgcaacccggtgtcggcgcaacaggcctgcgcgctgatggccctgctggagttggcacgacgctccgccgaggaaggccggagcctgccggtggagctgcgcgacgaggaacgccaggcctggaactga

SEQ ID NO: 323132 - DNA, 738 bp, Pseudomonas aeruginosa
atggcggagagaaagaccctgttgctgaccggggcgagccgcggtattgggcatgccacggtgaagtacttcaatgccgcgggttggcgggtgttcaccgcgtcgcggcagagctgggccagcgaatgtccctgggcggacggcgaggaaaaccacatccatctggacttggaggacattcccggcgtcgaggccagcctggaactgatccgcgagaagcttggcgacggccggctccacgcgctggtggacaatgccggcatctcgcccaagggcgaaggcggcgagcgcctcggtgtgctggaaaccgactacgccacctggctgcgggtgttcaacgtcaacctgttctccaccgcgctgctggcgcgcggcctgttcgccgagctgaaggcggcgcagggaacggtgatcaacgtgacctccatcgctggctcgaaggtgcatccgttcgctggggtggcctacgccacttccaaggcggcgttgtccgcgctgacccgcgagatggcccacgacttcggcccgcatggggtgcgggtgaacgccatcgcgccgggggagatcgacacctcgatcctgtcgccgggcaccgaggagatcgtcgagcgcagcatcccgctgcaccgcctcggccggccggaggagatcgcttcgctgatctacttcctctgcaccagcggcgcatcctacgtgaatggcgcggaaatccacgtcaacggcgggcagcacgtctag

SEQ ID NO: 323133 - DNA, 690 bp, Pseudomonas aeruginosa
atgctgaagaaaagcttcaactccctgctcaccacctggctcgccggcctgctggtgatgctgccgctggtactcaccctggccttgctggcctgggtggtcagcttgctgaaccgcttcgtcggtccatccagcctgatcggtcgcggcttcgccgccatcggccagccgctcgccggcgattcgccactggcctacctgctcggtaccgcgctactgctggtagccatctacctgcttggcctcggcgtacagctaggcctgaagcggccgctggccaacctgttcgacctgaccctgcggcgcaccccgctgatcggcaacctgtacaacctggccgaccgtttcgtcggcctgctggacaagaagcaggacgccgacatcgccgcgatgagtccggtgtggtgtttcttcggcggcgacggcgccgccgtgctggcgctgatgcccaaccccgaagcggtggaactggacggccgcgcgcactacgcgatcctggtgccgaccgcgccgatcccggtgggcggcggcctgctctacgttccggtggaatgggtgaaaccggcacagatcggcatggacaccttcaccagcatctatgtgtcgatgggcatcaccccaccgccgccgctggccgccgccaaggtgctggcggagccgcgcgcggagcagccgccggcggctccatag

SEQ ID NO: 323134 - DNA, 774 bp, Pseudomonas aeruginosa
atggccgaggccacccccgcactggaaatccgtaacctgcacaagcgctacggcgacctcgaagtgctcaagggcatctccctcaccgcccgcgacggcgacgtgatctccatcctcggatcgtccggctcgggcaaatccaccttcctgcgctgcatcaacctgctggagaacccgcaccagggccagatcctggtctccggcgaagagctgcgcctgaagaagagcaagaacggcgacctggtcgccgccgacagccagcagatcaaccggctgcgcagcgaactcggtttcgtcttccagaatttcaacctgtggccgcacatgagcatcctcgacaacgtgatcgaggcgccacgtcgcgtactgggcaagagcaaggccgaagcgatcgagatcgccgagggcctactggccaaggtcggcatcgccgacaagcgccacagctatcccgcgcaactttccggcggccagcagcaacgcgcggccatcgcccggaccctggccatgcaacccaaggtgatcctgttcgacgagcccacctcggcgctcgacccggaaatggtacaggaagtgcttaacgtgatccgtgcgctcgccgaagagggccggaccatgctgctggtcacccacgaaatgagcttcgcccgccaggtttccagcgaggtggtattcctccaccagggcctggtagaagagcagggaacgccgcaacaggttttcgaaaacccccagtcggcgcgctgcaaacagttcatgtccagccaccgctaa

SEQ ID NO: 323135 - DNA, 753 bp, Pseudomonas aeruginosa
atgaagaactataagaagatcctgctggccgccgctgcaaccctggccttcgccctcgacgccagcgccgccgacaagctgcgcatcggcaccgaaggcgcctacccgcccttcaacggcatcgatgccagcggccaggcggtcggcttcgacctcgacatcggcaaggcgctgtgcgccaagatgaagaccgagtgcgaggtggtgacctccgactgggacggcatcatcccggcgttgaacgccaagaagttcgacttcatcgtcgcgtccatgtcgatcaccgacgagcgcaagcaggcagtcgacttcaccgatccctactacaccaacaagctgcagttcgtcgcgccgaagagcgtcgacttcaagaccgacaaggactccctgaagggcaaggtgatcggcgcccagcgcgccaccatcgccggcacctggctggaagacaatatggccgacgtggtcaccatcaagctctacgacacccaggagaacgcctacctcgacctctcctcggggcgcctggacggcgtgctggccgacaagttcgtgcagtacgattggctgaagagcgacgccggcaaggagttcgagttcaagggcgaaccggtgttcgacaacgacaagatcggtatcgccgtgcgcaagggcgacccgctgcgcgagaagctcaacgccgcgctgaaggaaatcgtcgccgacggtacctacaagaagatcaacgacaagtacttccccttcagcatctattga

SEQ ID NO: 323136 - DNA, 696 bp, Pseudomonas aeruginosa
atgattctcgacctgcatgggttcggcgagcaactgctcgccgggacctggatgaccctcaagctatcgctggcggcggtctgcgtggggctgttgctcggcctcctcggcgccatcgcgaagacttcgaagtacgcggccctgcgtttcctcggcggcacctacaccaccatcgtccgtggcgtgccggaaacgctctgggtactgatgatctatttcggcacggtgagcggcctgaacgccctcggcgaccttttcggcaagccggacctggcgctctcgccgttcgccgccggcaccctggccctcggcctgtgcttcggcgcctacgccaccgaggtgttccgcggcgcgctgttgtccattccgcgcggccatcgcgaggccggccaggcgctcggcctgtcgcccggacggatcttctggcgcatcgtcctgccgcagatctggcgggtcgccctgcccggcctcggcaacctgtacctgatcctgctgaaggacaccgcgctggtgtcgctgatcaccctcgacgagatcatgcgcaaggcgcaggtcgcctccaacgcgaccaaggaacccttcaccttctacatgaccgcggccgccatctacctgagcctcacggtcgtcatcatggtcgccctgcacttcctcgaacgtcgcgccggccgtggtttcgtgaggaacgagctatga

SEQ ID NO: 323137 - DNA, 693 bp, Pseudomonas aeruginosa
atgagcgagtgggagctgatcctcaagtggatgccgaagatgctccagggcgcggcgctgaccctggagctgctggcgatcgcggtggtcgccgggctcgccctggccctgccgctgggcatcgcccgcgcctcgcggcactggtacgtgcgcgcggtgccgtacgcctacatcttcttcttccgcggcacgccgctgctgctgcaactgttcatcgtctactacggcctggcgcagttcgaggaagtgcgcaagagcgccttctggccctacctgcgcgatccgtactggtgcgcgctgctgaccatgaccctgcacaccgccgcctatatcgccgagatcctccgcggcgcgatccactcggtgccggtcggcgaggtggaggccgcccgcgccctcggcatgtcgcggcgccaggcgctctggcacatcatcctgccgcgcgcggtgcgcatcggcctgccggcctacagcaacgaagtgatcctgatgctcaaggccagcgcggtggtctacaccgtgaccctgttcgacatcatgggcatggcccggaccatcatcgcccgcacctacgaatcgatgctgttcttctgcctggccggcgcgctgtacctggtgatcaccatcgtgctgacgcggatcttccgcctgatcgaacgctggttgcgggtcgacgccacccagggccgctga

SEQ ID NO: 323138 - DNA, 1221 bp, Pseudomonas aeruginosa
gtgtccgaaaccttcccgttcctcactggcgacgccctgtcgcagcgcttcctcgcgctggacgcgttcctcctcgaacaccagcggctctggcgaccccgcccgttcagcgaaccgaccctggcgtgggaagccgaacacgccgagctggcgtcctggctgcgcgggcgcagcctcgaacaggccgacgcggagcacaaccagcccacccgcctggccgcgcccgcgccttatccgcagctcgccgcccaggccgcagcgctgggcgcggtcggcgaactgccattggcggaacgcccgcaggcaccgaaccgcttcaatgtcgacgtaccgggacgcaagtggcagcagatcggcctgttcgccgggcgcctgcagttcgccaggccggtcgtccactggctcgactggtgctccggcaagggccatctgggccgcctgctggcccatgcggggcaaccgctgacctgcctcgaacacgatcccgcgctggtcgccgacggacagcgcctgagcgaccgcctggggctctccgcccaccacctccgccaggatgtgctggccgtggactgcgccgagcgcctgcttcccgggcatacgccagtggccctgcacgcttgcggcgaactgcacctgcgcctgctgcgcctggccagccaggccggctgtcgccaactggcggtggcgccatgctgctacaaccgcattccggggcctttctaccagccgctctcgcaagcggcaggccgatcgctgctcgcgctatcgcttgacgacctgcgcctacccctgagcgagacagtcaccgccagccaacgggtccgtcgccagcgcgaccagtcgatggcccggcgcctgggtttcgacctgctgcagcgcgagctacgcggaatcgaccagtacctgagcgtgccttcccttccggtggcctggctggaacgtccatacgccgactactgtcgcgaactcgccgtcctcaagggacttcccgaaccggccgcgcgcgactggcaggcgctggaagcggccggctggaagcgcctggcgatggttcgcaacctggaactggtgcgcgccctgttccgccgcccgctggaactctggctgctgctggaccgctgcctgtatctggtcgaacagggctatagcgtccgcctgggcgagttctgtccgacctccctgtctccgcgaaacctgctgatccttgcggagcgcagctga

SEQ ID NO: 323139 - DNA, 471 bp, Pseudomonas aeruginosa
atgggtcactacagcgcctccgactttcccttcaagggctccattggccagctcatcggcgtcagtgccgcgaccaaggaccgcatcctcgagaagcacctcgccgcgctggacataaccgccgcccagttcaaggtgctgatcttcgtcggtctcaaccgtgccaacagtccggtcgaactgtgtcgcgagctgtcggtggacagcggctcgatgactcgcatgctggcgcgcctggagaaaaaagggctgctgctgcgcggccgctgtcccgaagaccgccgttgcctgcgcctggatctcagcgaagcgggacggaaggtccaggagcagcttccgctgatcgcctcggcggcgatgaacgagctggtcgcctgcctgagcacggaagaattgcagacgctgacccatctgctgaccaaggttctgctacacgccggctgcccgcgggccagcctgcaggagtcctga

SEQ ID NO: 323140 - DNA, 1479 bp, Pseudomonas aeruginosa
atgcccttccctcctctccatctctggccgcagcgattggcgctggcctcggcgatactgctggccgccggctgcgtcacttccgaaggcctggaaccgaacgcccgactgcaaccggcaggcgccctccaggcgggcaggagcctggacggcgtagccctttcgccagcggcctggccgcgccaggactggtggaccgggctcggcgaccggcagctcgaccaactgatcggcgaagccctgcaaggcacccccgacctgcagatcgccgaggcgcgtgcgcgccaggcggcggcaacggcccaggcgcaagatgccgcgcgccagccgacgctggacgccaaggccagctactccggcatccgcgcgccgaccagcgtggccccggcaccgctcggcggccgctattcggcgatcaagtacctgtcgctcggcttcaactacgacttcgacctctggggcggcgagcgcgccgcctgggaagccgccctcggccaggccaatgccgcccggatcgacagccaggccgcacgcatcggcctctcggcgagcatcgcccgcgcctacagcgacctcgcccacgcctttaccgtgcgcgatctcgccgaggaagaactgaagcgctcgcagcgcatgaccgagctgagccagaagcgcatgagcgccggactcgacagtaaggtccagctgcaacagacgcagacccagctggccaccgcccgccagcagctcagcgccgccgagcaggacatcgccagcgcccgcatcgccctcgccgtgctgctgggcaaggggcccgatcgcggtctcgaactgcagcgcccgcaaccgctgaacccggccagcctgagcctgccctcggtgctcccggcggaactgctcggccgccgcgccgacatcgttgccgcgcgctggcgggtcgaggcggcgcgccgcaacatcgactcggcgaagaccgagttctatcccaacctcaatctcggcgcgatggccggcctcgccgccctgcacaccagcgacgtgttgcaggcgccgagccgcttcttccaggtggcgccggcgatctccctgccgatcttcgacggtggccgccgccgcgccaacctggccgaacgcgacgccgactacgacctggccgtcggccagtacaacaagacgctggtccaggccctcggcgaggtcagcgacgacctcggcaagttgcgctccctggagcagcaggtgatcgaccagcgccaggcccgcgatatcgccaggtccaacttcgacctggccatgcgtcgctacggcgaaggcgtcggcagctacctcgacgccctcagcgtgcaacagcaactgctggtcgccgaacgccagctggccagcctggagagccagcagatcgatctttccgtccagctggtccaggccctgggcggcggtttccaacccgattcccgctccgctgcgctcgctaccgcgaaagcgccggcagaatga

SEQ ID NO: 323141 - DNA, 1185 bp, Pseudomonas aeruginosa
atgactaccgccaacagcgaaacccccgccggcaacccgaagcgcaagcgctggttgctgatcctgctcgccgtgatcgttctcgccaccctggccagcgtggcctgggagttcttctacggccgctggcacgaggacaccgacgacgcctacatcaacggcaacgtggtacagatcaccccgcagatcgtcggcaccgtggtcagcatcggcgccgacgacggcgacctggtgcgcaagggccaggaactggtcaggttcgatcccagcgacgccgacatcgccctccaacgcgccgaggccaacctggcccacaccgtgcgccaggtgcgcgggctgttcagcaacgtcgacggctatcgcgccgaggtcgccacccgcaaggtcgcgctggccaaggccgaggccgactacaagcggcgcaagaacctcgccgacgacggcgccatttcccaggaggaactggcccacgcccgcgacgccctggacagcgcgaaagcctcgctgaccagctcggaacagcagttgaacaccaatcgcgcgctggtcgacgacacccagatcacctcccatccggacgtcaaggccgccgccgcgcaactgcgccaggcctacctggacgacgcccgctcgaccatcgtcgcgccggtcaccggctacgtcgccaagcgcagcgtacaggtcggccagcgcgtgcaaccgggcaatgcgctgatggccgtggtcccgctggaccagatctggatcgacgccaacttcaaggaaacccagctcaagcacatgcgtatcggccagccggtggagatccgctccgacctctacggcagcgacgtgcgctacagcggcaccgtcgacagcctcggcgtgggcaccggcagcgcgttctccctgctgccggcgcagaacgccaccggcaactggatcaagatcgtccagcgggtgccggtgcgcatccatatcgatccgcaagaattgcagaagcatccgctgcgcatcggcctgtcgatggacgtcaaggtcgatctgcacgaccagagcggcccggccctggcccagcagccaccgcgcgaagcgctgttctccaccgatgtctaccagcagcaactggcctcggccgacaagctgatcgaacgcctgatcgaagccaacctcgccgaagaccacggcaagaccgcccagcgttga

SEQ ID NO: 323142 - DNA, 1530 bp, Pseudomonas aeruginosa
atgagcgaaagcagcagcttctccccgcccagcctggtgatggcgaccatcggcctgtccctggcgactttcatgcaggtgctcgacaccaccatcgccaacgtcgccctgccgaccatctccggtaacctcggggtgagttcggaacagggcacctgggtgatcacctcgttcgccgtgagcaacgccatcgccctgccgctgaccggctggctggcccggcgggtcggcgaggtgcgcctgttcatcgccgccgcgctgctgttcgtactcgcctcgttcctctgcggcatcgcccagtcgatgccttctctggtcggcttccgcgccttgcagggcttcgtcgccgggccgctgtatccgatcacccagaccctgctgatctccatctacccaccggcgaagcgcggcatggccctggccctgctcgcgatggtcacggtggtggcgccgatcgccgggccgatcctcggcggctggatcaccgacgactacagctggccgtggatcttcttcatcaacgtgccggtcggcctgttcgccgccttcgtcgtctaccagcaactgaaggcacgcccggtggtgatcaagaaggcgccgatggactacgtcggcctgatcgccctggtgatcggcgtcggcgccctgcagatcgtcctcgacaagggcaacgacctggactggttcgagtcgaacttcatcgtcggcggcgcgctgatcgcggcgatcgccctggccttcttcatcatctgggaattcaccgaccgccatccgatcgtcaacctgcgcctgttcgctcaccgcaacttcgccgccggcaccctggcgctggtgctgggctatgccgcgttcttcggcatcaacctgctgctcccgcaatggctacagacccagatgggctacaccgccacctgggccgggctggccgccgcgccaatcggcatcctcccggtgttcctctcgccgctggtcggccgctacgccaaccatttcgacctgcgcatgctcgccggcctgtcgttcctggcgatggccatcacctgcttcatgcgcgccaacttcaccaccgaggtcgactaccagcacatcgccatcgtgcagttgatcatggggctcggcgtggcgttcttcttcatgccgatcctgagcatcctgctctccgacctgccccccgaccagatcgccgacggctccggcctggccaccttcctgcgcaccctcggcggcagcttcgccgcctcgctgaccacctggatctggaaccgccgcgccacgcaacaccacgcctacctcagcgaaaacatcagcctctacgacccggccacccacgaaaccctcgcccagctcggcggcaacacccaggcgaacgcggcgctgctcgaccggatggtgcagagccaggcctacatgatgtccaccatcgactacttcaccatgctcggctggctgttcctcgccctgctggtgatcatctggctggcccgcccgccgttcggcgccaagcccggcgcggccgcctccgggcactga

SEQ ID NO: 323143 - DNA, 1059 bp, Pseudomonas aeruginosa
atgacgattctcgtgaccggcagcgccggcttcatcggcgccaatttcgtgctcgactggctggccctgcatgacgagccggtggtcagcctcgacaagctcacctacgccggcaaccggcagaacctcgccagcctcgacggcgacgcccggcacaccttcgtcgccggcgatatcggcgatagccagctggtagcccgcctgctcgccgagcaccagccgcgggcgatcctcaacttcgccgcggaatcccatgtggaccgctcgatccacggccccgaggacttcatccagaccaacatcgtcggcaccttccgcctgctggaagaagtgcgcgcctactggggcgcgctggagccggaagcgaaggcggcattccgcttcctccacgtctccaccgacgaagtctatggctcgctggcaccgagcgatccggccttcaccgagaacaaccgctacgagccgaacagtccctactcggcgtccaaggcggcctccgaccacctggtgcgggcctatcaccacacctatgggctgccggtgctgaccaccaactgctcgaacaactacggcccgtaccacttcccggaaaagctcatcccactggtgatccacaacgccctggccggcaagccgctgccgatctacggcgacggccagcagatccgcgactggctctacgtcaaggaccattgcagcgccatccgccgggtcctcgaagccgggcaactgggcgagacctacaatgtcggcggctggaacgaaaaggccaacctcgacgtggtcgagaccctctgcgccatcctcgaccaggagcagccgcgcgccgacggccgcagctatcgcgagcagatcaccttcgtcaaggatcgtccgggccatgatcgccgctacgccatcgatgccacgcgcctggagcgcgagctgggctggaagccggcggaaaccttcgagaccggcatccgcaagaccgtgcgctggtacctggacaaccaggactgggtggccaacgtaaccagcggtgcctaccgcgagtgggtgggtaagcagtacgcatga

SEQ ID NO: 323144 - DNA, 909 bp, Pseudomonas aeruginosa
atgaaccggatccttctcctcggcgccaacggccaggtcggctgggagctgcagcgcgccctggcgccgctgggcgaactgctggtctgtgaccgtcggcgcgccgatctcgccgaccccgaaggcctggcgcgattggttcgcgccgagcggccgcagttcatcgtcaacgccggtgcctacaccgcggtggacaaggccgagagcgatgccgacaacgcccgcctgatcaatgcccgcgccgtcgcggtactggccgaggaggccgcgggctgcggcgcctggctggtgcattactccacggactacgtgttcgacggcgcgggcagcgcgcctttcgccgaggacgcgccgaccggcccgctgagcgtctacgggcagaccaagctggaaggcgagcaggccatccgcgccagcggctgccgccacctgatcttccgcaccagctgggtctacgccgcgcgcggcggaaacttcgccaagaccatgctgcgcctggccgggcaacgcgacgaactcaaggtcgtggccgaccagttcggcgcgcccaccagcgccgagctgatcgccgacgtcaccgcccaggccctgcagcgcctgcgctgggatgccgagctggcagcacgggccagcggcacctaccacctggtcgccagcggcgagacgtcctggcacctctatgcgcgcttcgtcatcgaacaggcgctggagcggggctgggagttgcaggcgacgccgcagcgggtcctgccgatcgccaccgaggactacccggtgccggcgaagcgtccggccaattcgcgcctcgacaaccgcaagctgcaacaggtcttcggcctggtactgccagactggcgctaccatgccggacgcatgatccaggaactgagcgagcagggaccactatga

SEQ ID NO: 323145 - DNA, 882 bp, Pseudomonas aeruginosa
atgaaacgcaagggcatcatcctcgccggaggctcgggcacccgcctgcacccggcaacgctggccatctccaagcagttgctgccggtgtacgacaagccgatgatctactacccgctcagtaccctgatgctggcgggcatccgcgagatactgatcatctcgaccccacaggacaccccacgcttccagcagttgctgggcgacggttcaaactggggcctggacctgcaatatgccgtgcaaccgtcgccggacggcctggcccaggccttcctgatcggcgagtcgttcatcggcaacgacctcagcgcgctggtcctgggcgacaacctctattacggccacgacttccacgagttgctcggcagcgcttcgcagcgccagaccggcgccagtgtcttcgcctaccacgtgctggacccggagcgctacggcgtggtcgagttcgaccagggcggcaaggccatcagcctggaagagaagccactggagccgaagtcgaactacgcggtcaccggcctgtatttctacgaccagcaggtggtggacatcgccaggaacctgaagccttcgccgcgcggcgagctggagatcaccgacgtcaaccgcgcctatctggagcgcggccagctcagcgtggagatcatgggccgcggctacgcctggctggataccggcacccacgattcgctgctcgaggccggccagttcatcgccaccctggagaaccgccagggtctcaaggtggcctgcccggaagagatcgcctaccggcagaagtggatcgacgccgcgcaactggaaaaactcgccgcgccgctggccaagaacggctacggccaatacctcaagcgcctgctgaccgagaccgtgtactga

SEQ ID NO: 323146 - DNA, 546 bp, Pseudomonas aeruginosa
atgaaagcgacccgcctggcaattcccgacgtcatcctcttcgaaccccgggtgttcggcgacgatcgcggattcttcttcgaaagctacaaccagcgcgccttcgaggaagcctgcggtcatccggtcagcttcgtccaggacaaccattcgcgttccacccgtggcgtcctccgcggcctgcactaccagatccggcaagcccagggaaaactggtgcgcgccactctcggcgaggtattcgacgtggccgtcgacctgcgtcgcggctcgccgaccttcggccagtgggtaggcgaacgcctgagcgcggagaacaagcgccagatgtggattccggccggcttcgcgcacggcttcgtggtgctcagcgaatacgccgagttcctctacaagaccaccgacttctgggcgccggaacacgaacgctgcatcgtctggaacgatcccgagctgaagatcgactggccgctgcaggatgcccccctgctttcggagaaggaccgccagggcaaggcattcgccgacgccgactgcttcccctga

SEQ ID NO: 323147 - DNA, 1800 bp, Pseudomonas aeruginosa
ttgaaagcctatttccatcgctggcgctcgctggtcatcctcgccctgcttctcgcgccgctgctctggcccctgcaatatttcgccgagcgctactacagcgagcagttggccgagcagaaccgccagacgctcgacctctacgtcgccaacctgctcggcacgctgcgccgctacgaagaactgccgcagatcctcggcggcctgccggtgctgcgccaggccctgcaacaacctggcgacccgctgctgcagaagatcgccaacgaggcgctggccgacatccgccgacgcaccggcgccgacgtgatctacctgctgcaaccggacggcaccacccaggtcgcctccaactgggcccaggcggacagtttcgtccaccgcaacttcgccttccgcccctattatcgcgaggccatgcagggccgcctggcgcgcttcttcggcctgggcaccacctcgatcaagcgcggctactacttcgccagtgcggtgaaggaaggctcgcggatcatcggcgtgctggtggtgaaggtcgatctcgaacacatcgaacggctctggggcaattccccggagcaactgctggtgatagacaactacggcgtggtgatcctctcctcccgcgaggattggcgcttccatgccagtcggccgctgagcgcggcggagcgcgacgagatccacgccaacatcccctacccggtgcaggacccgaagcccctgcgcctgcaacagagcgcctggctcagccagagccggacgctaccggaaaccggctggacggtgagcatctacgccccccgcaccctcatcgaacggccggtgcgcagcgtcctgctgatcggcggcgcgaccctgctcgccctgctcctgctgcttaccctgctgaccctcagccgccgtcactacctggaccgcatcgctctcgaggccgaggccaagcgccagttggaagagcgcgtactggaacgcacccgcgagctggagaacgccaacgcgcagttgcagcaggaagtccacgaacgcgagcaggcccagcgcgagctgatgcgcgcccaggacgaagtggtccaggccggcaagctcacggccctcggcaccatgtcggcgagcatcagccacgaactcaaccagccgctggcggcgatccgcagctacgccgacaacgcccgggtgctgctcgaccaccagcgcaccgaggacgcccgcggcaatctcgagcagatcagcgacctcaccacccgcatggcctcgatcatcgcccacctcaaggcctatgcccgcggtgcgcgccgggcgccggagaacgtgcagctgcagccggcgatcgaggacgccctgtcgatgctcgccagtcggcggcgggcgatgaacgtcgaactgctgcgcgacgtgccggacgccccgctgtgggtccaggccggcgagacccgcttgcggcagatcctcggcaacctgctcaccaatgccctcgacgcgctcgccgagaaagctccgccacggcgcctatgggtgatcgccagccaggaccagcacggcgtgatcctgaccctgcgcgacaacggcccggggttttccgaggacgccctggcccacgcccacgaacccttcttcaccaccaagaccaccgccaaagggctcggcctcggcctggccatctgcgataacctattgcgcgccctcggcggccgcctggaaatgggcaaccatctcgaaggcggcgccgtggtgcgcctgcacttgctgccgggagttcccggcgtcgccgccatgccccaggaggaaacccgcgcatga

SEQ ID NO: 323148 - DNA, 1389 bp, Pseudomonas aeruginosa
atgagtcccttcgcgccattcgatgcccagacccaggtcctgctgatcgacgacgatccgcacctgcgccaggccctgcgccagacgctcgacctcgccgggctcaaggtcgcgaccctggacgacgcgcgccagctggataccgcgcagtgcaaggactggcccggggtggtggtcagcgacatccgcatgcccggcatcgatggcatggaactgctccgccaattgcacgaacaggacgccgacctgccggtgatcctgatcaccggccacggcgacgtgccgctggcggtccaggccatgcgcggcggcgcctatgacttcctggaaaagcccttccccagcgacgccctgctcgacagcgtgcgccgcgccctggaggtgcgccggctggtcctggagaaccgcaccctgcgcctggccctggccgaacgccacgagctgcatgggcgcctgatcggacgctcggccggcatgcagcgcctgcgcgagcaggtcggctcgctggcggcgatccaggccgacgtgctggtccttggcgaaaccggcgccggcaaggaggtggtcgcgcgggccctgcatgacctgtcgagccgacgcgacggaccgttcgtcgcgatcaacgccggcgccctcgccgaatcggtggtggaaagcgaactgttcggtcacgaggccggcgccttcaccggcgcgcagaagcgccgcatcggcaagttcgagtacgccaatggcggcaccctgttcctcgacgagatcgagagcatgagcctggacgtgcaggtcaagctgttgcgcctgctgcaggaacgggtagtcgagcggctcggctccaaccagttgatcccgctggatatccgcatcatcgcggcaaccaaggaagacctgcgccaggccgccgaccagggccgcttccgcgccgacctctattaccgcctcaacgtcgccagcctgcgcattccaccgctgcgcgagcgcggcgaagacatcccgctgctgttccgccatttcgccgaagccggcgccatgcgtcatggcctgacgccacgcgaactggacgccggccagtcggcgcggctgctggcctacgactggccgggcaacgtgcgcgaattgcagaacgccgccgagcgcttcgccctgggtctcggcctgagcctggacgacggagtcctgcccgacgccgccgacgagccgcacaacctcagcgccaaggtcgaggccttcgagcgctcgctgatcgctgccgaactggaacgcccgcacaattcgctgcgcagcgtcgccgaggccctcggtatcccgcgcaagaccctgcacgacaagctgcgcaagcacggcctgccgttcaacacgcctggcgaaaatccgccagatgatggcgaatga

SEQ ID NO: 323149 - DNA, 489 bp, Pseudomonas aeruginosa
atgaacggtcagcggtacagggaaacacccctcgacatcgagcgtctgcggcgcctgaatcgcgccacggtggagcgctacatggcaatgaagggggccgaacggttacagcggcacagcctgttcgtcgaggacggctgcgccggcaactggaccacggaaagcggcgaacccctggttttccggggccatgagagcctcaggcggctcgccgagtggctcgagcgctgcttccccgactgggagtggcacaacgtgcggatcttcgagaccgaggatccgaaccacttctgggtcgagtgcgacgggcgcggcaaggcgctggtcccggggtatccgcagggctattgcgagaaccactacatccattccttcgaactcgagaacggccggataaaacgtaatcgcgagttcatgaacccgatacagaaactgcgtgcattgggaatagccgttccgcaaataaaacgtgacggtattcccacttga

SEQ ID NO: 323150 - DNA, 1005 bp, Pseudomonas aeruginosa
atgaataattcgaatcttgctgctgcgcgtaatttgatacaagttgttaccggggaatggaagtcccgttgcgtctacgtcgctacgcgcctcgggctggccgatctgatcgagagcgggatcgacagcgacgagacgctggccgccgcggtcggttccgatgccgagcgcatccatcgactgatgcgcctgctggtggccttcgagatcttccagggcgatacccgcgacggctacgccaatacccccaccagccacctgctgagggatgtcgagggctccttccgcgacatggtgctgttctacggcgaagagttccacgccgcctggacgcccgcctgcgaggcgctgctcagcggtaccccaggcttcgagctggcgttcggcgaagacttctacagctacctgaagcgctgcccggatgccggccggcgcttcctgctggcgatgaaggcgagcaacctggccttccacgagatccccaggctcctggatttccgcgggcgtagcttcgtcgacgtcggtggcggttccggcgaattgaccaaggccatcctgcaggccgagcccagcgcccggggcgtgatgctcgaccgcgagggttccctcggcgtggcccgcgacaacctctccagcctgttggcaggggagcgcgtcagcctggtgggcggcgacatgctgcaagaggtgccgtccaacggcgatatctacctgctgtcgcggatcatcggcgatctggacgaagccgccagcctgcggttgctcggcaattgccgcgaggcgatggccggcgacggccgggtggtggtgatcgagcggaccatctcggccagcgagccgtcgccgatgtcggtgctctgggacgtgcacctgttcatggcctgcgctggccgtcaccgcaccaccgaggaggtggtcgacctgctcgggcgcggcggcttcgcggtggagcggatcgtcgacctgccgatggaaacccgcatgatcgtcgctgccagggcctga

SEQ ID NO: 323151 - DNA, 1464 bp, Pseudomonas aeruginosa
atgaagcgctcctacccgaacctttcgcgcctggcgctggccctggcggtcggcaccggcctggccgcctgcagcgtcggccccgactaccagcgtccgcagtcgccgccgccacgcgtcgccagcgagcacctcggcgagttctccggcgagcggcgggaagcgccctggtggagtttcttcgacgatccgcaactggtgcgcctggtcgaccaggcgctggcgcgcaaccacgacatccgcgaggcccgcgccaacctgcgcagcgcccgcgcgctgttcgacgaccgctggctcgaccagttgccgcaggtcaccagccaggccggctacagccgcagcatcgaacaacagctggactacgacggcgagccgcgccggcgcctggcggagagctaccgcgccggcttcgacgcgcagtgggaaatcgacctgttcggccgcctcggccgactttccgacgccgccctggcccgcgccgaagcggccgacgccgacctccggctggtacgcctgagcatcgccgccgacaccgcccgcgcctacttcgagatccagggctaccagcgccggctggacgtggcgcgcgcccaggtgcgcagttggcgcgacaccctggagctgacccgcagcagcctgcaactgggcagcggcctgccggaggacgtggagaacgcccaggccaacctgctgcgcagcgaagcggcgattccgccactgacgaccgcgctggagagcgcccgctatcgcctcgacgtgctgcgcggcgaggcacccggcagcggcgcgccgatcctcgacggcggcgccgccgcgccattggcgaagaacctgccgctgggcgacgtcgaccgcctgatcctccagcgccccgacgtagtcagcgccgagcggcaactggcagcgagcactgaagacgtcggcgcggccaccgccgaactctatccgcgcctcgacctgggcggcttcatcggtttcttcgccctgcgcagcggcgacctcggcagcgcctcgcgcgccttcgaactggcgcccagcgtcagttggccggcgttccgcctgggcaacgtgcgggcgcgcctgcgcgccgtcgaggcgcagtccgacgccgcgctggcgcgctaccagcgctccctgctgctggcccaggaggacgtcggcaacgcgctcaaccaactggccgaacaccagcgtcggctggtcgccctgttccagtccgcgacccatggcgcgaacgccctggagatcgccaacgaacgctaccgcgccggcgccggcagctacctggcggtgctggagaaccagcgcgcgctgtaccagatccgcgaggaactggcgcaggcggagaccgcctcgttcgtcaacgtcatcgcgctctacaaggcgctcggctggggcagcggcgacctggcgccgggcgccggccaactggccgccggcgaaaccgccggggccaaccgttga

SEQ ID NO: 323152 - DNA, 3090 bp, Pseudomonas aeruginosa
atgacctttaccgacctgttcgtccgccggccggtgctggcgctggtggtcagcacgctgatcctgctgctcggcctgttctccctgggcaagctgccgatccgccagtacccgctgctggaaagctcgaccatcaccgtcaccaccgagtaccccggcgcctccgccgatctcatgcaaggcttcgtcacccagccgatcgcccaggcggtgtcgtcggtggagggcatcgactacctttcctcgacctcggtgcaggggcgtagcgtggtgaccatccgcatgctgctcaaccgcgattcgacccaggcgatgaccgagaccatggccaaggtcaactcggtgcgctacaagctgcccgagcgtgcctacgactcggtgatcgaacgctcttccggcgagaccaccgcggtagcctacgtcggcttttccagcaagaccctgccgatcccggcgttgaccgactacctgtcgcgggtggtcgagccgatgttctcttccatcgacggcgtggccaaggtccagacctttggcggccagcgcctggccatgcgcctctggctcgacgccgaccgcctcgccgggcgcggcctgaccgcctccgacgtggccgaggcgatccgccgcaacaactaccaggcggcgccggggatggtgaaggggcagtacgtgctgtccaacgtgcgggtcaacaccgacctgaccaacgtcgacgacttccgcgagatggtcatccgcaacgatggcaacggcctggtgcgcctgcgcgacgtcggtaccgtcgaactgggcgccgcggccaccgagaccagcgcactgatggacggcgacccggcggtgcacctggggttgttcccgacgcccaccggcaacccgctggtgatcgtcgacggcatccgcaagctgctgccggagatccagaagaccctgccgccggatgtccgcgtcgacctcgcctacgagacttcgcgcttcatccaggcctccatcgacgaggtggtgcggaccctggtggaagcgctgctgatcgtggtgctggtgatctacctctgcctcggctcgctgcgcagcgtgctgatcccggtggcgaccattcccctgtcgatgctcggcgccgccgcgctgatgctggccttcggcttcagcgtcaacctgctgaccctgctggcgatggtgctggccatcgggctggtggtggacgacgccatcgtggtggtggagaacgtccaccgccacatcgaggaaggcaagtcgccggtggcggcggcgctgatcggcgcccgcgaagtggccggcccggtgatcgccatgaccatcaccctggccgccgtgtacacccccatcggcctgatgggcggcctcaccggcgcgctgttccgcgagttcgccctgaccctggcgggcgcggtgatcgtgtccggggtggtggcgctgaccctgtcgccggtgatgagttcgctgctgctccaggcgcaccagaacgaggggcgcatgggccgcgccgccgagtggttcttcggcggcctgacgcggcgctacgggcaggtcctggagttctccctgggccaccgctggctgaccggcggcctggcattgctggtgtgcatcagcctgccgctgctgtattcgatgcccaagcgcgaactggcgccgaccgaggaccaggccgcggtgctcaccgcgatcaaggcgccgcagcacgccaacctcgactatgtcgaactgttcgcgcgcaagctcgaccaggtctacaccagcatcccggaaaccgtcagcacctggatcatcaacggcaccgacggaccggcggcgagcttcggcgggatcaacctggcggcctgggaaaaacgcgagcgcgacgcctcggcgatccagtccgagctgcaaggcaaggtcggcgatgtcgagggcagcagcatcttcgccttccagttggccgccctgcccggctccaccggcggcctgccggtgcagatggtgctgcgcagcccgcaggactacccggtgctctaccggaccatggaagagatcaagcagaaggcccgacagagcgggctgttcgtggtggtcgacagcgacctcgactacaacaacccggtggtccaggtccgcatcgaccgcgccaaggccaacagcctgggcatccgcatgcaggacatcggcgagtcgctggcggtgctggtgggcgagaactacgtcaaccgcttcggcatggagggccgctcctacgacgtgatcccacagagcctgcgcgaccagcgtttcactccgcaagcgctggcacgacagttcgtgcgcacccaggacggcaacctggtgccgctgtcgacggtggtccgggtggcgcttcaggtcgaaccgaacaagctgatccagttcgaccagcagaacgccgcgaccctccaggcgatccccgcgcccggcgtctccatgggccaggcggtggccttcctcgacgacgtggcgcgcggcctgccggccggcttcagccacgactggcaatccgactcgcggcaatacacccaggaaggcaacaccctggtgttcgccttcctcgccgccctggtggtgatctacctggtgctcgccgcgcagtacgagagcctggccgacccgctgatcatcctgatcaccgtgccgctgtcgatctgcggcgcgctgctgccgctggcgctgggctacgcgacgatgaacatctatacgcagatcggcctggtcaccctgatcggcctgatcagcaagcacggcatcctcatggtcgagttcgccaacgaactgcaactccacgagcgcctcgaccgccgcgcggcgatcctgcgcgccgcgcagatccgcctgcggccggtgctgatgaccaccgcggcaatggtcttcggcctggtgccgctgctcttcgccagcggcgccggcgccgccagccgcttcggcctgggcgtggtgatcgtctccgggatgctggtcggcaccctcttcaccctgttcgtgctgcccaccgtctataccctgctggcgcgcaaccacgcggaagtcgacaagagcccgcgcagccggcaactggccgaggccgatctgctggtgaacaaggcatga

SEQ ID NO: 323153 - DNA, 1113 bp, Pseudomonas aeruginosa
atgcagaaacccgtcctgatcgccagtgccgcgctcatctgcgcggcggttatcggcatcgccgtctacgccaccggctcggcgaagaaagacgccggcggtttcgccggctacccgccggtaaaggtcgccctcgcctcggtggagcggcgggtggtgccgcgcgtcttcgatggcgtcggcgagctggaggccggtcgccaggtccaggtggccgccgaagcggcaggacggatcacccgcatcgccttcgaatcgggccagcaggtgcagcaagggcagttgctggtgcaactcaacgacgcggtggaacaggccgagctgatccgtctcaaggcgcagttgcgcaatgccgagatcctccatgcccgtgcgcgcaagctggtagagcgcaacgtcgcctcgcaggaacagctggacaacgccgtcgccgcccgcgacatggcgctcggcgcggtgcgccagacccaggcgctgatcgaccagaaggcgatccgcgcgcccttctccggccagctcggcatccgccgcgtgcacctcggccagtacctcggcgtcgccgagccggtggccagcctggtggatgcgcggaccctgaaaagcaatttctccctggacgaaagcaccagtcccgagctgaagctcggccagcccctcgaggtcctggtcgacgcctatccggggcgcagcttcccggcgcgcatcagcgccatcgacccgctgatcggcaagtcgcgcacggtgcaggtccaggccttgctggacaaccccgaaggcctgctcgccgccggcatgttcgccagcatccgggtctcgcgcaaagccgacgcgccgtcgctgagcgtgccggaaaccgcagtcacctacaccgcctacggcgacaccgtgttcgtcgcccaccaggacggcgaccggccgctcagcgccaagcgcgtctcggtgcggatcggcgagcgctgggacggtcgcgtggaaatcctccagggcctcgccgagggcgaccgggtagtgacttccggacagatcaacctgagcgacgggatggccgtggaaccggtcaaggaagacaccctgagcagcgccgcgccccccgtgccggtcgcaggccgctga

SEQ ID NO: 323154 - DNA, 447 bp, Pseudomonas aeruginosa
atgcagcgcttcatcgataactcgctcgaaagcaactggctctggctgaccgcccggatctgcctggccctgatgttcgtcgcctcgggactggcgaagctgttcgactatcaggccagcctggaggaaatgcgcgccgccggcctggagccggcctggctgttcaacatcgccaccgccgtgaccctgctggccggctccgcgctggtcctgctggaccgcaagctatggctcggcgccggggcgctggcggtgttcctgctgctgaccatcctcatcgtccacaccttctggagcaagaccggcgtcgaagccaagctggcgatgttcttcgccctcgaacacatcgcggtgatcggcggcctgatcgccacggccatcgccagcgcgcaacgccagcggctgcgccaggacgtctccgtggccgccacctaccagaaggcctga

SEQ ID NO: 323155 - DNA, 1167 bp, Pseudomonas aeruginosa
atgagaagactgcccaccctctgcctgctggccctcgcgccgctcaccggcgtggcgccccaggcccaggccgccagcctctacaacctgctggtggggacctataccgaaggctccagcgaaggcatccaggtataccgcttcgacggcgccgacggctcggtgaaaggcccgctgcgcgtggcccataccagcaacccctcgtacctgaccttcgccccggaccaacgcactctgttcgtggtcaacgagaacggacggggcggcaagggcgataccgtcggtcgcgccacgtcctaccgtttcgatccgatcagcggccgcctgcaacagatcagccaggtccagaccctcggcgatcatccgacctacagcagcctcagccacgacggtcgctacctgttcgtcgccaactactcggtacagccggaaggctcggtggcggtactgccggtgcgcgcggacggctcgctggcgccggtggtgcaggtggagtcgcaccaggccagcaaggtgcatccgcgccaggtttccggtcatgtgcactcggtggtgtcctcgcccgacggccagtacctgttcgcccccgacctcggcgccgacaaggtattcgtctaccgctacgccccggaacaggccgaacgtccgctgcaggcggccgatccggcattcgtcccgaccccgcccggcagcggcccgcgccatctgatcttcagcgccgacgggcgtttcgcctacctgaccctggaactgagcggccaggtgatggtgttcgcccatgagggcaatggccgcctgcgtcagttgcagacccacgacctggcgcctgccggcttccagggcaaagtcggcgccggcgccctgcacctgtccgccgacggccgcttcctcggcgtgctcaatcgcggcgacgacaaccaactggtgaccttcgccgtcgacccggccagcggccagttgcgtttcgtcgaacggcgctcggtggaaggcaccgagccgcgcgaattcgccttctcgcccggcgggcgcttcgtcctcgtggccaaccagaacagcgaccagttgcgggtgttcgcccgcgatccgcagagcggccaggtgggcaagacgctgcaaagcgtcgaggtggggtcgccgagcgatctgcgcttcgtggcggtgccgtga

SEQ ID NO: 323156 - DNA, 855 bp, Pseudomonas aeruginosa
atggacctttcctccctcgaaatcttccgcgcggtcgcccacgaggccagcgtcacccgcgccgctcagcagttgcagcgagcgcagtcgaacgtcaccacgcggatccgccagctcgaggaggacctgggcgtcgaactgttcctgcgcgacggcaagcgcatgagcctgaccgaacgcggcagcgaattcctcgcctacgccgagcagttgctggctctcgccgacgaggcgcgtcagtcgatgcatcccgccgagcccggcgggcgcctgcgcctgggcagcatggaaagcaccgcggccagccgcctgccggcgctgctggcgagctatcacaaggcctgtccgcgggtcgccctggaagtctccaccggcaccagtcgcgcgttgttcgatggggtgcgggcgcggcgcctggactgcgcgctggtggccgccggcccgggctgggccggcgaactcgatggcagcggcctgcgcggcgagccgctgttccgcgaggaactgctgatgatcctgccggccgaacacccgccggtccacgacgtcgccgaggtgcgcctgcgcaccctggccggcttcgcccgtggctgcacctaccggcaactggccgaggacagcctgggcacgccgctgacggtgcaggaagtcggctcctaccatgcgatcctcgcctgcgtcgccgccggcgcctgtgtcggcgtgctgccgcgctcggtgctgcaactgctcggcacgccgccgctgcgcagcctgccccttgccgaagtagacacctggctggtctggcgcgaaggctacgcgaccgccgccttcgaacgctggcgcggcgtgctgggccaggccggcgactga

SEQ ID NO: 323157 - DNA, 1056 bp, Pseudomonas aeruginosa
atgactgaccgcttcacgcgcctgctcggcatccagcagccgatcatccaggcacccatgctcggcgtctccacgccggcgctggccgccgccgtatccaacgccggcgggctcggttcgatcgccatcaccggtagcgccgccgagaagggccgggcgctgatccgcgaggtgcgcgggctgaccgacaagccgttcaacgtcaacctgttctgccaccgcccggggcaggccgacccggcccgcgagcgcgcctggctggactacctgaagccgctgttcgccgagttcggcgccgagccgccggcgcgcctgaacaacatctacctgagtttcctcgaagacccgaccctgctgccgatgctgctggaagagcggccggcggcggtcagcttccatttcggcgcgccgccccgcgaccaggttcgcgcgttgcaggcggcgggcatccgcgtactggtctgtgccaccacgccggaggaagcagccctggtggaggccgccggcgccgatgcggtggtcgcccagggcatcgaggccggtggccatcgcggggtgttcgagccggagcgcggcgacgccgccatcggcaccctggcgctggtccgcctgctggcggcgcgcggttcgctaccggtggtggctgccggcgggatcatggacggacggggcatccgcgccgccctggagctgggcgcgagcgccgtgcagatgggcaccgccttcgtcctctgtccggagtcctcggccaacgccgcctaccgcgaggcgctgaaggggccgcgcgcggcgcgcaccgcgctgaccgtgaccatgtccgggcgcagcgcccgcggcctgcccaaccggatgttcttcgatgccgccgcgcctggagtgccgcccttgccggactatccgttcgtctacgacgcgaccaaagcgttgcagaccgccgctctggctcgcggcaaccatgatttcgccgcccagtgggccggccagggcgcggcgctggcgcgggagctgccggccgccgaactgctgcgcacgctggtcgaggaactgcgcggctga

SEQ ID NO: 323158 - DNA, 1041 bp, Pseudomonas aeruginosa
atgggacaggacaagttgaaggtcgccgttctcttcggcggcagcagtgaggaacgggacgtctccatcgccagcggcgcgcaggtgatccaggcgttgcgcagcgccggccaccaggtgctggcggtggataccgccagcggcctgctcggcgcggaggaagagcgccgcctgctggcgagcaaggtcaaggaggtcccgccggactccgactcgctggcgatcatccgcagcggcaagcagagcctgctgagcgccggcgaactggctggggtcgacgtgttcttcctcgccctgcacggcggcaccggcgaggacggcaccctgcaggcgctgctggatgccggtggtttcgcctataccggcagcggccacctggccagcgccatggcgatggacaaggacgtggccaagcgcctgttcctcgccgccggggtggagaccgccagttggctgatggcgccggcctcggaagaggcggtgcgcgagcaactgggcttccccctggtggtcaagccgaacagccagggctccaccgtggggctgtccatcgtgcattcccaggccgaattgcagccggccatcgagctggccgggcgctatggcgacgaggtgatgctggagcgcttcgtcgccggccgcgaggtcaccgtcggggtgctcgacgaccaggcgctgccggtgggcgagattctcctcggcggccaggaggtcttcgactacgagcacaagtaccaggccggcgcggtgcgcgaggtgtttcccgccgacctgccgccggcgatcgccgccgaggcccagcgtctggcgctgaaggtacaccgggcgctgaagctgagcggctacagccgcaccgacttccgcctcgacgaacagggccggctctggtgcctggaggtcaataccctgccgggcatgaccgccaccagcctgctgccgcaggccgcggcggcggccgggatcggtttcgccgaactctgcgagcggatctgccggctcggcatcgagcgctgcaagggcgcgcgcaaggcgcgttcctga

SEQ ID NO: 323159 - DNA, 867 bp, Pseudomonas aeruginosa
atgcgaaccctcaccaccctcctcggcaacagccagaaactcgacggcggcgccatgttcggcaatgccccgcgcgcgctctggtcacgctggatgcagcccgatgcggagaaccgcatcgacctcggctgccgtgccctgctggtacgcgacggcgagcgcaacgtactggtggagaccggcatcggcgcgttcttcccgcccgccctgcgccagcgctacggcgtccaggaagagcgccacgtactgctcgacagcctcgccgcggtcggcctggacgacgccgacatcgacgtggtgctgctcacccacctgcacttcgaccacgccggcggcctgctcgccgcctgggaagaaggccagccggcgcgcctgctgttccccaacgcgcatttcgtcagcggccgccgccactggcagcgcgcgcgccagccgcacccgcgcgaccgagcctcgttcgtgccggaactgctcgacctgctgcaggccagcggacgcctggagctgctcgacgacggcgagcgctcggcgcatctgggcgagggctggcgtttccatttcagcgaaggccataccccgggccagatgctcccggagatcgccatgcccgacggcccggtggtattcagcggcgacctgatccccggcgcaccctgggtacacctaccgctgaccatgggctacgaccgcttcccggaaggcctgatcgaggaaaaggaacgcctgctggacagcctcatcgcccgcaacggccgactggtcttcacccatgatccgtgcgtcgccatgggccgggtgcgacgcgacgaacaggagcgctacagcctctacgacaccctcgagcgggtcgagaacctcgaggcctga

SEQ ID NO: 323160 - DNA, 1782 bp, Pseudomonas aeruginosa
atgcctgaatacaacgccccgctgcgcgacatgcgcttcctgctcaacgacgtgttcgacgcccccgccctgtggcagcgcctgccgcgactggccgagcggatcgacgccgacaccgccgacgccatcctcgaggaagcggccaaggtcaccggcggcctgctcgcgccgctcaaccgcagtggcgacgaagaaggcgcgcagtggcaggacggcgccgtgcgcaccccggccggcttccgcgaggcctacgcgacctacgccgagggcggctgggtcggcctcaccggcaatccggcccatggcggcatgggcatgccgaagatgctggcagtgcagttcgaggagatgatgtacgcggccaacgccagcttcagcctctactcgaccctttccgccggcgcctgcctggccctcgatgcgcacggcagcgaggagctgaagaacaggtacctgccgaacatgtacgccggcacctgggccggctccatgtgcctgaccgaaccgcacgccggcaccgacctgggcatcatccgcaccaaggccgagccgcaggccgacggttcatacaggatcagcgggacgaagatcttcatcaccggcggcgagcaggacctcaccgagaacatcatccacctggtgctggccaagctgcccgacgcgccggccggttcgcgcggcatctcgctgttcctggtgccgaagttcctggtcggcgacgacggcgcgctcggcgcacgcaacgcggtgcactgcggctccatcgagcacaagatggggatcaaggcctcggccacctgcgtgatgaacttcgacggcgccagtggctggctggtcggcgaagtcaacaagggcctggcggcgatgttcaccatgatgaactacgagcgcctgtccatcggcatccagggcatcggctgcgccgagatgtcctaccagagcgccgtcgcctacgcccgcgagcgcctgcaaagccgcgcgccgaccggcccggtggccagggacaaggccgccgacccgatcatcgtgcaccccgacgtgcgccgcatgctgctcaccatgaaggcgctgaccgagggcggccgcgccttttccacctatgtcgggcagcagctcgacctggccaagtacgccgaggaccaggaagaacgcagccaggccgaagccctggtggccctgttgaccccggtggccaaggccttcttcaccgataccggcctggagagctgcgtgctcggccagcaggtgttcggcggccacggctacatccgcgaatggggccaggagcaactggtgcgcgacgtacgcatcgcgcagatctacgaaggcaccaacggcatccaggcgctcgacctgatgggccgcaaggtggtcgccaacggcgggctgttcctctccatcttcagccgcgaggtgcgagccttcgccgccggcgccaacgccgaactggcggagttcgtcaccccgctgctgaccgccctggacctgctggacaacctcacccagggcatcgtcgcccgcgccggcaacgacccgcgcgagatcggcgcagcctcggtggaatacctgcatctgttcggctataccgcctacgcctacctctgggcgcgcatggccgccgccgcgctgcgccagcgcgaggccgacccggcgttccacgacggcaagctggccaccgcgcgcttctacttcgcccgcatcctgccccgcgtgcactccctcgccgccgccgtcgaagccggcagcgaaagcctgtacggcctggaggcggaacagttctga

SEQ ID NO: 323161 - DNA, 1623 bp, Pseudomonas aeruginosa
atgtcgatcttcgaacagggtctcgcgcccgccgccgtcaaccacatcgccctgacgccgctgagcttcatcgagcgcaccgccagcgtctatccgcactaccccgcggtgatccacggcaacatccgccgcgactgggcgcagacctaccaacgctgccgacgcctggcctcggccctggccgggcgcggcatcggccagggcgacacggtggcggtgatgctgccgaacatccccgagatgctcgaggcgcactatggcgtgccgatgatcggcgcggtgctgaacaccctcaacgtacgcctcgacgccgaagccatcgccttcatgctgcaacacggcgaagccaaggtgctgatcaccgactacgaattccacgaggtgatccatgccgccatcggtatgctcgaccacccgccgctggtggtcgacgtcaacgaccccgagtatggcgaaggccgcccggttggcgaactggactacgaggcgctgctcgccgagggcgacccgcagttcgcctgggaatggccccgggacgagtggcaggcgatctcgctgaactacacctcgggcaccaccggcaaccccaagggcgtggtctaccatcaccgcggcgcctacctgaacgcgctgggcaaccagatgacctggtccatgggccagcacccggtgtacctctggaccctgccgatgttccactgcaacggctggtgctatccgtggacggtgaccgcgctggccggcgtccacgtctgcctgcggcgggtcgatccgcaaaaggtcctcaccctgatccgcgagcaccaggtcagccacctgtgcggcgcgcccatcgtgctcaacgccctgatcaacatgcccgactcggccaaggccgccatcgaccacccggtgcatgccatggtcgccggcgccgcgccaccggccaaggtgatcggcgcggtggaagagatgggcatccgcgtcacccatgtctacggcctcaccgaggtctacggcccggtcacggtctgcgcctggcacggcgagtgggacgacctgccgctggagcgacgcgccgcgatcaagtcgcgccagggcgtgcgctacccgaccctcgaaggggtgatggtggccgacccgaagaccctcgagccggtgccgcgcgacggccagtccatcggcgagatattcatgcgcggcaataccgtgatgaagggctacctgaagaatcccagcgccaccgaggaagccttcgccggcggctggttccataccggcgacctggcggtctgccatccggacggctacatcgagatccgcgaccggctcaaggacatcatcatctccggcggcgaaaacatctccaccatcgaactggagggcgtgctctaccgccacccggcggtgctggaggcggcggtggtggcgcggcccgacgaaaagtggggggaaacgccctgtgcgttcattaccctgaagagcgatcatcaggggctcgccgagagcgagatcgtcgcgttctgtcgcgaacacctggccgcgttcaagattccgcgtaccgtggtgttctcggaactgccgaagacctccaccggcaagatccagaaatacgtgctgcgcgagtgggccgccgccctctga

SEQ ID NO: 323162 - DNA, 2277 bp, Pseudomonas aeruginosa
atgagtccgcttcccgcttcgcctgcactcaacagcctcctgcgcctgctgcgcgagggcgcgccgctggtcgagcgggtcggtgcgctgcgccgcttgctgctcgaacatccgggcacgcgccaggcctggtacctggcctggcagccgcaggcgcagacctataccccggtgccgccgtcgccggcgctgccgccgggcgccggcgagccgaaccgggccagcgacctggcgttgcgcgagcggctggtgcgcgacggccggctggctctggacgaattgcggcgttccgcctcctggctcggcgcgcgcttgcggcgtgccggcgtggagcatggcatggccttcgccctcgacctgcaggccggcgacgaaggcctgctgctggtggccagcgatacgccgcagagcgctgcgctggactggctcggcctgctcctcgcaccgttgctcgccgccgcccgtggcgtcacccgcgctgcgccgttcctcgcggccgacccgcagccggcgctgctgctcgacggcgaggcgcaggcggtggaattcaaccaggccttccttgccttgcttggcgagcggccgcgcgaggcctggcgcgcttacctcccggccaaccatgggcaactggtgcgcgccagcctggggcaggcgcgggccctcggcgaggtggaggcggagtgcgacggacgcatcctgctctggcagttcattcccgacagcgccgaggcccgggtgctggcgcgctgccgcgacgcaaccgccagcctgcgcggcgagcgcgaggcggcgcgggccagccggctgtaccggctgatcaccgagaacaccaccgacctgatttcccggcataccctcgacggcattttcctcgacgcctcgccggcttcctggaccctgctcggctactggccggaggaactgcgcgggcgtccggcgcaggcgttgttccacccccaggaccgcggccaggtggcgctgcgcgcgcgcgaagcgctggagcaggacggctacctgaccatcacctaccgtatccgccaccgcgacggccgctaccgctggttcgagaccgccagccgggcgatccgcgagacctacaccggggcggtggtggaggtggtcagcgtgtcccgcgatgtcacccggcgggtcgaggcggaggagaaccgccggcgcctggccgaagtggtcgaggcgaacaccgacctggtgctgttcgtcgagcatggcggccgcgtcacctacctcaatccttcggcacgtgccgccctcggcatcgccgacgggcaggaggcgccggcgctggaacgcctgctggccggcgacactccggcgcggctggccgaagagggttggcgacaggcgcgcgatggcggcgtttggagccgcgaggggcgcctgcaaccgcaggacggacgtccgtcgctgccagtctcgctggtgttgctggcccatcgcggccgcggcgaggagcgctattactcgctggtggcccgcgacatgaccgaacgcgaactgcgcgaggcccagcagcgccgtcaccaggacgaactggcgcacactgcgcggctggtcactctcggcgaactggcctcgggcatcgcccacgagatcaaccagccgctggcggcggtgatgaactacgccagcgccagccagcgttacctggccgtcctcggcagccagcccgaggccgccgggcgggtggccgaggggctggcgcggatcggcgagcacgccggccacgcggcggaggtgatcaagcgcctgcgcgccttcctgcgcaagggccagcggcgcctgcaggcgctcgacctcaaccaggtggcacgcgaggccatcggcctctgcgcgtgggaagccgggcactggcaagtggcggtggaagaggcgatgaccgacaatccgccgccgctgtatgccgaccgcgtgctgctcgaacaggtgttcctcaatctgctgcgcaacgccatcgaagccaaccgcgaggcgcatcccggctcgccgtcgcgggtcgtcatcggtagccgcgtcgagcccggcgggctgctctgcctgtgggttcgcgaccagggaccgggagtgccggcggatcagctggaacacattttcacgccgttccacaccagcaagccggaagggctgggcctgggcctgtcgatgagccgcagcatcgtcgagggcttcggcggcaccctcgaagccgagctgccggcggatggcgggttgctcatgaactgccggctgccgctcgccgccggcgccacgggagggtaa

SEQ ID NO: 323163 - DNA, 645 bp, Pseudomonas aeruginosa
atggctatgcctgacgaagcgctggtctacgtggtcgacgacgaccagggcatgctcgaatcgacggtctggctgctggaatcggtcggcctcaaggcacggcccttcacccagggtcgggacttcctcgatgcctgcgagggcggccgccatgcctgcgtcctgctcgacgtgcggatgcccggcatgggcgggctgaacgtgcaggacgaactgctggcgcgcggcatcgacctgccggtgatcttcgtcagcggccatgccgacgtgcccatcgtggtgcgcgccttcaaggccggtgcggtggatttcatcgagaaaccctacaacgaacaattgctgctcgacagcgtgcagcaggccctcgatcgccacgcccgtcggcgccggcaccgcgatctcgacgccgggttgcgcgaacgcctggacagcctcaccccgcgcgagcgcgacgtgctcttgccgctggtgcgcggccataccagccgcgaggtggccgagcaactggaagtcagcgtgaagaccgtcgacctctaccgcgcgcgggtgatgaagcgcatgcaggcccagaccctgccggagctggtgggcatggccatcgccgccgggctggtggacccgctgcgcttgcgcgagggcacctga

SEQ ID NO: 323164 - DNA, 831 bp, Pseudomonas aeruginosa
atgaagattcgcctgcttggcgcagccgtggcggctgtgttcaccctgatcggcagcgctgcccatgccgacgacctggccgacatccgcaaaaagggcgagatcgtcatcggcacccttggcaccgacgagccgaacagcttcatcgacccgaagacccgtcagatcatcggctacgaggtcgatcttggtaccgagatcgccaaggccatcggggtcaagccggtgttcaagcagatttccgtggcggcgcgtatcccggagttgcagcagggccacgtggacctgctcgccgcctcgctgacccacaacaaggagcgcgaggcgctggtggatttctcctattcgatcatcgtcaccgggcagaaggccctggtgaagaagaacgccggcttcgcctcgctgcatgacctcgacggcaagaaggtgctgacggtcaagggcggcacccaggagccgaacatccgcaaggcgctgcccaacgcccaggtggtcaccttcgagaccagccagcaggcgctgctggcgttgcagcagggcaagggtcaggccttcgtcgacgacgagtcggcactggtcaacgatttcggcaagctcggcgcggcggccggcggctacgccatcctgccggagaacctgagtaccgaggccctggccatcgccttccgcaagggcaatccgcaactcaagcaactggtcgactcgaccctcgccggcctggagcgcagcggcgcggcggagcagctgtacctcaagtggtacgggccgggcaccaagtccaacctcagcgagcgccacttcaagatcgattccgaccgggtccccgagtga

SEQ ID NO: 323165 - DNA, 699 bp, Pseudomonas aeruginosa
atgttcgagttcgatttctccctgctgctgcgcggccagtaccatgagatgctggtcgccggcctgctgctgtcgctgaagctggccgccgtcaccctggtcttcgccgtgccgctggcgatgctggtggcgctgctgcgcctggcgccgttccgcgccctgcaatggctcggtttcgcctatgtcgagagcatccgcaacgtaccgctgctggcgcacatgctgttctggtacttcgccgcgccggaatggctacccgaggacctcaaggcctggctctacgccggcaacatcgaggccgccagcgctatcgtcgcgctgaccctgtacaccgccgcgttcatgagcgaggacatgcgcagcggcatccgcgcggtgcccacggtgcaactggaggccgcccgcgcgctgggcttcggctacctggcgagcatgcgcctggtgatcctcccgcaggccttgcggatcaccgtaccgccgctgatctcgcaaaccctcaacctgtggaagaacaccagcatcgccacggtgatcggcgtcgccgagctgatgtaccaggccggccaggtggagagttcgaccttccgcagcttcgagtcctttgccttcgccaccgcggcctatctcagcgtatcgctgctgatcaccggcgccgccgcctggtaccagcagcgctatccgggagtcgaacggcgatga

SEQ ID NO: 323166 - DNA, 705 bp, Pseudomonas aeruginosa
atgaccaccctggaactgatcgatagctactggctgtacttcctcgtcggccagtaccccaacgggccgctgggcgggctggccctgaccctggtcctggcctcgctggcgctgctgctggcgctgccactgggcatcctgctcggcctggcgcgggtcagcccctggcgctggctgcgctggccgatcaccgcgctggtcttcgtggtgcgcggggtgccgttgctgatggtgatcttctgggcctatttcttcctgccgaccctcaccggccagcgcaccgaccagttcaccaccatgctgctggcgcttgtgctgttcgacgcggtgtacctggccgagatcgtccgcgccggcatccagggcctcgaccgtggccagttcgaggcggcgcgttcgctcggcctgggctacctggcgagcatgcgcctggtgatcctcccgcaggcgctgcgcaacatgctgccgtcgttggtcaaccaattcgtctcgacgatcaaggagacctccctgggctacatcatcggcctggccgaagtcagcttcatcgcctcgcagatcaatacccaggtattcaccctgccgacccaggtctacctgatcctcggcctcacctatttcatcctgtgcttcggactgtcgcgtttcgccttctggctcgaacgccgccaggcgcagcgtggcaatcccaaggaggcccgatga

SEQ ID NO: 323167 - DNA, 744 bp, Pseudomonas aeruginosa
atgatccggctggaaaaggtcaacaaatggtacggcgcctaccacgccctggcggatgtcgacgaacaggtcggccgcggtgaggtggtggtggtctgcggaccctcgggctccggaaaatccaccctgatccgtaccctgaaccgcctggaaccgatccagggcgggcgcatcctgatcgatggccaggacatccacgctcccggcctggacctcaatcgcttccgctcgcacatcggcttcgtgttccagcagttcaatctgttcccgcacctgaacgtgctggacaactgcaccctggcgccgctccgtttgcgcggcctgaaacccgcggaggcacgccgccaggccatggcgctgctggagcgggtcggcctggcggacaaagcggcggcgttccccgcgcggctttccggcggccagcagcagcgcgtggcgatcgcccgcgcgctggcgatggagccgccgctgatgctgttcgacgaaccgaccagcgccctcgacccggagatggtcggcgaggtgctgctggtgatgcgcgacctggcccgcgacggcatgaccatggtggtggtaacgcatgagatgggcttcgcccacgacgtcgccgaccgcgtgctgttcatggacgccggccgggtgctggagcgcgccagccccgacgatttcttcaaccgcccgcagcacccgcgtgcgcggaagttcctcgccgacatccgcacccccttcgcccaacccctgtga

SEQ ID NO: 323168 - DNA, 1005 bp, Pseudomonas aeruginosa
atgagcactccgagtctgccgatcatcgatatcgccgcccttgccggcagcgacccggcggcgcgacggtcggtcgccatgcgaatcgaccgcgcctgccgcgagcagggcttcttctacgtggtcgggcacggcgtcgaggcgcaactggtcgagcgcctggagcgcctggcgcggcagttcttcgccctcgacgagacgagcaagctgcgctggcgcatggagcttggcgggcgcgcctggcgcggctatttccctcttggcggcgaactgacctccaaccgcccggactggaaggaaggcttgtacctgggcagcgaactggacgctgagcatcccgaagtgcgcgccgggacgccgctgcatggcgccaacctgttccccgaggtgcccggcctgcgcgagacgctgctggagtacctggacgcaaccacccgcgtcggccaccggctgatggagggcatcgccctcggtctgggactggaagccgactacttcgccgcgcgctataccggcgatccgctgatcctcttccgcctgttcaattacccgagccagccagtgccggagggcctcgacgtgcagtggggcgtcggcgaacacaccgactacggcctgctcacgctgctccaccaggacgccatcggcggcctgcaggtgcgcaccccacagggctggctggaggctccgccgataccgggctcgttcgtctgcaacctcggagacatgctcgaacgcatgaccggcggcctctaccgcagcacgccgcaccgggtggcacgcaacacttcggggcgcgaccgcctgtcgttcccgctgttcttcgatccgaacttccatgcccgcgtgcagcccatcgaagggctgcccgaggtgccggaacaggatgacagcgcccgtcgctgggaccaggccaacgtccacgctttccacggcgagtacggcgactacctgctgaacaaggtggccaaggtattcccgcagttgcgccgcgacctgctctag

SEQ ID NO: 323169 - DNA, 1197 bp, Pseudomonas aeruginosa
atgacggacaaccatatcgatgtactgatcaacggctgcggcatcggcggggcgatgctcgcctacctgctcggccgccagggccaccgcgtggtggtagtggagcaggcacggcgcgaacgcgcgatcaacggcgccgacctgctcaagccggccggcatccgggtggtcgaggcggccgggttgttggccgaggtgacccgtcgcggtgggcgggtccgccatgagctggaggtctatcacgacggcgagctgcttcgctatttcaactattccagcgtcgacgcgcgcggctatttcatcctcatgccctgcgagtcgctgcgccgcctggtactggaaaagatcgacggcgaagcgaccgtcgagatgctgttcgagacccgcatcgaagcggtgcagcgcgacgagcgccacgcgatcgaccaggtgcgcctgaacgacggccgcgtgctgcgtccgcgggtggtggtgggagccgacggtatcgcctcctacgtgcgccgccggctgctcgatatcgatgtggaacgccgcccctacccgtcgccgatgctggtcggcaccttcgccctggcgccctgcgtggccgagcgcaaccgcctgtacgtggactcgcagggcgggctggcctacttctatccgatcggtttcgaccgcgcgcgactggtggtgagcttccccagggaggaggcgcgcgagctgatggccgacacccgcggcgagtcgctgcgccgacgcttgcaacgcttcgtcggcgacgagagcgccgaggcgatcgccgccgtcaccggcacttcgcgcttcaagggcatccccatcggctacctgaacctggaccgctactgggcggacaacgtggcgatgctcggcgacgccatccacaacgtgcatccgatcaccggccagggcatgaacctggccatcgaggacgccagcgccctggccgacgccctcgacctggccttgcgcgacgcctgcgcgctggaggatgccctggccggctaccaggccgagcgcttcccggtgaaccaggcgatcgtctcctatggccatgcgctggccaccagcctggaggatcgccagcgcttcgccggggtcttcgacaccgccctgcagggcagcagccgtacgccggaagccctgggcggcgagcgctcctaccagccggtgcggtcgccggcgccgctcggctga

SEQ ID NO: 323170 - DNA, 1491 bp, Pseudomonas aeruginosa
atgactgagctgctgagccgggaggaatacgcggccatcgccgcgacgctggaccttccccagcgcgccttcatcgacggagggttccgcgatgcctgcggcggccgcaccttcgcctcgaccaacccggccaccggcgagctgctggcgcaggtcgccgcctgcgacgcggaggacgtcgggcacgccgtggccagcgcgcggcgggcgttcgaggacggccgctggcgctcgcgcacgcccgccgagcgcaaggcggcgctgctgcgcctggccgagctgctggaagagcacctgctggaactggcggtgatggagagcctcgacagcggcaagccgatccgcgaatgccagcacaccgacctgccggaaaccatcaataccctgcgctggcatgccgaactgatcgacaagatctacgacagcaccgccccggtcggttcggcggcgctggccatggtggtgcgcgagccgatcggcgtggtcggcctggtgctgccgtggaacttcccgctgctgatgctcgcctggaagatcggcccggcgctggcggcaggctgctccgtagtggtcaagccggcccccgagaccagcctgaccgccctgcgcgtcgccgaactggccagccaggcggggatccccgccggggtgttcaacgtggtccccggcggcggccgcgaggccggcgaaccgctgggccaccacccggacgtggcgatggtcagcttcaccggctccaccgcgaccggccgcctgttcctcaagtacgccgccgagtccaacctcaagcgggtggtactggagtgcggcggcaagaacccggcggtggtgatgaacgatgtcgaggacctcgacctggtggcgcaacacgtggtcaacggcgcgttctggaacatgggcgagaactgctcggcgtcctcgcggctgatcgtccacgccgaggtccgcgaggcgctgctcgaacgcatcggcgcgcagctccgcgagtggcgcatgggcgacccgctggatccgcgtaatcgcctcggcgcgctggtcagcccggcgcacttcgagaaggtccgcgcgtacctcgaccaggccaggacggagcggttggcggtgcgcttcggcggcgccaccgaggctggcatcttcgtcgagccgaccgtggtcgatggcgtctcgccgcacagccggctgttccgcgaggaaatcttcggcccgctgctctcggtcacctctttcgacgacatcgacgaagccatcgccctggccaacgacaccgtctacggcctcgccgcctcggcctacaccggcagcctgcgccacgcactgcgcctgtcgcgggagatccgcgcggggatcgtcaccgtcaactgcttcggcgagggcgacgcctcgacgcccttcggcggctacaaggagtcaggcttcggcggtcgcgacaagtcggtctgggcacacgaccagtacacagagttgaagaccatctggatcgacgcttcctga

SEQ ID NO: 323171 - DNA, 912 bp, Pseudomonas aeruginosa
gtgaaattcgaaggtatctatacccccgccatcaccccgctgagcgccgacggcagcatcgacacccaagccttcgccgaggtcctggagtttctcgtcgagtcgaaggtgcacggcatcgtgatcggcggctccaccggcgagtactacgcgcacaccgccgaggaacgcctggccctcgccgcccacgccagcgaagtcatcgccgggcgcctgccgctggtggtgggaaccggcgcgatccgcaccgaggactcgctggcctacgccgaagccgcccgcgccatcggcgccgacgccatcctggtcggctcgccgccctacgcgctgccgacctcgcgggagatcgccgagcacgtgctggcggtggatcgcgccgccggcctgccgatcatgctctacaactatccggcgcggatgggcgtggagatggacgaggcgttcttcgccgccgtcgccggctgccgcaacatcgtcgcgatcaaggaaagctccggctccaccgcgcaattgcaccgcctggcctgccgccacccgcggatcgccttgtcctgcggctgggacgaccaggccctggagttcttcgcctggggcgcgcgcagttgggtctgcgccggctccaacttcatccctggcgaacacctcgccctgtaccaggcctgcgtggtcgagaacgacttcgccaagggccggcgcatcatggcggcgatgatgccgctgatggactttctcgaaagcggtcacttcgtccagtcgatcaagcacggctgcgagctggccggcctgcgcgccggcggcgtacgtgcgccgctgaaggcgctggacgaggccggcaaggcggcactggcggagatcgtcgccaggctcaagggcgaggtcgcgcggatcgtcgagggtggccgccatgactga

SEQ ID NO: 323172 - DNA, 1329 bp, Pseudomonas aeruginosa
atgacaaatcctacgacctcgatcgaagacgtacccctcaacgccttccaccggctgttgaccctgcgctccggcggcggctccttcgtcgacggctacgtgctgagcatcatcggcgtggcgatgctgcagatgaccgcggcattgcaactgagcagtttctggcagggcatgatcgccgcctcggcgctggtcggcatcttcttcggcggtttcctcggcggctggctgaccgaccgcctgggccgccgcaggctgttcttcgtcggccccagcctgttcgtcctcgcttccctggcgcagtacggggtcgactcggcggcggcgctgttcgtcctgcgcttcctgatcggcgtggcggtgggcatcgagtacccggtcgccaccgccttgctggtggagttcttgccgaagaagtatcgcggaccgcgcctggccaccctgaccatcctctggttcgccggcgccgccttcgcctacctggtcggcgacctgatcctgcgcagcggcggcgaggacgcctggcgcctggtactggccagcaccgcggcgatcggcgccgtgctgttcctgctacgcatcggcacccccgagtcgccgcgctggctgctgagcaagggccgcgacgcggacgcagaacgggtcatccgccaggtctacggcgaagccttctcgctggaaaacctgcccgaacaggcgctggaacggaaggtcaccatctggcacctgctctacgccggctacggcaagcgcatgctcttcgtcaccctgttctggacctgctcggtgatccccgtgttcgccgtctacgccttcgcgcccaaggtgctgctggcgctgaacctgaagggcgactggggctcctacggttcggtggcgatcaccctgctgttcgtcatcggctgcatcatcgccacccgcctgatcaaccgcatcggccggcgctgcatgctgctgcacagcttcctctggtccggcctggcgctgctcgggctgggcgtcttccacgccggctcggaggcgaccatcctcggcctgttcggtgcctacgcgctgttcatcggcggcgcccaggtgctgcaactggtctactcgaacgaactgttccccaccgagatccgcgccttcgcggtcggcgtcggcacctcgttatcgcgcgtcggcgccgcggtgggcacctacctggtgccgctttccctggaaaccctgggtaccgcccagaccatgtacgccgccgcgctggtgaccctgctcgggctgctcgtgacctgggccctggcgccggaaacccgttcgctgaacctgcagcaggcggcttcgctcacctga

SEQ ID NO: 323173 - DNA, 1320 bp, Pseudomonas aeruginosa
atgacgaaagtaacccacctcccggccgacgaccgttcctgcggctggtaccacctcagcccgccgcggcggccgaagccggcccactacggcaggagcgccgcccgctgggtggtggtcggcgccggcttcaccggcctcgccgccgcgcgccagctggcgctgcattttccggacgaggagatcgtcctggtcgaggcccaggaagtcggcttcggtaccgccgggcgcaacgccggcttcgccatcgacctgccccacgacatcggcgccgacgactacatcggcgacatagcgacagcccggattgccctgaagctcaatctcgccggccagtcgctgctccgcgaacaggtgcagcgccatgccatcgactgccagatgaaggcctgcggcaagtaccaggcggccgtcgaggcgcgcggcgtggctgtgctcgacgcctaccggcgcggcctcgatcggctcggccaggcctacgaggtgatcgaggcggacgacctcccgggacacatcggcaccgccttctatcgcaaggccctgttcacccccggtaccctgctggtgcagccctcggccctggtcaagggcctggccgacagcctgccgggcaacgtcagcctctacgaacacacaccgatcaccgccgtggaatatggcgacaggaccctgctgagccatccccacggcagcatcctggccgaccgcctggtcctcgccaacaacgccttcggcatgagcttcggcttcctccaggggcggatgctgccgatcttcacctacgccagcctgacccggccgctcgatgccgaggagcaggcccgcctcggcggccgcccctactggggcctgatcccggccgacccttacggcaccacggtgaggcgtaccccggacaaccgcctgctgatccgcaacagcttcagtttcaaccctgacggacgcagcgccgggaagtaccttgagcgcttcgccgtacgccatcgcgcctcgttccgccagcgcttcccgatgctcccggaagtcggcttcgactacacctggggcggctcgctggcgctgtcgaggaaccacatggggcacttcggcgagctggcgcccaacgtctatggcgccctgtgctgcaacggcctgggggtaacccgcgggaccgtcaccgggaagctgctggccgactggctggcgggcgaacgcaacgagctgatcgacttcctgctgcgcgcgcccggtcccagcggcaatccacccgaaccactcctttcccttggcgtgaacctcaacctgaggtgggggcagtatcgagcaggtagagaaagctag

SEQ ID NO: 323174 - DNA, 729 bp, Pseudomonas aeruginosa
atgaaagcccaacccgacgtcgactcgaacagcgccgatgcccccttcgaccgcaaggcggtgctgggcgatgcgctgcgccggcggatcctgagcatggaactggcgcccggcgcggtcgtcgacgaactcgccctgtgcgacgagttcggcctctcgcgcccgccggtgcgcgaactgctgcggcagatcgccgccgagggctacatcgaactggaagccaaccgtgcgccgcgcgtcgcggccatgagccacgactcgctgcacgccttctttctcgccgcgccgctgatctacatcgccaccacgcaactggcggccacccatgccagcgaagcggagatcgagacgctcaaggcgatccaggaagatttccgcaaggccatcgaagagaagcatgtggaaaaccgcgtcatccacaacgacgccttccacctggagatcggcaggatggcccacaacgactacctcatgcccagcctgcgccgcttgctgatcgaccatgcgcggctgggcaagatcttctaccgccatccgaccaccgacgacatgcaacgcgacctggaactcgcctgcgaccagcacgaccagatcgtcgatgccatccaacggcgcgatccggatgcggcggcggacatcgtccgtgcgcatttcgagctgtcgcgccggcgcatggccgagtacgcggcgccggccggagtggaggtggcgctggtctacgagggttag

SEQ ID NO: 323175 - DNA, 1452 bp, Pseudomonas aeruginosa
atgcaactcaaagatgccaagctgttccgtcaacaagcctacgtcgatggcgcctgggtggatgccgacaacggccagaccatcaaggtgaacaacccggccaccggcgagatcatcggcagcgtgccgaagatgggcgccgccgagacccgccgcgccatcgaggctgccgacaaggccctgccggcctggcgtgcgctgaccgccaaggagcgcgccaacaagctgcgccgctggttcgacctgatgatcgagaaccaggacgacctggcccgcctgatgaccatcgagcagggcaagccgctggccgaggccaagggcgagatcgcctacgccgcctccttcctcgaatggttcggcgaagaagccaagcgcatctacggcgacaccattcccggccaccagccggacaagcgcatcatcgtgatcaagcagccgatcggcgtgaccgcggccatcacgccgtggaacttcccctcggcgatgatcacccgcaaggcgggcccggccctggccgccggctgcaccatggtgctcaagcctgcttcgcagaccccgtattccgcgctggccctggccgaactggcagagcgcgccggcattccgaagggcgtgttcagcgtggtcaccggcagcgccggcgaagtcggcggcgagctgaccagcaacccgatcgtgcgcaagctgaccttcaccggttccaccgaaatcggccgccaactgatggccgagtgcgcccaggacatcaagaaggtgtccctggagctgggcggcaacgcgccgttcatcgtgttcgacgacgccgacctggacgccgccgtcgagggcgcgctgatttccaagtaccgcaacaacggccagacctgcgtctgcgccaaccgcctgtacgtgcaggacggcgtgtacgacgccttcgtcgacaagctgaaggccgccgtggccaagctgaacatcggcaacggcctggaagccggcgtgaccaccggtccgctgatcgacgccaaggccgtggccaaggtcgaggaacacatcgccgacgcggtctccaagggcgccaaggtggtttccggcggcaagccgcacgccctcggcggcaccttcttcgagccgaccatcctggtcgacgtgccgaagaacgccctggtgtccaaggacgagaccttcggcccgctggcgccggtgttccgcttcaaggacgaggccgaggtcatcgccatgtccaacgataccgagttcggcctggcgtcctacttctacgcccgcgacctggcccgcgtgttccgcgtcgccgagcaactggagtacggcatggtcggcatcaacaccggcctgatctccaacgaagtggcgccgttcggcggcatcaaggcctcgggcctgggccgcgaaggctccaagtacgggatcgaggactacctcgagatcaagtacctctgcctgggcggtatctga

SEQ ID NO: 323176 - DNA, 1281 bp, Pseudomonas aeruginosa
atgagcaagaccaacgaatccctgctgaagcgtcgccaggccgcggtaccccgcggcgtgggccagatccacccggtcgtcgccgagcgcgccgagaactccaccgtctgggacgtggaaggccgcgagtacatcgacttcgccggcggcatcgccgtgctgaacaccggccacctgcatccgaaggtggtcgccgcggtccaggagcaactgggcaagctgtcccacacctgcttccaggtgctggcctacgaaccctacatcgagctggccgaggaaatcgccaagcgcgtgccgggcgacttcccgaagaagaccctgctggtcacctccggctccgaagccgtggagaacgccgtcaagatcgcccgcgccgccaccggccgcgctggcgtgatcgccttcaccggcgcgtaccacggccgcaccatgatgaccctgggcctgaccggcaaggtggtcccgtactccgccggcatgggcctgatgccgggcggcatcttccgcgccctggcgccctgcgagctgcacggcgtgagcgaggacgactccatcgccagcatcgagcgcatcttcaagaacgatgcccagccccaggacatcgccgcgatcatcatcgagccggtgcagggcgagggtggcttctacgtcaactccaagtccttcatgcagcgcctgcgtgccctgtgcgaccagcacggcatcctgctgatcgccgacgaagtgcagaccggcgccggccgtaccggcaccttcttcgctaccgagcaactgggcatcgttcctgacctgaccaccttcgccaagtcggtcggcggcggcttcccgatctccggcgtggccggcaaggccgagatcatggacgccatcgcgcccggcggcctgggcggcacctatgccggcagcccgatcgcctgcgccgcggcactggccgtgctgaaggtgttcgaggaagagaagctgttggaacgttcgcaagccgtcggcgagcgcctcaaggccggcctgcgcgagatccaggccaagcacaaggtgatcggcgacgttcgtggcctgggttcgatggtggccatcgagctgttcgagggcggcgatacccacaagccggccgccgagctggtcagcaagatcgtcgtccgtgcgcgcgagaagggcctgatcctgctctcctgcggcacctactacaacgtcatccgcttcctcatgcccgtcaccatccccgacgcgcaactggagaagggcctggccatcctggccgagtgcttcgacgaactcgcttaa

SEQ ID NO: 323177 - DNA, 1200 bp, Pseudomonas aeruginosa
atgagtgccgcgaaaaaggcccccgtcatcctgattgccgacccggacccctggagtcgcgacttgcttggccaactggtcctcggcgtgcgttgcgatgcccggctggtcctctgcggcgatggcggggaagcgctggcgcattgccggcgccggcgcttcgcgttgatcctggccgagctgaacctgccgcaggtggatggcttcgagctgctgcgcgaagcgcgcctgcgccgctcggtcgccgagcagccgttcatcctgatcagcgaccgcgccgaccaggccagcgtgcgcgccgccgtggcactggcgccgaccgcctacctggtgaagccgttccaggccgagaacctgatgcaacgcctgcgagggttgttgctgaagggcgacgaagtggtcgcctgtccgctgccggagcgggacgcgggcgagaacctggaggctttcctcgaacgcgcgcgcgactccgcggagggggcgccgttgctggccgacgtgcgtgccgccagcgatcgttgcctgagcgccgaggagcatccgctgcgcgtgctggaggatgagttcggtcgcgacccgcagatcaccgctggcctgatcgccgccgccaacagcgccgcccggcacgtcggtccggcctgccagaccctgggccaggccctgcggcggctgggactcgggcacagcctgaacctggtgctcggtttcagtctgcagcgggccatccagctcggcgagccgctgctggccgagcgcgccatgcacttctgggatctttcgcaacgttgcgcggacatcgcctgggaactggccgacgccctcggcgcggacgtcgagcgctgctataccgcagggctgctgcatcgcctgggcgacctggcgctgctgcggacattgcaggattggtgcgatggcggcggcgcgctggacgaggcgcggctcgacgagctgctggggcgtttcggcgccagcttcggctcggccctgcgggcgcgttggcggctgccgctggagctgcgccggctgatcgctgcggcgtaccagttcggtggcgtgctttcccgcgaagagctgatcctcagcctggcgacccaggccgccagcctgcccgaggacgacgcggagcaactggccgagagcaaggctgcccgcatgctcggcctggacggcgaacgactggcgaaactgctgcagccctga

SEQ ID NO: 323178 - DNA, 1422 bp, Pseudomonas aeruginosa
atggaactgcaactgatcctcgacggccgccacgacctggtcggccagctctatcgccagctgcgcgacgcgatcctccacggtcgcctggccaccggcgatcgcctgccagccacgcgctacctcgccgaacgcctggaagtgtcgcgcaagaccgtcagcgaagcctacgagcgcctcaccagcgagggcttcctcgaaggccgggtcggcagcggcaccttcgtcgcccgcgggcccgccggggaagcgccgccgcagcgcgccgacggtccgttgcggccggccgcgcgctgggcacgcatcgaaccgcagtccggtctgatggaccagcgagcaccgctccgctacagcttcgccggcggcacgaccgacaagcgccgctttcccttcgatacctggcgtacctgcgtgctccaggcgctacgcctgcaacagcgctcgccggcgttctacaaggaaaccgaaggcgaccccgaactgcgcctggcgatctcccgctacctggcgatcaaccgcgccgtgcagtgcgactggaacgccctgatggtcacccagggcgcccagcagggactcgacctgctggcccgggtgatgctcgaccccggcgacctggcggtggtcgaggaacccggttatccgccggcccgcgccagcctgctggccaccggcgccgaggtgcgcggagtgccggtggacgccgaggggctgcgcgtcgacctgctgccggacaacgccaagctggtctacgtcaccccgtcgcaccagttcccgctgggcatgccgatgagcctcgagcggcgcctgcagttgctggactgggcgcagcgccaccgggcgctgatcatcgaggacgactacgacagcgagtaccgcttcgacgggcgttcgctggagtcgctgcgcagcctcgaccggaacggccaggtggcctacctcgggaccttttccaagaccctcttccccgagctgcgcctcggctacctgctgccgccggcgagcctgcgcgaagcggtgctggcggcgcgcaagctggtcgaccggcacagcgagaccttgcagcaacgcgccctcgcgctgttcatccagcgcggcgacttcgcccgccatacgcgccgcctgcaacgcgaatacgcccagcgtcgccggcgcctgctggaacgcctgcacggcgacctgagcccctggctcgaagcgctgccggcggtggccgggatccacctcgcggcgcgctgtcgcgaaccgctggatgtgctgcgcatcgcccgtcatttgcgccagcaaggcctggaggtcggcaccctgccgcccttctacgcggaaaccccggcacaggccggcttcctcttcggcttcggctgcatcgaacgggacgacatcgacccggcgttggacctgttgcgcgccgagctgcggcgctag

SEQ ID NO: 323179 - DNA, 438 bp, Pseudomonas aeruginosa
atgaccacccgcctcgaatgggccaaagcctcccccgacgcctatgccgccatgctcggcctggaaaaggccctggccaaggccggcctggaacgcccgctgatcgaactggtctacctgcgcacttcgcagatcaacggttgcgcctactgcgtgaacatgcatgccaacgacgcgcgcaaggccggcgagaccgagcagcgtctgcaagcgctctgcgtctggcaggaaaccccctacttcaccccgcgcgagcgcgccgccctggcctggaccgagcaactcgcccgcctcagtcagggtccgttgccgcacggcctgctcgacgaactgcgcgagcacttcgacgacaaggagatcgccgaactgaccctggcggtctcggccatcaacgcctggaaccgcttcggcgtcggcatgggcatgcaaccggagtga

SEQ ID NO: 323180 - DNA, 408 bp, Pseudomonas aeruginosa
atgaaggccaatcgatcgatcgcctgcctgctgctcgccgcgctgccgacgctggccagcgcccatgctgcggagaaggtggaaaccctgcgcgaccaggccctggccgagattcccggccatcgtgggttgatgctgacggtgtcgttcaagcccggccaggtctccgcgccccatgtgcatcccggctcggtgttcgtctacgtgctcgaaggcaccgtgcagacgcaactggaaggcggcccggtggaaacctacacggtgggccagagctggtacgagccggcgaacgtgccgcacctgctggcacgcaatcccgatccgatgaagccggccaagttgctggtctgggagttgctcaaggagggcgacccgatcctcaagccactggagcgcggcgcccactga

SEQ ID NO: 323181 - DNA, 285 bp, Pseudomonas aeruginosa
atgagcgccagccaggtcatccgtattcgcgcgcgcaatggtcagtcggaacggcttggcctgcgcctgcaacaactggtcgaaccggggctggaggcgccgggttgcctggagtaccaggtgcgcagggacgccctcgagccggatctctggctggtgtgcagccagtggcgggaagcgcagcagatgttcgactacctggccggcggcatccagcaggtattcgccgaagtgctctggcgctccctggcggcgagcctcgaagtgcaggatgacgcaggctag

SEQ ID NO: 323182 - DNA, 933 bp, Pseudomonas aeruginosa
atgctgatcgccaacggcctgcgcaaggtcgacatgcaggacctgctggtcttcctccaggtccaccaacgacagaacctcgtcgaggtcgccgaacacctgaacctcagtccgtcgacggtcagctactgcctgaagaagctgcgccaggccttcgacgacgagctgttcatcgccacccgcggcggcatgcagccgacccacaagagtcgcgccatgctgccccacgtggaggaaatgctcgcccgcatcaacgcctgtcacgccgcccagggtagcttcgacccgcgtggcgagccgcggacctttaccctctgcgcgccggaatacgtcgagctgctgatccttccggcactcctgcgacggctcgccgccaacggcccgaggatcggcctggacatccgccgcctgggtcccgaactgcccaccgaagcattgctcgacggccaggtcgacctggtcttcgacttcggtcccgagtaccaccgaccggcaccggagctacaggcgctcgccctgttcagcgacgagctgctctgcgtacaggatcgtgcccagccgcgccacgagcgcctggaactggacgagttctgcaggcgccgcttcgtcttcccgaccccgctcgacgccagcaacgccaacctggtggacacgtggctgcgacgccagggccgcagccgcgaggtcgccgcgcgcgccaacagctacgtcgccgccctgcaactgctgtcgggcagcgacttcgtgctgatgctgccacggcgtatccatgcactgctcgacgatggccgccatcacgcctgcctcgcaccgcccgggctgccgccgttcgccctgcacctgtcatggagccgcgccgccgaccaggacccggcgaacctctggctgcgcgagcaggtactgatcgtctgcgccgagctgggtttgctctag

SEQ ID NO: 323183 - DNA, 1215 bp, Pseudomonas aeruginosa
atgcccactgccaacccacccggccgcaccctctggctgatggccgccatcgtcctggtcggcctcaacctgcggccctccatggccgccgtcggcccactgctgaacgccatgcgcggcgagatcgcgctcagcttcggcgacgtctcgctgctgaccgccctgccggtgctgaccctcggcctcggcatgttcttcggcctgggcatcgcccgccgcgtcggcgagtggcgttcggtggccctcgccctgctgctgatcggcgccgccagcgccctgcgcctgggcagccgaggcctgcccgacctgctcggcagcgccatgctcgccggtctcggcatcgccctgatccaggcgctgatgccggccctgatcaaggcccgtttcggcgcgcgcacgccgctctgcatggggctctacgtcaccgccatcatggctggcgcggcgctgtccgccagcgccgcgccgaccctggcggagcacgccgactggcggctcggcctcggtgcctgggcggcgctcgccgcgctcgcgctgctggcctggtggctgcaacccggcacccgcctgcgcctgcccgccgcacagcccggcaggagcctcctgcgctatccgcggacctggctgctggtcctgttcttcggcctcggcacggcctgctacacctgcgtgctggcctggctcgcgccctattacctggagcagggctggagcgcccaggaatccgggctgctgctcggtttcctgacggccatggaggtgctctccgggttgctcgcgccggccctggccagccgctcgcgggatcgccgcccggtgctggtcgggctaacggcgctgatgctggccggcttcctcggcctcgtctgggcgccggccagcctgccgctgctctgggcgctgtgtctcggactgggcatcggcgggctgttccccatgggcttgatcgtctgcctcgaccacttcgacgcgccgcaacgcgccggtcaactggctgccctggtacaaggcgccggctacctgatcgccggggtctcgccatggatcgccgggctgctgcgcgacagcctcggcagcttcaccggcgcctggctcgggctggccacggtggcggcgctgctactggggctgggcctgcgcttcgacccgcggcgctatgcggtactgttcctcgagcgacagccgcaaggcgtcggcgccgaaagcttgcgctga

SEQ ID NO: 323184 - DNA, 771 bp, Pseudomonas aeruginosa
atgctccgtcccgcgcttcccgctgtcctctgtctttactgcctgctgctggtgctgccggcgcgcgccgccctcgacgaccagcaacgcgccctgcaacaactgcaggtccaggcctgtcgcgcggtgggcagcctgttgttgctgcgcggcgagggtttccaggaacagcacgcggcgcaactggagaaggacctcgccagcctcgaccgcgcgctcgccgccgcccccgagggggtgctcctgcggcaagacgaaaagacgctggtggcgcgcatccgtgaaggcgcggcctacggcccccgcgaagaggacctgccctggcgctacccgcagcaactgagccgcgccctgcgtgacttcctcaacctggtggaacgccaggtgccaccgcccccgccaggccagcccctgccgctctggcagttgccggtgcgggtcgagtacctgtccctgcaatacctggcgcgcgcctacctgggcgggctggagactgcccgcgagcagccccgggactatctcggccaggacgagagcgtgctggtcccgctgatcgaccggcgcatcgccctgctggtggcgcaaagcgccaacccggcgggactgaagaaactggaaaaccgctgggagtacctgagccaggccctgcgcgacctgaacagcaagagcagcgcgctggtcagcgcttccggcaggccctgggcgccgatcatcgtcgaccgccacgcgcgtgccctgagcgaaagcctgatgcgcttgagtgcggagtga

SEQ ID NO: 323185 - DNA, 687 bp, Pseudomonas aeruginosa
atgaacgagcgtaccgactaccgttcgcaactccaggccggccgctggttccagggtttgccggaggccttgcagacgcacctgctggcactcgcccaaccgcgccatttgccgccgggccagcgcctgttcgcccgcggcgacgcgccctgcggactgtactgcgtggtcgagggcgcgatccgtatcagcgcggtcagcgagaacggcaaggaggcgctgctgatcctggtggaagcgccgcactggttcggcgagatcgccctgttcgacggccaggcgcgcacccacgacgcctacgccgaaggccacacccagctactccaggtgccgcaggcggcgctgctcgaactgcttcgccgcgagccgcactactggcgcgacgtggccctgctgatgagccacaagctgcgcctggcattcatcgccctggaagagatggccctgctgccggccgcacaacgcctggcgcggcgcctgctgatgctcgccgagggctacgacaacagccgcagccggcaggtcctgcacctgccgcaggagcagttggcattgatgctgtcgctgtcgcggcagaccaccaaccagatcctcaaggacctcgaagcccagggcatcctccagctcagctacggcggcatcgagattctcgacctcgccggcctgcgcgcggccacccacggctga

SEQ ID NO: 323186 - DNA, 516 bp, Pseudomonas aeruginosa
atgaaaaccctagtcgatcaccttgcgcaatacgccgcctaccaccgcgaccggcgcaacatcttcagccatttcatcggcattccgatgatcgtcctctccatcgccgtgttgctggcgcggccggcgctggggttcggcctgtctccggcgctgctgctggcgctcgccgcggcgctgttctacctgcgcctggacctgcgcttcggcgcggccatgacggcgctgctggcgctgacggtgtggggcgctgcgcaattggcggcggggactaccgcggcctggctgggctggggcgtcggcctgttcgtggtcggctggatcatccagttcgtcggtcattactacgaagggcgcaagccggccttcgtcgacgatctcagcgggttgatcgtcggtccgctcttcgtgctggcggaactggcctttctgctggggctgcgcggcgacgtgcagcgcgaggtcgaggagcgcgccggcccgacctgcattcgcgagcacaagcgggcggcgtga

SEQ ID NO: 323187 - DNA, 759 bp, Pseudomonas aeruginosa
atgaagacccgtctttccctttccgccctggccctcgcctgcgccaccctggccggctgccagaacctgccccagggggacctcatgcagcacggcatgatggcggtgaaggccgctaccctgagcgacgccgaggtccgccaggtcgccgaccaggcctgtgccgagtccgaccagcagaaccgcatcgccccggccaacagcaagtacggccagcgcctggacaagatcgccaaggccctgggcgaccagatcgacggcgtgccggtgaactacaaggtctacctcaccgaggaggtcaacgcctgggccatggccaacggctgcatccgcgtctacagcgggctgatggagctgatgagcgacaacgagatcgaaggcgtactcggccacgagatgggccacgtcgccctcggccacacccgcaaggccgcccagaccgcctacgcggccgccgcggtgcgcggcgccgccggcgcctcgaagagcggcgcgctggccgccctgtccggctcccagctgggcgaactcacggaatcgctgatcaacgcgcagttctcccagtcccaggagtccgacgccgacgatttttcctacgagctactgaagaagcgcggagtgaacacccagggcctggtcaccgccttcgagaagctggccaagctgggcggcggcgacagcagcatgttcgattcgcacccgggctcccaggcccgcgccgatcacatccgccagcgtatcgccgcggatcgcaagtaa

SEQ ID NO: 323188 - DNA, 753 bp, Pseudomonas aeruginosa
atgtccgtcgacctccacgccctgatcccgctgatcgccctcaccttccttctcgccggcttcgtcaagggcgtggtcggcctgggcctgccgacggtctcggtgggtctgctcggcctggccatgccaccgatgcaggcggcggcgctgctgatcgtaccgtcgatggtgaccaacctctggcagctcgcctgcggcccgcgcttcctcggcttgatgaagcgcctggccggcctgctgctcggggtgttcgtgggcaccctgctggtcggcgcatggctcggcggcgacgcgccaaggcaggccaccggcgtgctcggcctggccctggtggcctacgcgctgctcggcctggccgcgatcccgctgcacctgccggcacgccacgagccctgggccggtccgctggtcgggctggcgaccggcgcgctgaccgcggtcaccggggttttcgtgattcccgcggtgccctacctgggagccctaggattgcagcgcgacgaactggtccaggccctcggcctgtcgttcagcgcctcgaccctggccctggcggtcactctcggcgtgcatggcgacctgctcgaaccgcagatgctcggtgcctcgctgctgaccctggtcccggcgctgggcgggatgctcctcggccagtggctgcgccagcggatcagcgcgacgctgttcaggcgctgcttcttcgtcggtctcctgctgctcggcgccgacctcgcctggcgcggtttccactga

SEQ ID NO: 323189 - DNA, 699 bp, Pseudomonas aeruginosa
atgcaattcaatcccggcttcagttcgctggcggcgctgctcgccgatcccggccgcgcgcagatgatctgggcactgatggatggcagcgcccgcccggccagcgagctggcgctgctggcgggcgtctcgccgtcctccgccagcggccacctgggacggctggtcgagggcggcgtgctgagcctggaggcgcgcgggcgcaatcgcttctatcgcctggccgggccggaagtgggacaggcggtggaagcgctggtcagcgcctccctggccctgcagccgcagcggcgcagcctgccgccgagccacggcacgccgtcggcgttgcgcgaggcgcggacctgctacgaccacctggccggcgaactcgcggtcggtgtgttcgcacggatgctggatgccggctggatcgagcaggagggcaggacgctgcgcctgagcgcgaccggcgaggccgggctggccaggttgggaatcgacctggcggaggtccgccgccgccgtcggcagttcgcctgcgcctgccccgactggagcgaacgcaagccgcacctcggcggcgcgctgggggcggcgttgctggaggcctgtctgcgccagggctggttgcggccgcaggacggctcgcgggcgttgcaggtgtcgtcgaagggccgcgcgggactgcgcggcctggcggagcgcacggcgggctga

SEQ ID NO: 323190 - DNA, 990 bp, Pseudomonas aeruginosa
atgagtatcgaaatccgtaacgtcagcaagaacttcaacgccttcaaggccctggacaacatcaacctggacatccagagcggcgagctggtggccctgctcggcccctccgggtgcggcaagaccaccctgctgcggatcatcgccgggctggaaaccccggacgccggcaacatcgtgttccatggcgaggacgtctcgcagcacgacgtgcgcgaccgcaacgtcggcttcgtcttccagcactacgcgctgttccgccacatgacggtgttcgacaacgtcgccttcggcctgcgcatgaagcccaagggcgagcggccgggcgagtccgcgatcaaggccaaggtccacgagctgctcaacatggtgcagctcgactggctcgccgaccgctatccagagcaactctccggcggccagcggcagcgtatcgccctggcccgcgcgctggcggtggagccgaagatcctgctcctcgacgaacccttcggcgccctcgacgccaaggtacgcaaggagctgcgccgctggctggcgcgcctgcacgaggagatcaacctgacctcggtgttcgtcacccacgaccaggaagaagcgatggaagtggccgaccgcatcgtggtgatgaacaagggcgtgatcgagcagatcggctcgcccggcgaggtctacgagaacccggccagcgatttcgtctaccacttcctcggcgactccaaccgcctgcaactgggcaacgaccagcacctgctgttccgcccccacgaagtgtcgctgtcgcgttccgcggtggccgagcaccgcgccgccgaggtccgcgacatccgtccgctgggggcgatcacccgggtaacgctgaaggtcgacggccaggacgaactgatcgaagccgaagtggtgaaggaccacgacagcctggccggcctggcccgcggcgaaaccctctacttcaagccgaaggccttccagccggtggccaatctctga

SEQ ID NO: 323191 - DNA, 870 bp, Pseudomonas aeruginosa
atgtccagtgcaagcatttccgctgccaccgccagcgcctcccgccgcggcaacgccggcggccgcctggccctgatcgtcctggcctggctggtcttcgccctgttcctcctgctgccgctctacgtggtcctgagcgaggcgctgaagcagggtttcggcaccttcttcgaggcgatcctcgaacccgacgcgctggccgcgctgaagctgaccctgatcgcggtggccatctcggtgccgctcaacctgctgttcggtgtcgccgccgcctggtgcgtgagcaagttcgagtttcgcggcaagagcatcctggtgaccctgatcgacctgccgttctcggtctcgccggtgatcgccggcctgatctacgtgctgttgttcggcgcccagggctacttcggcgaatggctgagcgaccacgacatccagatcgtcttcgcggtgcccggaatcgtcctggcgaccctcttcgtcaccgtgcccttcgtcgcccgcgaactgatcccgctgatgcaggagcagggcacccaggaggaggaagccgcccgcctgctcggcgccaacggctggcagatgttctggcacgtgaccctgccgaacatcaagtggggcctgatctacggcgtggtgctctgcaccgcgcgggcgatgggcgagttcggcgcggtgtcggtggtttccgggcatatccgcggtgtcaccaacaccctgccgctgcacgtcgagatcctctacaacgaatacaaccatgtcgccgccttcagcgtcgccagcctgttgctgctgatggcgctggtcatccttctgctcaagcagtggagcgaatcccgcatgtcccgactgaaaagcaatgctgacgaggaatga

SEQ ID NO: 323192 - DNA, 819 bp, Pseudomonas aeruginosa
atgtcacgacgcatttccccggtcatacccggcttcgggctgaccctgggatacaccctggtgtacctcagcctgctggtcctgatcccgctgggggccatgttcctcaagaccacccagctcagctgggagcaattctgggccatcatcagcgcgccgcgggtgctcgccgcgctcaagctgagcttcggcaccgcgctcgccgccgccgtgctcaacggcttgatcggcacgctgctggcctgggtcctggtgcgctacgaattccccggacggaagatcatcgatgccatgatcgacctgcccttcgccctacccaccgccgtcgccggtatcgccctcaccgcgctctatgcgccggccggcctggtcggacagttcgccagcgacctcggcttcaagatcgcctatacccccctggggatcaccctggcgctgactttcgtgaccctgccgttcgtggtccgcacggtgcagccggtgctcgccgacattcccaaggaagtcgaggaagccgctgcctgcctcggcgccaggccgctgcaggtgttccgccatatcctcgtgccggcgctgctgccggcctggctgaccggtttcgccctggccttcgcccggggcgtcggcgaatacggctcggtgatcttcatcgccggcaacatgccgatgaagaccgagatcctgccgctgctgatcatggtcaagctggaccagtacgactacaccggcgccaccgccatcggcgtgctgatgctggtggtgtccttcatcctgctgctgctgatcaacctgctgcagcgtcgcatcgaaaccccgtaa

SEQ ID NO: 323193 - DNA, 999 bp, Pseudomonas aeruginosa
atgtcccttcgtcgtttcgccctggccgcactcgccagcgccctggtctccggcccggttgccgcagccacgcaactgctgaacgtttcctacgacccgacccgcgagctgtaccaggcctacaacgcggccttcatcaagcactggaaggcccagggcggcgaggacctgaccgtccagcagtcccacggcggctccggcaagcaggcccgcgcggtgatcgacgggctcaaggccgacgtggtgaccctggccctggccggcgacatcgacgaactgcacaagctcggcaagctgctgccggccgactggcaggcacgcctgccggacaacagcaccccctacacctcgaccatcgtgttcctggtgcgcaagggcaaccccaagggaatcaaggactggggcgacctgaccaaggaaggcgtggaagtcatcacgccgaacccgaagacctccggcggcgcgcgctggaacttcctcgccgcctgggcctgggcgaagaagcagtacggcagcgacgagaaggccaaggactacgtgcaggcgctgtacaagcacgtaccggtactcgacaccggcgcccgcggctcgaccatcaccttcgtcaacaaccagatcggcgacgtgctgctggcctgggagaacgaggcgttcctggcgaagaaggaacagggcggggaaaacttcgagatcgtcgtaccctccatctccatccttgccgaaccgccggtcgcggtggtcgacaaggtggtcgagaagaaaggcacccgcaaggtcgccgaggcctacctgcaatacctgtacagcgaggaaggccagcgcatcgccgcgcagaacttctaccggccgcgcaaccagaaggtcgccgccgagttcgccacgcagttcccgaaactgaacctggtcaccgtcgactccgatttcggcggctggaagacggcccagccgaagttcttcaacgacgggggcatcttcgaccagatctaccaggcgcaatga

SEQ ID NO: 323194 - DNA, 183 bp, Pseudomonas aeruginosa
atgagcgcaaccctcagaagcctggatggccaggacgaagccaccatcctgcgtgaaatccagagtgccctgcgcggcctgcgcttcggcgccgtcgagatcaccgtgcacaacggccaggtggtgcagatcgagcgcaaggaaaaattccgtctgcagcaaccggccgtcaagcaggcctga

SEQ ID NO: 323195 - DNA, 2283 bp, Pseudomonas aeruginosa
atgagcccccgcctgagtgcccttcgcctgagcctggcttatctcgcaatcgccatcgcctgggcgttcctgagcgatcatttgttacaaaaccaggtccaggaccacgaccaactggtgttctggatgaccgccaagcggctgttcttcttcgccgcaaccggcctgctcctgtacctctacctggtacgccagttccgccgcaaggcccaggcctacgacgaactgcacggcagcgagcagcgcctgaaccgcgccctggaagcggtgcgcgacggactctgggactgggacctggtgaccgaccggatgttcgtctcgccgggctacgccgcgctgatcggcctcgctccggaggaactcggcgaccccatcgagacctggaagaagcgcctgcaccccgaagagtacgccaccgtgctggaggcccaccgcaaccacctgcagggcctgaccgacaatctcgaccacatctaccgcctgcgccacaaggacggcgactaccgctggatccactcgcgcggccgggtcctccgcgatgccctgggcaagccgctgcactacactggcgtggcccgcgacatcaccctgcagcggctcaaggaagaccacctgcgccaggccgcggcggtattcgacagcacccgcgagggcgttctggtcaccgatgcccaggcggtgatcgtgcacgtcaacccttccttcgagcgcatcaccggctaccgctccgaagacgtgctcggcaagaccccggcgatcctccgctccggccgccaggaccaggcgttctaccagcgcctgtggctggccctgcgcgagcaggacgtctggagcggagaaatctggaaccggcgcaagagcggcgagatctacccgcagtggctgcacatccgcgtggtgcgcaacgaccagggccagctgacccactacgtcggggtgttctccgacctgagcagcatcaagcgctcggagaacgagctggacttcctcgcccaccacgactcgctgaccggcctgcccaaccgcgtgctgctgcgcgagcgcatcgagcaggcgctggagaacggcaaggaccggacggtggccggggccctgctgctgatcgacctcgaccacttcaagcacatcaacgacagcctcggccatacaactggcgacatgctcctcaaggaggtcagcaagcgcctgcaacaccagctcgacgagcgctgcctgctgtcgcgactgggcggcgacgaattcgccatcctcgtcgagaacgacgacccggaagccgtcgcgcgactctcgcagcgcatcctcgacggtttcaacgcgccgttcgacatccactgccagccgatctatatcagcgcaagcctcggtgtcagcctctacccggaagacgccagcgacgtcgaccacctgatgcaacacgccgacgccgcgctgttccaggccaaggacagcgggcgtaacgcctacgccttctacacccgcgtgctgaccgcccgggcccgcgcccatgtccaggtggaatcggccctgcgccatgcgctggatcacgacgaactgcgcgtccactaccagccggtgcacgacctggccagcgggcggatcgtcggcgtcgagtcgctggtgcgctggcagcatcccgagcgcggcctggtgccgccaggcgagttcgtcccggtggcggaggaatgcgggctgatcgccgcgctggacaactgggtgctcaagcgtgcctgccggcagatgcgcgagtggcaacagcgcggcgtcgagctggagttcgtcgcggtcaacgtctccagccggctgttcaaccgcggcggcctggaggaaaggatcgccaatgccctggaagagtccgggctggagccccgctacctggagctggaagtcaccgaaagcgcggtgatggaggacttcgagcagtccctcaacctgctctgccgcctgcgcatcctcggcgtgaacctggccatcgacgacttcggcaccggctattcctcgctgatgcgcctcaagcggctgccggtgcacaagctgaagatcgaccagggcttcgtcgccggcctgcccggcgcggtggacgacgccgcgatcgcccgggcgatcgttgccctggcgcaaagcatggggctgcgggtggttgccgagggcatcgagcatcaggaccaggcgctgttcctgcgcgaacatggctgcgacttcggccaaggctactggtacggacggccgcaaccggcggaagcgctgcgcttcgacctgccgcccgtggcgctgccggaagactga

SEQ ID NO: 323196 - DNA, 1179 bp, Pseudomonas aeruginosa
atgtggttcaacggttttctcgacctgtcgccgtggcaactggtggcagttaccctggtgctgacgcatatcaccatcgtcagcgtgaccgtctacctgcatcgctattccgcccaccgtgcactcgacctgcaccccgcgctgcagcacttcttccgtttctggttgtggttgaccacagggatgaacacgcgcgaatggaccgctatccaccgtaagcaccatgccaagtgcgagaccgtcgaggatccgcacagcccggtgcacaagggcctgttcaccgtcctgcgcgcaggcgcggagctgtacaaggccgaggcgaagaaccaggacaccctgcgcatctacggcaagaactgcccggacgactggatcgagcgcaatctctactcgcgcttcccgatcggcggcgtggtgctgatggcgctcatcgacctggccctgttcggcgcccttggcctgaccgtctgggccgtgcagatggtatggattccgttctgggccgccggcgtggtcaacggcctcggccacgcggtcggctatcgcaacttcgaatgccgcgacgccgccaccaacctggtgccctggggcatcctcatcggcggcgaagagctgcacaacaaccaccacacctacccgaactcggccaagctgtcggtgaagaagtgggaattcgacctgggctgggcctggatcaagctgttcagcttcctgcgcctggccagggtcgcccgggtcgcgccgatcgcccatcgggtcgagggcaagcacagcctggacatggacaccgccatggcgatcctcaacaaccgcttccagatcatggcgcagtaccgcaagctggtgatcgcgccgctggtcaagcaggaagtggccaaggccgacgagtcggtgcgccacctgttccgccgcgccaagcgcctgctgtcgcgcgagaccagcctgctgcaggaccgccaccacgtgcgcatcgactcgatgctcgcccacagccaggcgctgaaggtgatctacgagaagcgcctggcgttgcagcagatctgggccaagaccagcgccaacggccacgacatgctggcggcgatcaaggactgggtgcatgaggcggaagccagcggtatccagtcgctgaaggagttcgccgcgcaactgaagacctactcgctgcgtcccgcctga

SEQ ID NO: 323197 - DNA, 1386 bp, Pseudomonas aeruginosa
atgttgctggattacctgatcatgctggtctacgccctggccatgctgggcctgggctggtacggaatgcgcaaggcgaagagccagagcgatttcctcgtcgccggacgccgcctcggccccggcctctacctgggaaccatggccgcggtggtgctcggcggcgcgtcgaccatcggtacggtcaagctcggctaccagttcggcctgtccggcttgtggctggtgttcatgctcggcctggggatcatcgtcctcagcctggtgttctcgcggcagatcgcgcgcctgcgggtgttcaccgtgacccaggtgctggagcagcgctaccaggcctcctcgcgcctgatcggcggggtggtcatggtcgcctacgacctgatggtggcggtcaccgcgaccatcgccatcggctcggtcaccgaggtggtattcggcatcccgcggatcccggcgatcctctgcggtggcgggatcgtcatcgtctattcggtgatcggcggcatgtggtcccttacgctgaccgacatcatccagttcgtgatcaagaccgtcggtatcttcctggtcctgctgccgttgtcgatcgacggcgccggtggcctggcgcgcatgcaggaggtgctgccggcgggcttcttcgacctcggccacatcggcctggataccatcctcacctacttcctcctgtacttcttcggcgcgctgatcggccaggacatctggcagcgggtgttcaccgcgcgcagcgagacggtggtgcgctacgccgggcttggcgccggcgtctactgcatgctctacggcgccgcctgcgcgctgatcggcgcggcggcgcgggtcctcctgccggacctggcggtgccggagaacgcctacgccgagatcacccgcgaggtactggcgccgggcctgcgcggcctggtggtggcggccgcgctgtcggcgatcatgtccaccgccagcgggtgcctgctggcagcggccaccgtgctgcaggaagacatctacgcgcgcttcctgcgccccggtaccaccagcgacatccgcctgagccgttgcatcaccctgctgatgggcgtggcgatgctggtcctggcgtgcctggtcaacgatgtcatcgcggccctgagcatcgcctacaacctgctggtcggcggcctgctggtgccgatcgtcggcgcgctgctgtggcgccgggccagtccgcagggggcgatcgccagcatcgtcgccggttgcctggcggtgatcgcctgcatggcccgcgacggcctgctcgccaactcgccgatcgtctacggcctgctggccagcctggcgaccttcgtcgcggtcagcctggccacccgtcctgccgccagcctgcgagcccagccggaatga

SEQ ID NO: 323198 - DNA, 957 bp, Pseudomonas aeruginosa
atgtcgaacgaccatccgcagcccctcgacgccgccgagattccacgcttcgccggcatcccgaccttcatgcgcctgccggcgttcaccgacccggcggcgctgcaggtcggcctgatcggcgtgccctgggatggcggcaccaccaaccgcgccggtgcccgccatggtccgcgcgaggtgcgcaacctgtccagcctgatgcgcaaggtgcatcacgtcagccgcatcgcgccctacgacctggtgcgggtcggcgacctcggtgatgcgccggtgaatcccatcgacctgctcgattcgctgcgccgcatcgaaggcttctatcgccaggtccatgccgccggtaccctgccgctgtcggtcggtggcgaccacctggtgaccctgccgatctttcgcgccctgggtcgcgagcggccgctgggcatggtgcatttcgatgcgcattccgataccaacgaccgctacttcggcgacaacccctacacccacggcacgccattccgcagggccatcgaggaaggtctgctcgacccgctgcgcacggtgcagatcggcattcgcggctcggtgtattcgccggacgacgacgctttcgcccgcgagtgcggcatccgcgtgatccacatggaagagttcgtcgaactgggcgtcgaggcgaccctggccgaagcccggcgggtggtgggcgacgggccgacctatgtgagtttcgacgtcgacgtgctcgacccggccttcgcgcctggcaccggcaccccggagatcggcggcatgaccagcctccaggcccagcaactggtccgcggcctgcgcgggctggacctggtcggcgccgacgtggtggaagtctcgccgccgttcgatgtcggcggcgccacggcgctggtgggggcgaccatgatgttcgaactgctctgcctgcttgccgagtcggccgcgcgaagcgcctga

SEQ ID NO: 323199 - DNA, 963 bp, Pseudomonas aeruginosa
atgggggcgggaatgctgggcaacctcaacgacatcgacctgcgcatgctgcgcaccttctgcgccatcgtcgaggccggcggcttcactgccgcccaggcgcgcctgaacaccagcctgtcgcgcctgagcgtgctggtgcgcgacttggaggtgcgcctgggctattccctgtgccggcgcggcaacggcggtttccagttgaccgaggaggggcaggagctctacgacgccgcgctcggcctgttcagcgacatcgcccgtttccgcgagcaggtccgcggcctcggcgggcgcgatcgcgaggcgttgcacctgggctgcgtcgatggcgtcatcggccagcattgcctgccgttgccgctggccatccggctgtttcgccagcgcgccccggaggtgctgctcaagctgcacacgcggcgtcccgacgaactcgagcacgcggtgctggaagagcgcctgcaactggcggtgggggcctttcaccaccggttgtccgggctctactaccaacccctgttccgcgaggagcagaacctctattgcggcagcgcgcaccccttcttcgcccgggcggacgacgagccgacactggacgagatctgcgccgccgactatgtcggccgcggctacatggcggaaaaccatcgcccgcacgacctgcgcttcaaccaggggaccgacgcctacaccatggaggccatcgctaccctggtcttcagcggcacctacatcggctacctgccgacgcactatgccgccacctgggtcgccgaagggcgcatgcgggcgatccggccacggcaactggcctacgactcggaattccattgcattacccgtcagggacacgaagaacgaccgaccctgaccctgttcctgcgctcgctgttcgaggcgcagaaacaactgggcgtgcaggctccggcgaatacgaacggcatcgctcggcaattgtga

SEQ ID NO: 323200 - DNA, 972 bp, Pseudomonas aeruginosa
atggacgacctaaccggcattcccgaagacccgcaggaggccgcgctggccttgctgcacagccgtgccgaagtggcccggctgaaggagcgcgagcaactcttcagcgccttgctggccagcgtcaactcggtgctctgggcctacgactggcagaaccggcgaatggtctacgtcagtcccgcctacgagaaaatcttcggccgttccgcggcgctgctgctggcggactacgaggaatggcgcaacagcatctacccggacgacctcgactacgccgacagcagcctgctgcaggtgctcgaacgtggcgccgtggaacaacgcgaataccgcatcgtgcgtggcgacggcgaggtccgctggctcaacgacaagtgcttcgtcagccgccagggcgaggcgggactgccgctgatggtggtgggcatcgccgaggacatcaccgacaagaagcacatggagagcgagctgcaacggctggccaccaccgacgtgctgacccagagcagcaaccgtcgctatttcttcgacagtgccgaggcggccttcaaggagtgtcgccgcgaggggataccgttggcgttcctgctgctggacgtcgatgacttcaagaagatcaacgaccgcttcggccaccaggtcggcgaccaggtcctccagcgtatcgcccagagcggcagtgccgcgctgcgccgtggcgacctgttcgggcggatcggcggcgaggagttcgccgtgctgctgcccggctgcgacgagcagaccgcgcgacagatcggcgaacgcctgcagcgcgaggtgcaacgcctgcgcttccaggagggcgagcacagcttcgggatcaccgtcagccagggcctgacggtcctccaggccgatgacgagggactcggtgccctctacagccgggccgacgccgcgatgtactcggccaagcgccagggcaaggactgcatcgtcgtgggctga

SEQ ID NO: 323201 - DNA, 1383 bp, Pseudomonas aeruginosa
atgaagagtcgcaagatcaacaagtcacgactggccctggccatcactgccggtaccctcggtgccctggcgcaacaggcggtcgccgccggtttcatcgaggacagcaaggcatcgctgaccctgcgcaacttctacatcaataccgacaaccgcaatggcaccgcctcgccgagcaagcaggaagagtggggccagggcttcatcctgaattaccagtcgggcttcacccagggcaccgtcggcttcggcgtcgacgcgctgggcctgctcggcgtgcgcctggacggcggcggccgtgccggcaagagcggcctggaccgccagccgggcaccgtgttcccgctggaaagcaacggcgagccggtgcacgacttcgccagcctgggcctgaccgccaaggccaaggtatccaacaccgagttccgctatggcaccctgcagccgaagctgccggtggtcacctacaacgacggccgcctgctgccggtcaccttcgagggcggccaggtcacctcgaccgacctcaaggacttcaccctagttgccggccaactggaacactccaagggccgtaactccaccgacaaccgcagcctgagcatcgccggcgccaacggcagcagcgccagttcgcgcgacagcaacaagttctactacgcgggtggtgactacaaggtcaacaaggacctgaccctgcagtactactacggcaacctggacgacttctacaagcagcacttcctcggcctgatccacaactggcagattggcccgggcgtcctgaagaccgacctgcgcgccttcgacagcagctccgacggcaagaacggcagccgttccggccgtgccgacggctacgtcagcagcggctactacggcagcggcgtgaccaagggcgaagtcgacaaccgcgccttcagcggcctcttcacctataccgtcagcggccacagcatcggcgccggctaccagatcctcaacggcgacagtgacttcccgttcctgaaccgtggcgatggcgaaggttctaccgcgtacctgatcaccgacgtgcagatcggcaagttccagcgtgccggcgagcgcacctggcaggtccgctacggctacgacttcgccaccgtcggcgtgccgggcctgaccttcaacaccatttacctgagcggcgacaagatcaagaccgcccgcggcgaccagagcgagtgggaacgcgatatctccctggcctacgtgatcccggacggcaccttcaagggcctgggcttcacctggaagaacgcctccttccgcagcggcctgccggctgccggttcgagcaacaaccagcgcgaccaggacgagaaccgcctgatcgtcagctacaccctgccgctgctgtaa

SEQ ID NO: 323202 - DNA, 1107 bp, Pseudomonas aeruginosa
atgagcaacccgaccagcaccccacgcgccgacggcttccgcatgcccgccgaatgggaaccccacgagcagacctggatggtctggccggaacgcccggacaactggcgcaacggcggcaagccggcccaggcggccttcgccgcggtggccaaggccatcgcgcgcttcgagccggtcaccgtctgcgccagcgccgggcagtacgagaacgcgcgcgcacgcctcgacgacggcaacatccgcgtcgtggaaatcagcagcgacgatgcctgggtccgcgacaccggcccgaccttcgtcatcgacgacaagggcgatgtacgcggcgtcgactggggcttcaacgcctggggcggcttcgaaggcggcctgtacttcccctggcagcgcgacgaccaggtggcacgcaagatcctcgagatcgaacggcgcgcccgctaccgcaccgacgacttcgtcctcgagggcggctcgatccacgtcgacggcgaaggcacgctgatcaccaccgaggaatgcctgctcaaccacaaccgcaacccgcacctgagccaggcggagatcgagcggaccctgcgcgactaccttgcggtggagagcatcatctggctgccgaacggcctctacaacgacgagaccgacggccacgtcgacaacttctgctgctacgtgcgtcccggcgaggtgctgctggcctggaccgacgaccaggacgacccgaactacctgcgctgccaggctgccctccgcgtgctggaagaaagccgcgacgccaagggacgcaagctggtggtacacaagatgccgatccccggcccgctgtacgcgacccaggaagagtgcgacggcgtggatatcgtcgagggcagccagccgcgcgatccctccattcgcctggccggctcctacgtgaacttcctgatcgtcaacggcggcatcatcgcgccgagcttcgacgatcccaaggacgccgaggccagggcgatcctccagcgcgtgttccccgagcacgaggtggtgatggtcccggggcgcgagatcctcctcggcggcggcaacatccattgcatcacccagcagcaaccggcgccgcgcaaggcctga

SEQ ID NO: 323203 - DNA, 879 bp, Pseudomonas aeruginosa
atgacccgcaacgtcaccgtcgccgccacccagatggcctgctcctgggatcgtccggcgaacatcgcccgcgccgagaaactggtgcgccaggccgccgccaggggtgcgcagatcatcctgatccaggaactgttcgagaccccctacttctgccagaagccgaacccggactacctgcagctggccaccacggtcgaggagaacgccgccatcgcccacttccaggccctcgcccgggagttgcaggtggtattgccgatcagcttcttcgaacgcgccgggcgcgcccgcttcaacagcatcgcggtcatcgacgccgatggcggcaacctcggggtctaccgcaagagccacatcccggacggcccgggctaccacgagaagtactacttcaatccgggcgacaccggcttcaaggtctggcagacccgctacgcacggatcggcgtcggtatctgctgggaccagtggttccccgaatcggcgcgcagcatggccttgctcggcgcggaactcctgttctacccgaccgccatcggtagcgaaccgcacgacgccagcatcagctcgcgcgatcactggcagcgcgtgcagcaaggccatgccggagccaacctgatgccgctggtggcttccaatcgcatcggccgcgaggagcaggatggctacgacatcaccttctatggttcttcgttcatcgccgacccgttcggcgagaaagtcgaggagctgaaccgcaccgaggaaggtatccttgtccacaccttcgacctcgatgcgctggagcgcacccgcagcgcctggggcgtgttccgcgaccgccggccgaacctctacggtccgctgaagaccctggacggttcgctggagtcgtga

SEQ ID NO: 323204 - DNA, 513 bp, Pseudomonas aeruginosa
atgcacggccatacccagcttgccccgcactacttcttccgacagcagcgattgctgcgcgcgctgctgatcgacgaccaggcctggttcgtcctcgacgacttcgcccggctgatcgaacacagccagcccgaacagatgctcgcccgcctggacgacgaccaggcgcgccgggagtcgttgcgttccgaacgtggcgaagaccaggcgcagtggctgatcagcgagtccggcgcgtatgccgcgctgatctaccagcagcgcggcgatggcagcgaattgcgccgctggctcagcggcgaggtggtgccggagttgcgcagcgccaccgacgacagcggcatgccgcgctacgtcaagttgcgctgggagcgccaggtggtgcacatgctcgactggcagggcaagctctgggtgaatttcagcgagatgcccgacctcctcgaacgccagggcgaacccatggtgcaactgggttggcgacgctggttgcgcaagttgcggccgctctag

SEQ ID NO: 323205 - DNA, 798 bp, Pseudomonas aeruginosa
atgactgccaggatctaccgggaagtcgtcaacccgggaaaactcgacgaaacacagaggggaaacctcgcaagcgaactctacgcgattcacgccaggatctttcatggcgtccagtatgaatccttcgctcgcgaggtcatccactccaccgcccgcctcacccgcatcgccatctaccgcaaccgccagcacgagatcgtcggctactgcgccgtgcatttccacgactcggaagtcttccagtacagcaaggcctgcgtgatccgcgccgagtcggggatcctcccggagtaccgcgggagcaaccagagcattcccttccttacccgccaggtgctgcgctacaagttgctcaaccccggcaagcgcctgctgttcctcgacaccctgatccatccctccagctacgccctggtgaccaagtacgtggatgacgtctggccctgccactgcgacctggaaagccaccacgtgaagttcctcgaacacctgatcgcccagttcagcttcaagcgcagcagcaacgatccgctggtggtcgacaccggctggaccaccaccgaggccgatcacgaacgggcacgctgggctacgcacagcaatccgaatgtgcgtttcttcctcgatcggaacccggaatatcacaagggcaacggattgatcacggtattcccgatcaccttgaagaacatctttacggcgacccggcgtttcaagcgcagttcttcggtcaagcgtaaacagcaccagcgttacaacgcggcttcggcgaaagtcgggaatatcgcgttgtaa

SEQ ID NO: 323206 - DNA, 13029 bp, Pseudomonas aeruginosa
atgatggacgccttcgaacttcccaccaccctggtccaggccctgcgtcgccgcgctgtccaggagcccgagcgcctggcgctgcgcttcctcgccgaggacgatggcgaaggcgtggtcctcagctatcgcgatctcgacctgcgcgcgcggagcatcgccgcggccctgcaggcccatgcgcagctgggcgatcgcgcggtactgctgtttcccagcggccccgactacgtcgcggcgttcttcggttgcctgtatgccggggtcatcgcggtgccggcctacccgccggaatcggcgcgccgccatcaccaggaacgcctgttgtcgatcatcgccgacgccgagccgcgcctggtcctgaccaccgctgacctgcgcgagccattgctgcagatgaacgcgcaactgtccgccgccaacgccccgcaactgctctgcgtcgaccagttggacccggccgttgccgaggcctgggacgagccgcaagtgcgtcccgagcacatcgccttcctccagtacacctccggttcaaccgcattgcccaagggcgtgcaggtcagccatggcaacctggtcgccaacgaggtgctgatccgccgaggcttcggcatcggtgccgacgacgtgatcgtcagctggctgccgctgtaccacgacatgggcctgatcggcggcctgctgcaaccgatcttcagcggcgtaccctgcgtgctgatgtcgccgcgctacttcctcgaacgtccagtgcgctggctggaagccatcagccagtacggcggcaccgtcagcggcggtcccgatttcgcctaccggctgtgcagcgagcgggtcgccgagtcggccctgcagcgtctcgacctgagcggttggcgggtagccttctccggttccgagccgatccgccaggacagcctggaacgcttcgccgagaaattcgccgccagccgcttcgatgcgtccagtttcttcgcctgctacggcctcgccgaggcgaccctgttcgtcaccggcggccagcgcggccagggcattcccgccctggcggtggatggcgaggcgctggcgcgcaaccgcatcgccgaaggcgcaggcagcgtgctgatgtgctgcggccgcagccagccggaacacgccgtgctgatcgtcgacgcggcgagcggcgaggtcctcggcgacgacaacgtcggcgagatctgggccgccgggccgagcatcgcccacggctactggcgcaacctggaagcttcggcgaagaccttcgtcgagcgtgacgggcgcacctggctgcgcaccggcgacctcggcttcctccgcgacggcgaactgttcgtcaccgggcgcctgaaggacatgctcatcgtccgcggccacaacctctatccgcaggacatcgaacgcaccgtcgagagcgaggtgccgtcggcgcgcaagggcagggtcgcggccttcgcggtcacggtcgatggcgaggaaggcatcggcatcgccgccgagatcggtcgcggcgtccagaaatcggtgccggcccaggagctgatcgactcgatccgccaggcggtggccgaggcctaccaggaagcgccgaaggtggtggcgctgctcaatcccggcgccttgccgaagacgtccagcggcaagctgcaacgttccgcctgccgcctgcgcctggaagacggcagcctggacagctatgcgctgtttcccggcctccaggccgtgcaggaggcgcagtcgccggcaggcgacgacgaactgctggcacgcatcggcgagatctggaaggcccggctgggcgtggcgcaggtagcgccgcgcgatcacttcttcctgcttggcggcaattccatcggcgccgcccaggtggtcgcccaggtgcgcgacagtctcggcgtcgccctcgacctgcgccaactgttcgaggcgccgaccctgcaggccttcagcgccacggtggcccgccaactggccgccggcctgccggccgaggcaccgatggcgcacctgccgcgcggtgtcgacctgccgcagtcggcggcgcagcagcgtctctggctgacctggcagatcgatccgcagagcgccgcctacaacatccccggcggcctgcgcctgcgcggcgatctggacgaagcggcgctgcgcgccagcttccagcgcctggtcgagcgccacgaagcgctgcgcacgcgtttcctcgagcgcgacggcgcggccttgcagcgtatcgacgagcggggcgagttcgcctggcagttcgtcgacctcgccgcgctggccgagcacgaacgcgccgcggctgccgcgcagcgccgcgaagccgaggcgcagcagccgttcgacctggaaaaggggccgctgctgcgggtcagcctggtgcgcctggacgaacaggagcaccagctctgggtcaccctgcatcacatcgtcgccgatggttggtcgctgaacctgctgctcgacgaattctcgcggctctacgccgaagcctgcggtggccagccggccgacctggcgccgctggaactgcactacgccgaattcgccgcctggcaacggcagtggctggacgcgggcgagggcgcccgccaactggcctactggcgggaacgcctgggcgacgcggcgccggtgctggaactggccaccgaccatccgcgcacggcgcgccaggcgtcgcccgccgcgcgctacagcctgcgggtcgacgaagcgctggcgcgggctatccgcgaggccgcgctggaccatgaggcgagtgtcttcatgtggctgctggcggcgttccaggcgctgctgcatcgccacagcgggcagggcgagatccgcatcggcgtgcccagcgccaaccgccagcgcctggagacccaggggctggtcggcttcttcatcaacaccctggtcctgcgcggcacgccccgggcgcgccagccgttcgccgcgttgctcggcgaggctcgcgaggcgaccctcggcgcccaggccaaccaggacctgccgttcgaccaggtgctcgcagcctgcggccagggcggccagttgttccaggtgttgttcaaccaccagcagcgcgacctgtcggcgttgcgccggctgcccggcctgctcgccgacgagctgccctggcacagccgcgaagccaagttcgacctgcaactgcagagcgaggaggacgctcgcggtcgcctgaccctgaatttcgactacgccgcggacctcttcgacgaggccagtatccggcgtttcgccgcgcaatacctggagttgctgcgccaggtcgcggaagacccgcagcgctgcctcggcgatatcgccctggtcgacgctgagcaggcggcgcgcctcgccgaatggggcagcgcgccctgcgagccggcgcgcgcctggctgccggagctgctggagcggcaactggcgcagtccgccgaacgcgtcgccctggagtgggacggcggcagcctcggctacgccgaactgcacgcccgggccaaccgcctggcccactacctgcgcgacaagggcgtcggcccggacgtgcgggtagcgatctgcgccgagcgttcgccgcaactgctggtcggtctgctggcgatcgtcaaggcgggcggcgcctacgtgccgctggacccggactaccccagcgaacgcctggcctacatgctcgccgacagcggcgtcgagttgctactgacccaggcccatctgttcgagcgcctgcctggcgcggagggcgtcacgccgatctgcctggacagcctcaagctcgacaactggccgagccaggcaccgggcctgcacctgcacggcgacaatctcgcctacgtcatctacacctccggttccaccggccagccgaagggcgtgggcaatacccacgcggcgctggccgagcgcctgcaatggatgcaggccacctacgccctcgacggcgacgacgtgctgatgcagaaggcgccggtgagcttcgacgtgtcggtgtgggagtgcttctggccgctggtcaccggttgccggctggtcctcgccgcccccggcgagcaccgcgatccggcgcgcctggtggaactggtgcggcagttcggggtgaccacgctgcacttcgtgccgccgctgctgcaactgttcatcgacgaacccggcgtcgccgcctgcggcagcctgcgccgcctgttctccggcggcgaggcgcttccggcggagctgcgcaaccgcgtgttgcaacgcctgccggcggtggccctgcataaccgctacggaccgaccgagaccgccatcaacgtcacccattggcaatgccgcgcggaagacggcgagcgttcgccgatcggccggccgctgggcaacgtggtctgccgcgtgctggacgccgagttcaacctgctgccggccggcgtcgccggcgagctgtgcatcggcggcctgggcctggcccgtggctacctggggcgcccggcgctgagcgccgagcgcttcgtcgccgatccgttctcggccgacggcgagcgcctgtaccgcaccggcgaccgcgcgcgctggaacgccgacggcgtgctggaatacctcggccgcctcgaccagcaggtcaagctgcggggcttccgcatcgagccggaggagatccaggcacgcctgctggcgcagccgggggtggcccaggcggtggtggtgatccgcgaaggcgtggccggcagccagttggtcggctactacaccggcgctgccggcgccgaggcggaagccgagcagaaccagcgcctgcgcgccgcgctacaggccgaactgccggaatacatggtcccggcgcagttgatgcgcctggcgcagatgcccctcggcccgagcggcaagctggatacgcgggcgctgccggagccggtctggcagcagcgcgagcacgtcgagccgcggaccgagctgcaacggcgcatcgccgcgatctggagcgaagtgctcggcctgccgcgggtcggcctgcgcgacgatttcttcgaactcggcgggcattccctgctggccacccgcatcgtctcgcgcacccgccaggcctgcgacgtcgaactgccgttgcgcgcgctgttcgaggccagcgaactggaggccttctgcgaacaggtccgcgcagcccaggccgccggacgtaccgacagccacggcgcgatccgccgcatcgaccgcgagcagccggtgccgctgtcctactcgcagcagcgcatgtggttcctctggcaactggagccggacagcccggcctacaacgtcggcggcctggcgcgcctgagcgggccgctggacgtggcgcgcttcgaggccgcgctacaggccctggtgcagcgccacgagaccctgcgtaccacgttccccagcgtcgacggcgtgccggtacagcgcgtacatggcgatggcggcctgcacatggactggcaggacttctccgcgctcgaccgcgacagccgccggcagcacctgcagaccctcgccgacagcgaggcgcaccgtcccttcgaccttgagagcgggccgttgctgcgggtctgcatggtgaagatggccgagcgcgagcactacctggtggtgaccctgcaccacatcgtcaccgaaggctgggcgatggacatcttcgcccgcgaactgggcgcgctctacgaggccttcctcgacgaccgcgaatcgccgctggagccgttgccggtccagtacctggactacagcgtgtggcagcgcgagtggctggagagcggcgagcgccagcgccagctcgactactggaaggcccagctgggcaacgagcatccgctgctcgaactgccgggcgaccggccacgcccgccggtgcagagccaccagggcgacctctaccgcttcgacctgagccccgagctggccgagcgcgtgcggcgcttcaacgccgcccgcggactgaccatgttcatgaccatgaccgccacccttgcagccttgctctaccgctacagcggccagcaggacctgcgcatcggcgcgccggtggcgaaccgcatccgcccggagagcgaagggctgatcggcgccttcctcaatacccaggtgctgcgctgccggctcgacggacagatgagcgtcggcgagctgcttgagcaggtgcggcagaccgtgatcgatggccagtcgcaccaggacctgccgttcgaccacctggtggaagccctgcagccgccgcgcagcgccgcctacaacccgttgttccaggtgatgtgcaacgtccagcgctgggagttccagcagacccggcaactggccgggatgaccgtcgagtacatcgccaacgatgcgcgggcgaccaagttcgacctcaacctggaggtcaccgacctcgaccagcgcctcggctgctgcctgacctacagccgcgacctgttcgacgaaccgcgcatcgcgcgaatggccggacactggcagaacctgctggaggcgctgctgggcgacccgcagcggcgcattgccgaattgccgctgttcgccgccgaggagcggaagcaactgctgctcgccggcacggccggcgaggcagggctccaggacaccctccatggcctgttcgccgcccgcgtggcggccagcccccaggccccggcgctgaccttcgccggacagaccctgagctatgccgaactcgacgcccgctccaaccgtctggcgcgcgtcctgcgcagtcacggcgtcggcccggaagtgcgggtcggcctggccctggagcgttcgctggagatggtcgtcggcctgctggcgatcctcaaggccggcggcgcctacgtgccgctggacccggaatatccgctggagcgcctgcaatacatgatcgaggacagcggcgtacgcctgctgctcagccacgcggcgctgttcgaggccctcggcgagctgccggcaggcgtggcgcgctggtgcctcgaggaggacggcccggcgctggacgccgaggaccccgcgccgctggcagcgctgagcgggccgcagcaccaggcctacctgatctatacctccggctccaccggcaagccgaagggcgtggcggtctcccacggcgagatcgccatgcactgcgccgcggtgatcgagcgcttcggcatgcgcgccgaggattgcgaactgcacttctattcgatcaacttcgacgctgccagcgagcgcctgctggccccgttgctgtgcggcgcccgcgtggtgctgcgggcccagggccagtggggcgcggaggaaatctgcgagctgatccgcgcggagggcgtgagcatcctcggcttcaccccgagctacggcagccagctcgcccagtggctggagagccagggccggcagttgccggtgcgcatgtgcatcaccggcggcgaagcgctgaccggcgagcacctgcaacggattcgccaggccttcgccccggcgtcgttcttcaatgcctacggaccgaccgagacggtggtcatgccgctggcctgcctggctcccgaacgactggaggagggtgccgccagcgtgccgatcggcagcgtggtcggcgcgcgggtcgcctacatcctggatgccgacctggccctggtgccgcagggcgcgaccggcgaactctacgtcggcggcgccggcctggcgcgcggctaccatgagcgtccggcgctcagcgccgagcgcttcgtgcccgatcccttcgctgccgagggcggccgcctgtaccgcaccggcgacctggtgcgcctgtgcgacaacggccaggtggaatatgtcggccgcatcgaccaccaggtgaagatccgtggcttccgcatcgaactgggcgagatcgaggcgcgcctgctggagcatccgcaggttcgcgaagcgctggtcctggcgctcgacagcccgagcggcaagcagttggccggttatgtcgccagcgcggtggccgagcaggacgaggacgcccaggcggcgctgcgcgaggcgctgaaaacgcatctcaagcagcaattgccggactacatggtgccggcccacctgctgttgctcgccagcctgccgctgaccgccaacggcaagctcgaccgccgcgcgctgccggcgcccgacccggcgctcaaccggcaggcctacgaggccccgcgcagcgtgctggagcagcaactggccggggtctggcgcgaggtgctgaacgtcgagcgggtaggtctcggcgacaacttcttcgaactgggcggcgattcgatcctgtcgatccaggtggtcagccgcgcccgccagctcggcatccacttcagcccccgcgacctgttccagcaccagaccgtgcagagcctcgccgcggtggcccggcacagccaggccagccaggccgagcaggggccggtgcagggcgacagcgcgctgacgccgatccagcactggttcttcgacctgccgctggcgcgccgcgaacactggaaccagtcgctgctgttgcagccgcggcaggccattgacctcggtctgctgcgcaagtccctgcaacgcctggtcgaacagcatgatgccctgcgcctggcgttccgccaggtcgacggcgagtggctggcgcagcatcgtccgctgcgcgaacaggaactgctctggcacgttccgatgcaatccttcgacgaatgcgccgatctgttcgccaaggcccagcgcagcctcgacctcgaacaggggccgctgctgcgcgcggtgctggtggacggcccggctggcgagcaacgcttgctgctggcgatccaccacctggtggtggacggggtgtcctggcgggtgctgctggaggacctgcaacaggtctaccgtcagttcgccgagggcgccgaaccggcgctgccggccaagaccagcgccttccgcgactgggccggacgcctgcaggcctacgccggcagtgaatcgctgcgcgaggagctgggctggtggcaagcccggctgggtgggcagccggtcgagtggccgtgcgaccgcccgcagggcgacaaccgcgaggcgctggcggaaagtgtcagcctgcggctcgacccgcaacgtacccggcaattgctgcaacaggcgccggcggcctaccgcacccaggtcaacgacctgctgctgaccgccctcgctcgcgtgctctgccgctggagcgggcagccgtcgacgctggtgcagttggaagggcatggccgcgaggcgctgttcgacgatatcgacctgacccgcagtgtcggctggttcaccagcgcctacccgttgcgcctgaccccggcgcagagcccgggcgagtcgatcaaggcgatcaaggaacagctccgcgcggtgccgcacaaaggcctcggctacggcgtgctgcgctacctcgccgatccggcggtgcgccaggcgatggccgcgctgcccacggcgccgatcaccttcaactacctcggacagttcgaccagagcttcgccgacgccctgttccagccgctggaccagcccaccgggccgatccacgacgagcaggcgccgttgcccaacgagctgagcgtcgatggccaggtctacggcggcgagctggtgctgcgctggacctacagccgcgagcgctacgacgcgcagacggtgaacgagctggcgcaggcctatctcgccgaactgcaggcgctgatcgagcattgcctggaagacggcgccggcggcctgaccccgtccgacttcccgctggcgcaactgagccaggcgcaactggacgccctggcggtgccggccggcgagatcgaggacgtctatccgctgaccccgatgcaggaagggttgctgttacacaccctgctggaaccgggcaccggcatctactacatgcaggaccgctaccggatcgacagcccgctcgatcccgagcgcttcgccgccgcctggcaggcggtggtggcccgccacgaggcgctgcgtgcgtcgttcgtctggaatgccggcgaaacgatgttgcaggtgatccacaagcccggtcgcacccgcatcgagttcctcgactggagcgaactgccggaggacggccacgaggaacgcctgcaagcgctgcacaagcgcgagcgcgaggccggcttcgacctactcgaacagccgccgttccacctgcgcctgatccgcctgggcgaggcgcgctactggttcatgatgagcaaccaccacatcctcatcgatgcctggtgccgtggcctgctgatgaacgacttcttcgagatctacagtgctctcggcgaaagccgcccggcgaacctgccgacgccgccgcgctaccgcgactacatcgcctggctgcaacgccaggacctggagcaatcgcgacgctggtggagcgagagcctgcgcggcttcgagcggccgaccctggtgcccagcgaccgcccgttcctccgcgagcacgccggcgaaagcggcgggatgatcgtcggtgaccgctacacgcgtctggacgccgccgacggcgcgcgcctgcgcgaactggcgcagcgctaccagctcaccgtcaacaccttcgcccaggccgcctgggcgctgaccctgcgccgcttcagcggcgagcgcgacgtgctcttcggcgtcaccgtggccgggcgtccggtgggcatgccggaaatgcagcgcaccgtcggcctgttcatcaacagcatcccattgcgcgtgcagatgccggccgccggccagcgctgcacggtgcgcgaatggctgaaccggctgttcgagcgcaacctggagttgcgcgagcacgagcacctgcccctggtagccatccaggaaagcagcgagctgcccaagggccagccgctgttcgacagcctgttcgtgttcgagaacgctccggtggaagtctcggtactggaccgcgcgcagagcctgaacgccagttccgactccgggcgtacccacaccaacttcccgttgaccgtggtctgctatccgggtgatgacctcggcctgcacctgtcctacgaccagcgctacttcgaggcgccgaccgtcgagcgcctgctcggcgagttcaagcgcctgctgctggccctggccgacggtttccacggcgaactggaggccttgccgctgctcggcgaggacgagcgcgacttcctcctcgacggctgcaaccgcagcgcccgcgactacccgctggagcaaggctacgtgcggctgttcgaggcgcaggtggcagcccatccgcagcgcatcgccgccagttgcctggaacagcgctggagctacgccgagctgaaccgacgggccaaccgcctcggccacgccctgcgcgccgccggcgtcggcatcgaccagccggtggcactgctggccgagcgcggcctcgacctgctcggcatgatcgtcggcagcttcaaggccggtgccggctacctgccgctcgaccccggccatccgacccagcgcctgacccggatcgtcgagctgagccgcacgccggtgctggtctgcacccaggcctgccgcgagcaagcgctggcgctgttcgacgaactcggctgcgtcgaccggccgcgcctgctggtgtgggacgagatccagcagggcgagggcgccgagcacgatccgcaggtctacagcgggccgcagaacctcgcctacgtgatctacacctccggctccaccggactgccgaagggcgtgatggtggagcaggcgggcatgctcaacaaccagttgagcaaggtcccgtacctggaactggacgagaacgacgtgatcgcccagaccgcctcgcagagcttcgacatctcggtctggcagttcctcgccgcgccgttgttcggcgcccgcgtggcgatcgtgccgaacgccatcgcccacgatccgcagggcctgctggcgcacgtcggcgaacagggcatcacggtgctggaaagcgtgccgtcgctgatccagggcatgctcgccgaagagcgccaggccctcgacggcctgcgctggatgctgcccaccggcgaggcgatgccgccggaactggcgcgccagtggctcaagcgctacccgcggatcggcctggtgaatgcctacgggccggcggaatgctccgacgacgtggcgttcttccgcgtcgacctggcctccaccgagagcacctacctgccgatcggcagtcccaccgacaacaaccgcctgtacctgctcggcgccggcgccgacgacgccttcgaactggtgccgctgggcgcggtgggcgagctgtgcgtggccggcaccggcgtcggtcgtggctacgtcggcgatccgctgcgcaccgcccaggccttcgtcccgcatccgttcggcgcgccgggcgagcgtctgtaccgtaccggcgacctggcgcggcggcgcgccgacggagtgctggagtatgtcgggcggatcgaccaccaggtgaagatccgcggcttccgcatcgagctgggcgagatcgaggcgcgcctgcacgaacgcgccgacgtccgcgaggcggcggtggcggtgcaggaaggggcgaacggcaagtacctggtgggctacctggttcccggcgagacacagcgttccagcgccgactcgccggccggactgatggtggagcagggcgcctggttcgagcggatcaagcagcaactgcgcgccgacctgccggactacatggtgccgctgcactggctggtgctggaccggatgccgctcaacgccaacggcaagctcgaccgcaaggcgctgccggcgctggacatcggccagatgcagaaccaggcctaccaggccccgcgcaacgaactggaggaaaccctggcgcggatctgggccgaggtgctgaaggtcgagcgggtcggggtgttcgacaacttcttcgaactcggcgggcattcgctgctggccacccagatcgcctcgcgggtgcagaaggccctgcaacgcaacgtgccgctacgggcgatgttcgaatgcaccacggtggaagagctggccagctacatcgagtccctggccccgagtgagatcagcgagcagaaggccgagcgcctgaacgacctgatgtcgaagctggaaatgctctga

SEQ ID NO: 323207 - DNA, 765 bp, Pseudomonas aeruginosa
gtgagcccggccgtttccctgcaattgttctgcctgccttattcgggggccagcgccacgctgttccgccgctggcagcccagcctgccgggctggatccgcttgctacccctggaattgccggggcgcggccttcgcttcggcgaggccctgcataccgatgccgccagcctggtcgcgcaattggccggcgagctgcaaggcaccctcgatagcgcttctccctacgccttcttcggccacagcctgggcgggctgctggccttcgaactggcccatgccatgcgtcggcgcggcctcgaagggccgctggcgctattcctctccggcgtatccccgcccgccgaaaacgatgtcagcggctaccggcgcgccaaggccgacgccgaactggttgccgcgttgcgcgactacaggggtactccggaggccgtcctcaacgatccgtcgctgatgcagatgctgttgccagtggtgcgagcggactttctcgtcaccggcagctaccgctaccaggcgcatgggccgctggacgcggcgctgcacctgttcggcggacgcgaggacagcctgcgcagcgccgagttgctcggctggctgcatgaggccgggggcgacttcaccctcgacctgctcgacgggcagcactttttcatccgtgaacagcaggggcagttgctgcgcctgctgcgtcgctacgccggccagcatctgctgcgctggcacaaggacaaggtccggggaagcatgcgcgccgccagttga

SEQ ID NO: 323208 - DNA, 564 bp, Pseudomonas aeruginosa
atgtcggaacaactgtctacccgcagatgcgataccccgctcctccaggcattcgtcgataaccgtacgatcctggtgaagatcgccgcccgcattaccggttgccgctcgcgagccgaagatgtggtccaggatgcgttcttcaggctccagtcggcgccgcagatcacttcgtcgttcaaggcacagctcagctacctgttccagatcgtccgcaacctggccatcgatcactaccgcaagcaggcgctcgaacagaaatactcggggccggaggaagaaggcctgaacgtggtgatccagggcgcctcgccggaaacctcgcacatcaactacgcgaccctcgaacacatcgcggatgccctcaccgagctgcccaagcgcacccgctacgccttcgagatgtaccgcctgcacggcgcgccacagaaggacatcgccaaggaactgggcgtctcgccgaccctggtcaacttcatgatccgcgacgccctggtgcactgccgcaaggtcaccgccgagcgccagggcgacaacatcacccatctcagcgcccgccgctga

SEQ ID NO: 323209 - DNA, 462 bp, Pseudomonas aeruginosa
atgcttccgtccccagcctccagcctgtcgtttccgtcgcccctcgagcgccgcgaggccgatccatatgcccgctgcgacaggcagcggcctgcgtgcaacgagtcgcacgagccggcgcaggagcgtcctgaacctgtcgcgacctgcgcattcatcgaggaggagcgccggcgtggcgatcccacgggcttgctttacgcccttgggccgcgggagcggggagagccggagcgggtggcggagtggttggcggcgctggtccaccacctggacggtcccgttgagccgccgaggacaacgctgggaaaggagcgctgcgaaaccgcgccgggcctttgccgctgctgcggccaacccttcgattttcgccacaagcgcgcggcgctgttgctgctgggaacccatttcgccgccagggccgaggcgcaggcggcgtcggtgcgccgctaccggcgctga

SEQ ID NO: 323210 - DNA, 915 bp, Pseudomonas aeruginosa
atggactcctatggcgatacctcgggccgcatcggtcgcgactggctcgatcgacacgacgaagagctggagcaggaactgctcgacgacgagctgaacctggacgagctgttcggtcccgagcaggaggatgcgcccggcgaattgagtcggcgccgctatttccgcgaactgttccgcctgcaacgggaactggtgaaactgcagaactgggtggtgcacaccgggcacaaggtggtgattctcttcgagggacgcgacgcggcgggcaagggcggcgtgatcaagcgcatcacccagcgcctcaacccgcgggtctgccgggtcgccgcgctgcccgcgccgaacgaccgcgagcagacccagtggtatttccagcgctacgtctcgcacctgccggccggtggcgagatcgtcctgttcgaccgcagctggtacaaccgtgccggggtcgagcgggtcatgggtttctgcaacgacgaacaatacgaggaattcttccgcagcgtgccggagttcgaaaagatgctggcgcgctcgggcatccagttgctcaagtactggttctccatctccgacgccgagcagcacctgcgtttcctcagccgtatccacgatccgctcaagcagtggaagctcagtccgatggacctggagtcgcggcggcgctgggaggcctacaccaaggccaaggaaaccatgctcgaacgcacccacatccccgaggcgccctggtgggtggtacaggccgacgacaagaagcgcgcgcggctgaactgcatccaccacctgttgcagcagatgccctaccgggaagttccgcagccgccggtacacctgccggagcgcctgcgccacgccgattacgtcaggcatccgacgcccggtgagatcatcgtgccggaagtctattga

SEQ ID NO: 323211 - DNA, 246 bp, Pseudomonas aeruginosa
atgcaagcgttttccaaacagcaactcatcgatgcgctgaatgcccagagcagcgacctggccaccctgcagagcctggtcatgggcctctacctgtggattcgcgacagccatggccaggctagcgtcgatgcggccttccagcgcgcccgcgaggaggccaggcaattccgccagcagagcggcaaccaggctgacgagcgattgatcctgcacctggcggaaatcgtccgcgaacaaccctga

SEQ ID NO: 323212 - DNA, 1005 bp, Pseudomonas aeruginosa
atgaacctgttgcaaggcaaatggccgcgcctggccaccctgctggcggtgctggtggcggcggcgctggtgttcctcgcctgggaacgctacacccgcacgccctggacccgtgacgcgcgggtccgcgccgatgtggtgacgctgtcggcggacgtttccgggctgatcacccggttgccgctgagcgacaaccagcccgtggagaagggcgaactgctgctcagcatcgatccggcgcgctatgaactggcggtgctgcgcgccgagcgcgcggtgaacgtggcgcgggcggcgctgggcgagtcgcgcgcggcgatcgaggccagccaggcccagttgcgccagcgccgcagcgaggcgcaacggcgctcggcattgcagaagcgctcgatgctatcggtcgaagagaacgaaaaggcccagaccgacgtcagcctggcccaggccgagttgctgaggaaccaggccagcctcggcctggcccaggccaacgtggagcttgccgaagccgccttgcagcaggcccgtctcgacctcgaacgtacccaggtacgcgccccggtcagcggctacgtgaccaatctgcagacccgcgagggcgactacgcccacgccggggtgccattgctggcgctggtggaccgcgattcgttctatgtcagcggatacttcgaggagaccaagttgccgggcatccgcgtcggcagccgggcgcgggtggaactgatgagcggcgagcgcttcgacgggcgcgtgcagagcatcgcccatgccatcaccgaccgggagaatgccgagggctcgcgcctgctggcgaacatcaacccgagctatacctgggtcaagctggcccagcgaattccggtgcgcatcgccatcgatcccgcctatcgccagcgcaacaccttgcgcgccggcgtgaccgcgaccatccgggtgctgcccgcggaggacaccgcgaaagtcgattccgcggcgcccgggactgccttgcggccttga

SEQ ID NO: 323213 - DNA, 210 bp, Pseudomonas aeruginosa
atgcccgctgatgtcgaggtcgggggcgcctacctgccgccgatcgcccaggcgctgctgctggcctggctgatcctgctgctgctcaacccgctgttgcggcgcttcggcgtgttgcagcgggtctggcacgaagcgctgttccagggcgcgttgtactgcgcgatctgcgccggtctgatcctgtggatgggagagatgtcccgatga

SEQ ID NO: 323214 - DNA, 2175 bp, Pseudomonas aeruginosa
atggaagggctgaaattctacgcccgcttgctctggcggccgccgcgggaaaccctgctgttcgccctgcgcaccgtcgccgccgggctgctgaccctgtacctggccttcctcttcgacctggagcagccgaagtgggcgctgatgaccgtggtcatcgtcagccagccgctggccgggatggctctcaagcgcagtttcgcccaggtcctcggtaccttcgctggcgccgtggtggcggtgctgatcatggcgctgttcgcccagcaaccgttgccgttcttcgtcgccctgggactctggctggcgctctgcaccgccggcggcaccttgctgcgctacaccgactcgcacgccttcgtgctcagcggcttcaccgcggtgatcgtcgccgtgctgtcgattcccgatccggaaaacaccttcatgctcgccgtggtgcgggtcaccgagaccctgctgggcgtcgcctgcgtggccctggtcagcctgctcagcgcgcgaccgcaggcggtggcgaagggctacttcgcccaggtcgacggcctgatccgcagtaccgcgcggcacgccgcggcggtgatccgcggcgacgagggcgacgagtcgttcaaccagcggcagatgcaactggtcgccagcatcaccgcgctggacggcctgcgccggcacctctatttcgacgcgccgaacctgcgccgcgccgatggcctggtgcagttgctgggtaacctgctggtgctgatggcctcgcggctgttgctgctgcgccagcatcgcctgctggtgcgagcgcactgggtcgggccgctgccggcggatatccaggcgctgctggatcgcgcgttgcgggtgctggacgcgctggccgagcaggggcgggcggtaccctccgaggtgctggaggagttccaggcggtgcgccaggccttcgatgccgcggcgacgcgcgcggagtcctacgacgaggcgctgagcccggcgctgcgcccgcaggtggcgatcctgcgctgggaatacgcgcggctgttccagcgcctgggcgaagtgctcgaactcaacgatgcgatccagtccggccgccaggccagcagtttctaccgccgtggccaggcgcaggcgctgcacctggactgggcgctggcctcgatgaacgccgtgcgcgctttcgtcgccttgtcctgcgccgcctggctgtggatcaccagcgcctggaacggcgccctcagcagcctgctgctggtcggcgtgatgtgctcgctgatggcgaccttcccgcgtccgctgctggcggcgcagaacttcctgcgcgggctgctgctggcgatcctgatctcggcggcgctgctgttcgtgctgttaccggcatccgccgaattcgagtggctggcgttgtggatggcgttgctgctgtacgtggtcgcggtcggcctgagcagcccgctgagcgccgggatcgccatgggtatcggcctggagaccctgctgatggtggcgccgcagaatatcgcggtctactacagcaacgcttcgcagtggttcgagttcgtcggcggcttcctcgccgcggcggtcctcgccgtgctggtgttcgccctggtctatccgttccgcgccggcccgcgcctgcgccggctgctctacctgtcgcgccaggacgtcgcggaaatgtcgcgttgcgaggccagcgaggcgcagcgctttgccttcgagacgcggatgatcgatcgcctggcggtgatggtcggcctgctgccggcgagccaggagccggctgcggcggaacgtttccagtgcgccctgggctgcgtggtgatgggcgtggcgttaaaccgcctgcgcgagccgctgcatgacgccggggtggtgccgctggagttgcagccgctgctgggcgaggcgctgcgcgaggtcgccgcctacatagccggcggcgcggacgccccgcggcaggacctcgccctggccgccctgcggcgtttcggccggggcctggaggccttgctggcgcagccgtcgaaggacctcggggcgacgcggcagcgcttcatcatgaatgtcgcggtactgatcctgcagcagtcgctgcaacgctatcggacgctgctggaggaggaccgcggcgcaccggcggtcgtcgaagaaccagaagaggagggcggacatgcccgctga

SEQ ID NO: 323215 - DNA, 915 bp, Pseudomonas aeruginosa
atgagcctgcgtttcgacgatatcgaagccttcctcaacgtcgccgaactcaacagcgtgacgtcggcggccgagcgcatgagcctgtccaagtcggtgatcagcaagcgtgtcagcgatctcgaacgacgcctcggcgtccgcctgctctatcgcaccacgcgcaacgtcgagccgaccgaggccgggcatttcttctacaaggccgccaaggcctcgctgcaggaactcaacaacgccgcggagatcgtcgccctgcgcgagaacgacctgtgcggcgaattgcgcatcgtcaccccgatgagcttcggcaccctctggctgtcgccgatcatcgccgacttcatgagccagcacccgcgcctggagatcgtcctgcagatggacgaccgcctcaccgacttcgagaaggaaggctacgacctgagcatccgcgtcacccgcctggacgacagttcgctgatcgcccggccgctggccaacagccagcgggtggtctgctgcagccccgactacgcggaacgccacggcacgctggacaccctcgaacaactgatgcagcacgagtgcctgggctacaacaacgccacgccgagccaggtctggaccttcgaaccggcgttccccggcgccaagccccgtgccgtctcgccacgcggacgcttcagcagcaacaacggccaggccatgcgcgacgccgccctgcgcggccagggactggcgttgctgccgctgttcatcgtcgccgaggacctcaagaacggccgcctggtggacgccgcgcccggcctgcgcccactcgacgacgtgatctacgcgatgtattcgcgggcggcggcgatgtcgccgaaggtcaaggcgttcatccagcatctccagcaggcgctgtcgatcccgccctggggcaacggctga

SEQ ID NO: 323216 - DNA, 270 bp, Pseudomonas aeruginosa
atgatcgtgcgtaccctgctcatcgccgccgccctgctcggcggcaccgcccaagccgccgaaagcaccgacctgtgcggcgccaacctgcagaagctggacgatatcctcgccgtgcgcggcaagacctcggtcaccggtgcgcgggtcaccgaggtcaaggaactccaggccaaggccaggcaggaccaggccagcggcgacaccaagggctgcatcaccgtcaccacccaggccctgcagatcctgcagaacaccgggaagaaatga

SEQ ID NO: 323217 - DNA, 546 bp, Pseudomonas aeruginosa
gtgaggcaggcacaaacgcgacgcaacggctggcgctggctggccctggcggtcggcacgctgtccgcgctgagcctggccgaggcgtcgatggcgcgctggccggcgggctggcaggtcagcgacctgcccgccgcgcagcccggccaggccggcgccggccagcgccagcgcgcggtcaagttgcaggcagacggctcccaggcactggtgatggaagtgacgcggatgcccctgcagagcgggcaggcagtgaacctggagaaagtcctcgggcacatgcgcaagctggtgcagatcgagttcctgcgcaacggcctgcagaccgcctgcacctcgccgcagccgtccaccaccggcgggctggcggcgctggagaccacctgcaccattcgccagcgcggcgccgtggtgatgaagcagaccttgctcgccgcggccggcaagacctcggcctattcgctgtcctatgccggcctggccgaggcctacgacgccagccaggcggaaatccgcgcggtacgggaaagcctgcgcttcgagtga

SEQ ID NO: 323218 - DNA, 1986 bp, Pseudomonas aeruginosa
atgagcgagccgaccgcccacggcagccatggcggctgcgcgcatcaccatcatcacctgccgttcggcggcggcctgctcagccgcgacgagcagcgccgcgccgcgcgccagctgagcctggcgatgctcgccctcggcctgttgctgctcggcctggcctggcgctggctggcggcggaccaggccggggtcagccagatcctgctcggcggcgcgtcgctgctggtggcgcttccggtggcccgctcggcctgggacagcctgcggcatccgagcctgcacggcgtcaccgaccagttgatcgcgctggccatgctcggcgcctgggccagcggcgacctgctgaccgccgcgctgctgccgatcatcatgatcttcggccacgtgctggaggagcgcagcgtgatcggctcccaggaggccatcgccgccctcggcgagctgacccgcagccatgcccggcggatcgaggccgacggcagcctgagcgaggtggacaacgccagcctgcgagcgggcgaccaggtggaagtgcgcgccggcgaccgggttccggccgacgggcgggtcctgcagggccaggccagtctcgacaccgcgccgatcaccggcgagtcggtgccgctcgaggtggcgccggggatggaggtctacggcggcgcgatcaacctcgacggcctgctgcgcatcgagataacccgtaccggcgaggcctcgaccctgggcaaggtgatcggcctgatgcagcaggccgagcgcgccaagccgccgatcacccgcctgctggagcgctacgccgggcagtacatgttgctggtgttgctgatcgccgcggtcacctggttcgtcaccaacgatgcccaggccatgctcgccgtgctggtcgccgcctgtccctgcgccctggtgctgtccgccccggccacggctatcgccgggatcgccgtggccgcccgccacggtatcctgatccgcagctcggccttcctcgaggagctggcggacctgacttcgctggtggccgacaagaccggcaccctgacccatggcagcctgcgcctgcaggcgctgcgcctggccgatgccgccgaggaggcgtcggtgctgcgcctggccgccagcctcggtgccgccagcagccatccggtgagccgagcgctggcagccctggcggcgcacgatgcctatcatccattgagcgatatccgcgaacgccaggggttcggcgtggtcgcacgaacagcggcgggcgaagccgccctcggccggcccgaactgttccagcaactgggcatcgacgccggcgaggtgccggcgcacgagggaccgatcgccggaatcgccctggacgggcgcttcctcggctggctgctgctggccgacagcgtacgcgcggaggccgccgaggccctggccgatctgcgcgaactgggtctgggccggcaactgctgctgaccggtgatcgccaggcggtggccgacgccgtggccaagcaggtggggattcgccagttggtggcgcaggcgttgccggaggacaagttgcgccaggtcggcgcggagatcggcagcggtttccggccgatggtggtcggcgacggcatcaacgattcgctggcgctgaaggccggtgtggtcggggtggcaatgggtgccggcggcgccgacatcgccctggcctcggcggatatcgtgctgatcggcagcgacctgcgccggctcggcacctgcgtgcggctcagccggcaatgccggcggaccctgcaggtcaacgtggcgatcggcctcggctggaccctggcgatcgtcgccgcggcagcctttggcctgctcggcgcggccggggcgatggtcgcggcgctgctgcacaacctcagcaccttgctggtgctgggcaatgccggacgcctgctgcgtttcgaggagcccctcgggcagccccggccggccgtggagggacgcgaagaggagggtacaccgtga

SEQ ID NO: 323219 - DNA, 435 bp, Pseudomonas aeruginosa
atgacggcaggcggtattccattcacgggcaacggtgcgcggctatcacccggcagggccctgctgtgcgggctggcgctgttgctgtgcggcggcgaggcgctggcgcggcagttgccgagcgacatgctggtgggcttcgtggccagcgcgcagtacccggtcatcaccctgaagaagcccaagcagagcctgctgcgcagcgtgctcaccctggggctggggaagaagaccgtcagctattcggtggcgccgtcggtgcgcatccgcacggcgcagaacctgttcatcgtctatggccgcatgccccagctcaagggcagtttcgtcggcctgaagagcgacaacaacgggcaggtcaagcagatctgggagctcaccgagaaggaagccctggactacgtacgccggccggacgcgcgcttcccgcaatag

SEQ ID NO: 323220 - DNA, 1041 bp, Pseudomonas aeruginosa
atgagcggcgaagcgcgcgaggggctgcgcagcccctggctgcaggccggacgcctggcgttcctcgcactgttcggcgtgaccctcctggcggcgctggcctgggcgttttccaacgtccgccagatcggcccggagaaccgcgccgtagtgctgcgcctgggcgcgctggagcgcctggccggtcccggcctgctgctggcctggccgcagccgctggagcaggtggtgctgctgccgtccgccgaacaggtgatcgaacgccgcgtcgagggcctgctgcgttccgagcaggcgcgtcgcgccgacctcgacgtcagcctgtccagcgacgcgctggccggctccggctacctgctgaccggcgacgccggggtggtgcaactggacgtgcgggtgttctacaaggtcgacgacccgtacgcctacgtcctccagggcgcccacgtgctgccggcgctggaccggctggtggcgcgcaacgccgtgcaggtctgcgccgcgcgcgacctggacaccatcctggtggcgcgcccggagttgctcggcaacgacagcgcggtcgccgagcgccgcgaacgcctgcgcggcgacctggtgcagggcatcaaccacagcctggcggcgttggccgcggccggcagcgggctgggcatccagatggtgcgggtcgacgtgcagtcgagcctgccgcgcaatgcggtaagcgccttcaacgcggtgctgaccgccagccaactggccgagcagaacgtcgccaaggcgcgcaccgaggcggagaaactcacccaggccgccaccgagggggccgaccgcaccctgcagctcgcccgcgccgaggccggcgaacggctggcccaggcgcgccgcgacaccgccagcatcgttggcctggccccggcgctgggcgcgaccgatgccggcctgctctggcgcctgtaccgcgaacgggtgccggcgatcctcggcaaggccggttcggtcggcagcgtcgatccgcgcgacgatggccgcctgattctgcaaggtgggcagccatga

SEQ ID NO: 323221 - DNA, 1038 bp, Pseudomonas aeruginosa
ttgagcctcggtcactcccactcgcacagccaccacgagcatcatcacgatcacgatcacgatcacgatcacgatcacgatcacggccatggcgcacaggccgcgccgccctggcgccggctgctggtcgccgcgctgctggtgctgttcgccgtcgccgccgcttgcctggtgcaggtacgttccggcgaggcgatggtcatcacccgtttcggcaacccggcgcgggtcctgctcgaaccgggcctggcctggcgcctgccgttgccgttcgagagcgcgatcccggtcgacctgcgcctgcgcaccacctccagcggcctgcaggacgtcggtacccgcgatggccttcggatcatcgtccaggcctacgtggcctggcaggtccagggcgacgccgacaacgtgcagcgcttcatgcgcgcggtgcgcaaccagccggacgaggctgcccggcagttgcgcaccttcgtcggctcggcgctggaaaccaccgccagcgcctatgacctggccgacctggtgaatacggaggcgtcgcgggtgcgtatcggcgacttcgaagcgcgcctgcgcgaacagatcgaccatcagttgctggcgacctacggggtcaaggtggtgcaggtcggcatcgagcgcctgaccctgcccaaggtgaccctcggcgccaccgtcgaccgcatgcgcgccgagcgcgagaccatcgccaccgagcgtaccgccgagggccgtcgccaggccgcggagatccgttcggcggcggagcgcgacgcccgggtgatccaggccgaggcttcggtgaaagccgcggagatcgaggcccaggcacgggtcgaggcggcgcgcatctacggcaaggcctacgccggttcgccgcagctatacaacctgctgcgctcgctggacaccctcggcaccatcgtcaacggcgatacccggctggtcctgcgcaccgatgccgcaccgttccgcgtgctggtcgacgggccgccggcgctccccgccgaagcgccggccaacgggcgccggccatga

SEQ ID NO: 323222 - DNA, 1557 bp, Pseudomonas aeruginosa
ttgtgcctggtagccgccggctggcgtctcgacctgccgccggccagttccgggcaagcggccgacctcgccatcgggatctgcctgctgctggccttcgcggtgctggtgctggaacgtcgcttcgccagccaagggccggcgcagtggccggaagccccggccctcgggcaactggcgcgggcgctgatcggtaccctggtgctggccgccctctgtctgttcctggctcgccagggacacccctgggccccgcgcctggcggtactgctcggcctgttgccggcggcgctggcgttggagttgctgggcagggcgatcctggcgatgttcgcgccgcagcgtgccggcctcgaaccgcgcctggtcgccaccagcctgctggccgacctgttgcgctggccgccgcgtcccctgcagcgtctgcagcatgagttgcaccagcgcttcggcatcgacctgcgccaggtctgggccttcggtttcatgcggcgggcgttcctgccggtgctggcggtggtgtcgctgagcggctggctgctcagcggcgtacgcgagatcggcatggatgcacggggtgtctacgagcgcttcggcaagccggtcgcggtgctcggccccggcctgcacctggggctgccctggccgctggggcgggtgttggcggtggagaacggggtggtccacgagttggccaccagcgtcgccgccggagacggcggagccgagccgctcgctcccgccgaaggtccggccccggatagcgccaaccgcttgtgggacgcctcccacgtcagcgagaaatcgcaggtcatcgccagcctggccgaccgtcggcagagcttccagatcgtcaacatggacgtgcgcatcgtctaccgcatcgctctcgacgacgcggcagcgctggcggcgacctaccgcagcgccgacgtgccgacgctggtgcgcagcaccgccagccgcgtactggtgcatgccttcgcctcgcggaccctcgatgaggtcctcggcgagcagcgcgcgggcctggccgagcagatcggccaggccgtgcaggccgatctcgaccgcctcggcagcggcgtcgaggtactgggcgcggcggtcgaggcgatccatccgccggccggtgcggcgaacgcctaccacgcggtgcaggccgcgcagatcaccgcccaggcgctgatcgcccgcgagcgcgggcaggccgccgcgcagcgcaacgaggcgcaactacaggccagcgtggcgcacgaccgggccagcgcgcaggcccgcgagaccctggccgccgcgcaggccgccgaccggcgcttcgccgccgagcgggaaggctatgccgacgccggccaggctttcctgctggaggcctactaccgccaactcggacgcggcctgggcaaggccaacctgctgctcatcgaccaccgcatcgctggcgccggcgcgccgaccatcgacctgcgcagcttcggcctcggccgcctggattccccgtcttcgtcccgtccgtccgccgctccggcgtccgcggccgggcaatccgcaccatga

SEQ ID NO: 323223 - DNA, 651 bp, Pseudomonas aeruginosa
atgaacccgatgacccgccgccacacctggacccgcctggcctgcgcactttccctcggcgtcgccgcattcgccgcgcaggccgacgagggcgccctgtacgggccccaggcacccaagggctcggccttcgtccgcgcctacaacgccggcaacagcgaactcgacgtgtcggtcggcagcaccagcctgaacgacgtcgcgccgctcggttccagcgacttcaagttcctcccccccggcagctacaccgcccaggtcggccagcagagcctgccggtcaagctcgacccggacagctactacaccctggtcagccagcccggcggcaagccgcagctggtggccgagccgccgttcaagaacaagcagaaggcgctggtacgggtgcagaacctcagcggctcgaagctgaccctgaagaccgccgacggcaagaccgacgtggtcaaggacgtcggcccgcaaagccacggcgaccgcgagatcaacccggtgaaggtgaacctggcgctgttcgacggcagcaagaaggtcagcgacctgaagccagtcaccctggcccgcggcgaggtggtctgcctgtacgtcaccggcagcggcggcaagctcgcgccggtctgggtcaagcgcccggtgaaggcggactga

SEQ ID NO: 323224 - DNA, 1176 bp, Pseudomonas aeruginosa
atgacacagagcatttcccgccccctgcaatacgcctatatcgccgccttcggcgggctgctgctggggctcgccggatggtcgctgaagagcgtgccgggcttctccgccgcggccgatacgccactgctcaacggcaagctggcgcacgccttcgaagcccactacgacaaggaattcccgatcaagcgcctgggcaccaacctctgggccgcactcgactacacgctgttccacgaaggccgccccggcgtggtgatcggcaaggacggctggctgttcaccgacgaagagttcaagccggcaccgagcggccagcaactggaagacaactgggcactggtacgcggcgtgcagcgggagctgaaccggcgcggcgtcaagctggtgctcgcggtgatcccggccaaggcccgcctgtatcccgagcacatcggccgcgagcagccggccgcgctgcacgacagcctctaccaggacttcctggcccgcgcccgcgccgccggcatcgacagtcccgacctgctcggcagcctgcgccaggccaaggacaacggcgcggtgttcctgcgcaccgacacccactggtcgccgctcggcgcggaaaccgtggcccagcgcctcggcgcggagatccgcgagacgcacctgctggatgtgccggcgcagaacttcgtcacccgcgtcggcgaagaacgcacgcacaagggcgacctgctcagcttcctgccgctggacccgctgttcgacgaactgctgccgcgtccggagcagttgcagcaacgcaccaccgaagccgcgccggcactgccgggcggccagcagtccggcgcgggcgacgacctcttcggcgatagccagcaaccgcgcctggcgctggtcggcaccagctacagcgccaaccccaggtggaacttcgagggcgcgctgaaacaggcgctgtccgccgacctgatcaattacgcgaaggaaggcaagggccccctcgaaccgatgctggaactgctgcaggacgaaggcttccgcaaggacccgccgcaactgctggtctgggagtttcccgagcgctacctgccgatggccagcgacctcagccagttcgacgccgactgggtcgcccagctgaaggccagcggcggccgcgatgagcgcctggccgccagccgcaacgattga

SEQ ID NO: 323225 - DNA, 1563 bp, Pseudomonas aeruginosa
atggtcttttcttcaaacgtgttcctgttcctgttcctgccggtctttctcggcctgtactacctgagcggcgaacgttaccggaacctgctgctgctgatcgccagctacgtgttctacgcctggtggcgggtggacttcctcctgctgttcgccggggtcaccgtcttcaactactggatcggcctgcgcatcggcgccgccggcgtacgcaccagggccgcgcaacgctggctgatcctcggcgtggtggtcgacctctgcgtgctcgggtacttcaagtacgccaacttcggcgtcgacagcctcaacgagatcatcacctcgttcggcatgcagccgttcgtgctgacccacatcctgctgccgatcggcatctccttctacaccttcgagtcgatcagctacatcatcgacgtctaccgcggcgataccccggcgacccacaacctgatcgacttcgccgccttcgtcgcgatcttcccgcacctgatcgccggcccggtgctgcgcttcaaggacctggtcgaccagttcaaccaccgcacccacaccgtcgacaagttcgccgaaggctgcacccgcttcatgcagggcttcgtcaagaaggtgttcatcgccgacaccctggccgccctcgccgaccactgcttcgccctgcagaacccgaccaccggcgacgcctggctcggcgccctggcctacaccgcgcagctctacttcgacttctccggctacagcgacatggccatcggcctcggcctgatgatgggcttccgcttcatggagaacttcaaccagccctacatcagccagtcgatcaccgagttctggcggcgctggcacatcagcctgtcgacctggctgcgcgactacctctacatcagcctgggcggcaaccgcggcagcaccttccagacctaccgcaacctgttcctgaccatgctcctcggcggcctgtggcacggcgccaacttcacctacatcatctggggcgcctggcacggcatgtggctggcgatcgagcgggccctcggggtgaacgccgcgccgcgcgtgctcaaccctttgaagtgggcgttcaccttcctcctggtggtgatcggctgggtgatcttccgcgccgagaacctgcaggtcgcctggcgcatgtacgaagccatgttcagcttcggcacctggcagctctccgaactgaaccgcgccagcctcaccggcctgcaggtcggcaccctggtcctggcctacctggtgctggcgttcttcggcctgcgccagttctacaaccagccattgcagaccaaggcgcccaaggccgcggcgaacagcgacgaagtggccgccgacggcccggccagtgcccagccgcgcgccccgcgcgaggccgccggcgacccggcggcgatcgcctactcgccgagcggcgcgctggtctaccagccgagctggctcagccagttgcccgtcctggccacccgcctggcgctgctcctgctgttcgccgcctcggtgctgaagctctccgcgcagagctactcgccattcctctacttccagttctga

SEQ ID NO: 323226 - DNA, 1104 bp, Pseudomonas aeruginosa
atgaaaacgtcccacctgatccgtatcgccctgcccggtgccctcgccgcggcattgctcgccagccaggtcagccaggccgccgacctggtacccccgcccggctactacgcggcggtcggcgagcgcaagggcaacgccggcagctgccccgcggtgccgccgccgtataccggcagcctggtcttcaccagcaagtacgaaggctccgattcggcgcgggcgaccctcaacgtcaaggcggagaagaccttccgctcgcagatcaaggacatcaccgacatggagcgcggcgccaccaagctggtcacccagtacatgcgcagcggccgcgacggcgacctggcctgcgcactgaactggatgagcgcctgggcccgcgccggcgccttgcagagcgacgacttcaaccacaccggcaagtccatgcgcaaatgggcgctgggcagcctctccggcgcctacatgcgcctgaagttctccagctcgcggccgctcgcggcccacgccgagcagagccgggaaatcgaggactggttcgcccggctcggcacccaggtagtccgcgactggagcggcctgccgctgaagaagatcaacaaccattcctactgggcggcctggtcggtgatgtccaccgcggtggtgaccaaccgccgcgacctcttcgactgggcggtgagcgagttcaaggtcgccgccaaccaggtcgacgagcagggcttcctgcccaacgaactcaagcgccgccagcgcgccctcgcctaccacaactatgcgctgccaccgctggcgatgatcgccgcgttcgcccaggtcaacggcgtcgacctgcgccaggagaaccacggcgccctgcagcgcctggccgagcgggtgatgaagggagtcgacgacgaggaaaccttcgaggagaagaccggcgaggaccaggacatgaccgacctcaaggtcgacaacaagtacgcctggctggagccctactgcgccctctaccgctgcgagccgaagatgctcgaggcgaagaaggaccgcgagccgttcaacagtttccgcctcggcggcgaagtgacgcgggtgttcagccgcgaagggggaagttga

SEQ ID NO: 323227 - DNA, 1425 bp, Pseudomonas aeruginosa
atgaaaacccgcacttcccgactgttccgcctgagcgccctggccgccggcctctgcctggcccaggcagccctggccgccgaccccggcgcggcgccgagctaccaggcgctgccggccggcaacctgtgcccggccgccgccgacgactcgcgctacaacaccaagtacctgggcttcttcacccacctggtgcaggcccaggacgactggctgttccgcaccacctacgacctgcgtaccgacttcggcaccagcgccgaaggctggcgcgaactccgcgcactgcgcgacgaactcaagcgcaagggcatcgagctggtggtggtctaccagccgacccgcggcctggtgaaccgcgagaagctcagcccggcggaaaaggccggcttcgactacgagctggcgaagaagaactacctggcgaccatcgcccgcttccgccaggccggcatctggaccccggacttctcgccgctgttcgacgagaaggaggagcacgcctactacttcaagggcgaccaccactggactccccatggcgcccggcgcagcgcgaagatcgtggccgagacgctgaagcaggtgcccggcttcgaggagatcccgaagaagcagttcgaaagcaagcgcgtcggcctgctgtccaagctcggcaccttccacaaggccgccgcgcaactctgcggcaacagctacgccacccagtacgtcgaccgcttcgagaccgagccggtgggcgccagcgacagcggcgacctgttcggcgacggcggcaacccgcagatcgccctggtcggcacctccaacagcggcccggcctacaacttcgccggcttcctggaggagttcagcggcgccgacatcctcaacaacgcggtgtccggcggcggcttcgacagttcgctgctggcgtacatgaccagcgaggaattccacaagaacccgccgaagatcctcatctgggaattcgccacccactacgacatggcgcagaagagcttctaccgccaggccatgccgctggtggacaacggctgctccggccggaagaccgtactcagccgcaaggtcaagctgcgccagggccgcaacgaggtgctgctgaacagcgccgcgctaccgatccgtagcggcagctacgtcgccgacgtgacctacagcgacccttcggtacacgagttgaagaacaccatctggtacatgaacggccgccgcgagcagttgaagatcgagcagtcgaaagccgtcgataccggcggccgctacgtcttccaactgcgcaacgacagcgactgggccgaccagcagttcctttccctggaaatcgaagcgccggaggacatgccccagggcctggaggtccaggccagcatctgccaggcggcgcccgccaaggccagccagtcggtggccgggaggtaa

SEQ ID NO: 323228 - DNA, 1632 bp, Pseudomonas aeruginosa
atgcccgacatttccctttcgatcccccgccgccggctcccgcgcctgcgcccgctggccgcggcagtgctcggcgcggtgctgctgcacggccaggcgtgggcggcgcagccggtggagaaaccgcagccggtcccggcgcaggccggcaacgagccgggcctgacccagggcctgaaggaaaccggcaactacacggtgaccaccgcgccggccgaaccgttgcacctggacccgccgaaactgcccgacctctccggctacaccgccgccgcggtggaagccaagatcgtgcgcaagccgggtggccgcgccagcgtgcagcgcatggtccagcagcagccgctgaaggagttcaccggtggcagcaaccgcctcgccgaatgggtcaagcgccagcgccagatgccccaggcgatcttcatcgaaggcggctacgtgaacctcgcccagctcgccggcaagcttcccgccagcgcgctggaacaggtcgagccgggggtgttcgtcgcccgcctgccgatcgtggtcagccagggcgcgaccctcgacatcgacaagcaggtcaaggaactgcgcctgtcccaggagcgcggcgcgttcctggtcaacgacggcatgctgttcgtccgcgacagcaaggtcaccggctggagcgaatcgaagaaggagccggcctggttcaagacgcccaacgagttccgtccgttcctgatctcctggggcggcgccgaggtgtacctgagcaacagcaccttcaccagcttcggctacaacgcctccaaggcctacggcatctccatctcgcagtacagcccgggcatggacaagcagatgaagcgcccgcgccccaagggctgggtgatcgactcgaccatcgtcgacagctggtacggcttctattgctacgaggccgacgacctggtggtgaagggcaacacctaccgcgacaacatcgtctacggcatcgacccgcacgaccgttcgcaccgcctgatcatcgccgacaacaccgtccacgggaccaggaagaagcacggcatcatcgtctcgcgggaagtcaacgacagcttcatcttcaacaaccgcagctacgagaacaagctttccgggatcgtcctcgaccgtaacagcgagggcaacctggtggcctacaacgaggtctatcgcaaccattccgacggcatcaccctctacgagagcggcgacaacctgctctggggcaaccaggtcctggccaaccgccgccacggcatccgcgtgcgcaacagcgtgaacatccgcctctacgagaacctcgcggcgggcaaccagctgatcggcgtgtacggccacatcaaggacctcaccaacaccgaccgcaacatcgccctcgacccattcgacaccaaggtctcgctgatcgtggtcggcggcaagctcgccggcaacggctccggcccgctctcggtggattcgccgctgagcctcgaactgtaccgggtggcgatgctcgccccgaccaaatcctccggcatcagcctgcccggcgttctcggcgagaagcaggaccagatcctcgacctgctggtgcgccaggacaaggcggtgctgatcgaccccgtggaaagccaggccgaactccaggactga

SEQ ID NO: 323229 - DNA, 1473 bp, Pseudomonas aeruginosa
atgaacagctcccgttccgtcaacccgcggccgtccttcgcgccgcgcgccctgtccctggccatcgccctgctgctcggcgcgccggcgttcgccgccaacagcggcgaggcgccgaagaacttcggcctggacgtgaagatcaccggcgaatcggaaaacgatcgcgacctcggcaccgctcccggcggcaccctcaacgacatcggtatcgacctgcggccctgggccttcggccagtggggcgactggagcgcctacttcatgggccaggcggtggccgccaccgacaccatcgagaccgacaccctgcaatcggacaccgacgacggcaacaacagccgcaacgacggtcgcgagccggacaagagctacctcgccgcacgcgaattctgggtcgactacgccggcctcaccgcctaccccggcgagcacctgcgcttcggccgccagcgcctgcgggaagacagcggccagtggcaggacaccaacatcgaggcgctgaactggagcttcgagaccaccctgctcaacgcccacgccggagtcgcccagcgtttcagcgaataccgcaccgacctcgacgaactggctccggaggacaaggaccgcacccatgtgttcggcgacatctccacccagtgggcgccgcaccaccgcatcggcgtgcgcatccaccacgccgacgacagcggccacctgcgccgccccggcgaggaagtcgacaacctcgacaagacctataccggccagctcacctggctcggcatcgaggctaccggcgatgcctacaactatcgttcgagcatgccgctgaactactgggccagcgccacctggctgaccggcgaccgcgacaacctgaccaccaccacggtcgacgaccggcgcatcgccaccggcaagcagagcggcgacgtcaatgccttcggcgtcgacctcggcctgcgctggaacatcgacgagcaatggaaggccggcgtcggctacgcccgcggcagcggcggtggcaaggacggcgaggagcagttccagcagaccgggctggagagcaatcgctccaacttcaccggcacccgctcgcgcgtgcaccgcttcggcgaagccttccgcggcgaactgagcaacctccaggcagccaccctgttcggctcctggcaactgcgcgaggactacgacgcgagcctggtctaccacaagttctggcgcgtcgacgacgactccgacatcggtaccagcggcatcaacgccgccctgcaaccgggcgagaaggacatcggccaggaactcgacctggtggtgaccaagtacttcaagcaaggcctgctgccggcctcgatgagccagtacgtcgacgagccctcggcgctgatccgcttccgcggcggcctgttcaagccgggcgacgcctacgggccgggcaccgactcgaccatgcaccgcgccttcgtcgacttcatctggcgcttctga

SEQ ID NO: 323230 - DNA, 1428 bp, Pseudomonas aeruginosa
atgaagatgcccatcctccctcccctgcccctggcgtcccggcacctgctgctggcctcggccatcgccctggccgccggctgcgccggactgcccgaccagcgcctggcccaggaggccctggagcgcggcgacctcgccaccgcccagagcaactaccaggccctggccgcgatgggttacgccgacgcccaggtcggcctcgccgacatgcaggtcgccagcggcgacagcgcccagcaggccaaggccgaaaagctctaccgcgaggccgcgcagacctcgccgcgggcccgcgcgcgccttggcaagtggctggcggccaagcccggcgccagcgacgccgagcaccgcgaggccgagcgcctgctcagccaggccttcgaacagggcgaggacagtgccctggtgccgctcatcgtgctctacctgcagtacccgcagtcctggccggaaatcgacccgcagcagcgcatcgaccagtggcgcgcgcgcggactgccgcaggccgacctggcgcagatcatcctctaccgcacccagggcacctacgcccagcacctgggcgagatcgagcaggtctgccagcgctggctgcggcgcatggatgtgtgctggtacgaactggccacggtctaccagatgcagggcaacgcggaaaagcagaaggtcctgctcgaacagctgcgcgccgcctacaaggccggccgggtgcccggcgagcgggtcgactcggtggccggggtgctcgccgacggcgaactcggccagcccgacccgcagaccgcccaggcgctgctggaagagatcgcgccgagctaccccgcggcctgggtcagcctggccaagctgctctacgactatcccgaccagggcgacctggaaaagatgctcggctacctgaagaacgcccaggacgccgcccagccacgcgccgaactgctcctcgggcgcctctactacgacggcaagtgggcgccgcaggacccgcgcaaggccgagcggcacctgctcaaggccgccgccagcgaaccccaggccaactactacctggggcagatctaccgccgcggcttcctcggcaaggtctatccgcagaaggccgtcgaccacctgatcctcgccgcccgcgccggccaggccagcgccgacatggccctggcccagctctggtcgcagggccgcggcatccagccgaaccgggtcaacgcctacgtcttcggccagctcgccgtgcagcagcaggtaccgcaggccagcgacctgctcgggcagatcgaagcgcaactgccgccggccgaacgcagccaggcgcagcaattgctcaagcgcgaacaacagagccgcggcaacaactggcaggccaccgtcagcctgctgcagagccaggactcgccgatcaacgaagaagaaccagaaagcctatga

SEQ ID NO: 323231 - DNA, 1170 bp, Pseudomonas aeruginosa
atgaatacagccgtcaacgtcaacgtcgtgcacgaatccgaagcccagcgccagttcgcccgggtcaagctgccggcgcgcatccgctacatcggcgccaaccgcgaaggcgtcgacgcacgcctgctggatctctccgccggcggcttcgccttcaccgcgagcggcgcaccgatccagcccggcgacctgtacaagggcaagctgctgttccaggtcgacagcatcagcttttccctcgaagtggagttccaggtgcgctcggtggaccccgccagccgccgcgtcggctgcgagttccagaacctcaagccgcgcgaggtggcggccctgcgctacctgatcacctcctacctggccggcgaggtgatcggcgtcggcgacatgctcaacaccctccagcgcgagaacttcaccaaggcccgcaagcagggcggcggcaacggcgggatgggcttcttcggccgggtccgggcggtgaccctgagcaccgcgatcttcgtcgtcggagtcggcgccttcgccttcatcctcaaccagatgtacaacctgtacttcgtcacccatgccgattccggcgtggtcagcgtccccaaccagcagatcaccatgccccgcgagggcaccgtgcagagccttctcgggcccaacgcggaagtcgccaaaggcgcgccgatcgctaccttctcggccaacctgctggacatgctcaagggcaacctgaccgaggagcagctcaacccgggcaacatcgagaagctcttcggccaccagatgaaagggaccctgaccagcccctgcgactgccgcgtggtccagcaactggtagccgacgggcaatacgccaacaagggccaggtgatcttcaccctcgccccgcgcgacagcgtggccagcatcgaggcgcgcttcccctaccgcaacgccgccgagctggcgccgggcacccgggtgaacttccaggtcgccggcgacggcgtcaaccgcagcggccgcatcgtcaacaccgcgccggtggacggcgacctgtcctcggaaatccgcgtgcagatccagcccgaccagccgctcgacgcccagtacgccggccgcccggccgaggtcagcatcggcggcctgcccggccgcaccctgctgaacaaggccgtgaccctggccaccgctcgctga

SEQ ID NO: 323232 - DNA, 1482 bp, Pseudomonas aeruginosa
atggaaacttacaaacgtggcctcgccgaagccaccggctggctggtgttcctcagcctgctgatggtgctcgcgctggcagtgccgaagaccgtgttcgacgccgactccaaggatttcatcctgcttatcggcgccgtcggcatctggcgctactccatgggcggcgtgcacttcctgcgcggcatgctgttcctccacgtggtctacccgtactaccgccggcgcgtgcgccagttgggcagcgcggccgacccgtcgcacgtgttcctgatggtcaccagtttccgcatcgacgccctgaccactgccatggtctatcgctcggtgatccgcgaagccatcgacagcggctacccgaccaccgtggtctgctccatcgtcgagatgtccgacgaggtcctggtccgttctctgtgggagaagatgaacccgccggaccgggtcagcctcgacttcgtgcggattcccggcaccggcaagcgcgacggcctggcctatggcttccgcgcgatttcccggcacctgccggacgacgacgcggtggtcgcggtgatcgacggcgacaccgtgctcgaccacggcgtggtgaagaagaccgtgccctggttcaagctcttccccaacgtcggcggcctcaccaccaatgaattctgcgaagtgcagggcggctacgtgatgagcgagtggcacaagctgcgcttcgcccagcgccacatcaacatgtgctcgatggccctgtccaagcgcgtgctgaccatgaccggacggatgtcggtgttccgcgcccgggtggtgaccaaccccgagttcatcaccgacgtcgagaacgaccacctggagcactggcgcctgggtcgcttcaagttcctcaccggcgacgacaagtccagctggttcagcctgatgcgcctgggctacgacaccttctacgtgcccgacgcggcgatcaacacggtcgagcacccgccggagaagagcttcatcaaggccagtcgcaagctgatgtaccgctggtacggcaacaacctgcggcagaactcgcgcgcgctcaagctcggcgcgcggcgcctgggctggttcaccatgctggtgctgttcgaccagcgcgtctcgatgtggaccagcctgctcggcctggtggtggcgatcctcgccagcctcaagtacagcatcgccttcctgctggtgtacctgctctggatcggcctcacccgcctggtgctgaccctgctcctctcgctctccgggcaccgcatcggcccggcctatccgctgatcctctattacaaccagatcgtcggcgcgctggtgaagatctacgtgttcttccgcctcgaccggcagtcctggacccgccagccgaccaagctggagcgcggcctggccagcttccagcgctggttcaacgcctggtcgtcgcgggccatgaccttctctgccgccagcatcttcgtcgccgtgctgctgaccatcgtatga

SEQ ID NO: 323233 - DNA, 1311 bp, Pseudomonas aeruginosa
atgcgaatcagcatctttggtttgggctatgtcggtgcagtatgtgctggctgcctgtcggcacgcggtcatgaagtcattggtgtggatgtctccagcaccaagatcgacctgatcaaccagggcaagtcgcccatcgtcgaaccgggcctggaagcgttgttgcagcaaggccggcagaccggacggctgtcgggcaccaccgacttcaagaaggccgtgctggactccgacgtatcgttcatctgcgtcggcacgccgagcaagaagaacggcgacctggacctgggctacatcgagaccgtctgccgcgagatcggcttcgccatccgcgagaagtccgaacgccacaccgtggtggtgcgcagcaccgtactgccgggcaccgtcaacaacgtggtgatcccgctgatcgaggactgctcgggcaagaaggccggggtcgacttcggcgtcggcaccaaccccgaattcctccgcgagagcaccgccatcaaggactacgacttcccgccgatgaccgtgatcggcgaactggacaagcagaccggcgaccttctcgaggaaatctaccgcgagctggacgcgccgatcatccgcaagaccgtcgaggtcgccgagatgatcaagtacacctgcaacgtctggcacgccgccaaggtcaccttcgccaacgagatcggcaacatcgccaaggcggtcggcgtcgacggccgcgaggtgatggacgtgatctgccaggaccacaagctcaacctgtcgcgctactacatgcgtcccggcttcgccttcggcggctcctgcctgcccaaggatgtacgcgccctcacctatcgcgccagccagctggacgtcgagcacccgatgctcggttcgttgatgcgcagcaactccaaccaggtgcagaaggccttcgatctcatcaccagccacgacacccgcaaggtcggcctgctcggcctgtcgttcaaggccggcaccgacgatttgcgcgaaagcccgctggtggagctggccgagatgctcatcggcaagggctacgagttgcgcatcttcgaccgcaacgtcgaatacgcgcgtgtccacggggccaacaaggaatacatcgagtcgaagatcccgcacgtctcctcactgctggtctccgacctcgacgaagtggtggcgagttccgatgtgctggtgctgggcaatggcgacgagctgttcgtcgacctggtgaacaagaccccgagcggcaagaagctggtcgacctggtgggcttcatgccgcacaccaccactgcccaggccgagggcatctgctggtag

SEQ ID NO: 323234 - DNA, 780 bp, Pseudomonas aeruginosa
atgctgatggtgatttcccccgccaagaccctggactacgagaccccgccggtcacccaccgcttcacccagccgcaatacctggaccacgcccaggaactgatccagcaactgcgccagctcacgccactgcagatcagcgaactgatgaagctttccgacaagctcgccggcctgaatgccgctcgctacgccagctggcatccggagttcaccccggagaacgccaagcaggcgttgctcgccttcaagggcgatgtctacaccggcctcaacgcggaagacttcggcgaggacgatttcgccttcgcccaggatcacctgcgcatgctctccggtctctacggcgtgctgcgcccgctcgacctcatgcagccctatcgactggaaatgggcacccgcctggccaacgcccgtggcaaggatctctacgccttctggggcgagcgtatcagccagtggctgaacgaagcgctggccgcccagggcgacgacgtgctgctcaacctggcctccaacgagtacttcggcgcggtgaagcgcaaggcgctgcaagcgcgggtcatcgacaccgagttcaaggacctgaagaacggccagtacaagatcatcagcttctacgccaagaaggctcgcggcatgatggctcgctacgtgatccgcgagcgcctgcgcgacccggccgggctgaaggacttcaatgcccacggctattacttcagcgccgagcaatccggcccggatcagctggtattcctcagggacgccccgcaagactga

SEQ ID NO: 323235 - DNA, 1083 bp, Pseudomonas aeruginosa
atgagccacgacctgctgctgaacctgaaagatctcgcctgcggctacgcctcgcagaaagtggtacaggacctcgacctgcacctcaatgccggagacatcggctgcctgctgggtccttcgggatgcggcaagaccaccaccctgcgcgccatcgccggcttcgaaccggtgctggccgggcagatcgagctgggcggcgaagtcatctcgcgtcccggcttcaccctggcgccggagaaacgccggatcggcatggtgttccaggactacgcgctgttcccccatctcagcgtggccgacaatgtcggcttcggcatccgcaagcatccacaacgcgagcgcctggtgcgcgagcttctggagctggtcaagctcgaccacctcgccgcgcgccacccccacgaactctccggcggccagcaacaacgggtggccctggcccgcgcgctggcgcccgaaccgctgttgctgctgctcgacgaacccttctccaacctcgacgtggaactgcgccgcagcctcagccaggaggttcgcgagatcctcaaggcacgcggcaccagcgcgatcctggtgacccacgaccaggaagaagccttcgccgtctgcgaccacatcggcgtgttcaaggaaggtcacctggaacagtgggacaccccctacaacctctaccacgagccgctgacgcccttcgtcgccagcttcgtcggccagggctacttcattcgcggccagttgctcagccccgatacggtgcagaccgaactcggcgtgatccgcggcaatcgcgcctacagcctgccttccggcagcgcggtagacgtcctgctgcgcccggacgacctggtgcacgcgccgcagggcgagctgaaggcgcggatcgtcggcaagaccttcctcggcgccgccaccctgtaccgcctgcaattgcccaccggtacccagctggaatcgatcttccccagccatgccgaccaccagccgggcgatgacgtcggtatccgcgtcgccgccgaccacctggtggtgttcgccgcccggggcagcgtcgccgcgcacctcgctcccgtccaggcctga

SEQ ID NO: 323236 - DNA, 918 bp, Pseudomonas aeruginosa
atgagcgtacggcactttctctcgtttatggattacagccccgaagagctgatcggtctgatccgccgcggcagcgagctgaaggacctgcgcaaccgaggcgtgctctacgagccgctgaagagccgggtcctgggcatggtcttcgagaaggcttcgacccgtacccgcctgtccttcgaagccgggatgatccagctcggcggccaggcgatcttcctctccccgcgcgacacccagctcggccgcggcgagccgatcggcgacagcgcccgggtcatgtcgcggatgctcgacggcgtgatgatccgcaccttcgcccacgccaccctgacggaattcgccgcgcactcgaaggtgccggtgatcaacggcctgtccgacgacctgcacccctgccagttgctcgccgacatgcagaccttccacgagcaccgcggcagcatccagggcaagaccgtggcctggatcggcgacggcaacaacatgtgcaacagctatatagaagcggcgctgaagttcgacttccagctgcgcgtggcctgccccgagggctacgagccgaaggccgagttcgtcgcccttgccggcgaccgcctgcgcgtcgtccgcgacccgcgcgaggcggtggccggcgcgcacctggtgagcaccgacgtgtgggcctcgatgggccaggaagacgaagccgccgcgcgcatcgccctgttccgtccctaccaggtgaacgccgcgttgctcgatggggccgccgacgatgtactattcatgcactgcctgccggcccaccgcggcgaggaaatcagcgaagagttgctggacgacccgcgctcggtagcctgggaccaggcagagaaccgtctgcacgcgcagaaggccctcctcgaattgctgatcgaacacgcccattacgcctga

SEQ ID NO: 323237 - DNA, 432 bp, Pseudomonas aeruginosa
atgcacacgggagaaacactcgccgccgcgccgccggcacggccattgcgccaatcgcggctgggcggcctgtcgctgttcctcgccctggccggggtcgccatcgcgctggcggtgatggcgctggcgctcggcgagcggatcgacctcagcgacgagaaccatctgctcggcctgttcgccgccttgctggcggtcttcgcggtatcgacctgcggcctggtgctgggcctggccggcctgctcaggcgcagccgcaagcgtcacctggccctggccggcatcgtcctcaacctgtcgtgcctgctctggggctggcatgcgctgagcacggcggcggccgcgatcctgatggtcctggggcaaaccgggttgtcgttcctcagcgccctggcggtgctgttcggcatgatcttcttccgccaggcctga

SEQ ID NO: 323238 - DNA, 2988 bp, Pseudomonas aeruginosa
atgaccgacgcccgccccttccgccctcgccccacctcgttgtcagccgccctgctgctgggcgcctggatcgcacagccggccacggccgcctatgtcgaagccggtcggcccggcgatccggccagttggcgctccgccgaataccagcaggactggggcctggaacggatgcgggccgaccaggcctatgccgccggcatcgacggccagggcgtgaagatcggcgagatggactccggtttcgacccgagccatccggatactcccgcctcgcgctaccagccggtgacggccagcggcacctatgtcgacggcacgccgttcagcgtcagcggcgcgatgaacggcaacaacgactcccacggtacccacgtcggcggcaccctcggcgcctcgcgcgacggcgtcggcatgcacggggtggcctacgcggcacaggtgtatgtcgccaacaccaaccagaacgacagcttcctgttcggcccgacgcccgacccgaactatttcaaggccgcctaccaggcgctggccgacgccggggtgcgggcgatcaacaacagttggggcagccagcccaaggacgtcagctacgagaccctcgacggcctgcacgccgcctatgcccagcactacgggcgctccacctggctggacgccgccgccggcgtctcccgccagggcgtgatcaacgtcttcagcgccggcaacagcggctacgccaacgccagcgtgcgctccgccctgccctacttccagccggacctggaaggccactggctggccgtgtccggcctcgaccagcagaacggccagcgctacaaccgctgcggcatcgccaagtactggtgcatcaccacgcccggccgcctgatcaacagcaccatgcccggcggcggctatgccaacaagtccggtacctcgatggccgcgccccacgccaccggcgcgctggccctggtcatgcagcgctatccgtacctgaacaacgagcaggcgctgcaggttctgctgaccaccgccacccagctcgacggcacgccgaccggcgcccccaccgacaccgtcggctggggcgtgccggatctcggtcgggcgatgcatgggcctggacaattgctcggccgcttcgaggccaacctcccggccggcctgcgcgacgaatggagcaacccgatttccgatagcgccctgctccagcgccaggccgaggacgccgccgagcacgcggcctggcagcggacgctgaaggacaagggctgggaaaacggcttgccggccggtgccagccagcaggaacgcaccgactatgccatcggcatggcccgcgaccaggccgccgcccagcgccagtaccagggcagcctggtcaaggccggtgccggcagcctggtcctgagcggcgacagcacctatcgcgggccgaccctggtcgatggcgggctgctcagcgtcgacggttcgctgctgtccgccgtcgaagtcaatgccggcggcaccctcggcggcagcggcaggatcggcggcctgctggcgcgctccggcggcacggtggccgcgggcaactccatcggcaccctggaggtcgccggggacctgcgcttcgaatccggctcgacctacgcggtggagctttcggaaagcgccagcgaccggatcgtcgccagcggcaaggcgagcatcgcgggcggcaacgtcaccctggccatggaaaacagccccgacctgctcagccagtcccaggtcgagagcctggtcggccgccgctacgacatcctcgacgccgccggcggtatcgacgggcgcttcgacgcggtattgccgaactacctgttcctcggcggcaccctggactacgcggccaacgccatccgcctggatatcggacgcaacggcacggccctcgccagcgtcgcgcagacgcccaaccaggcggcggtcgctggggccgtggaaacgctcggcgccggcaacccggtctacgaaagcctgctcctgtcggaaaacgccgcaaccgcccaacgggccttccagcaattgtccggggaaatctacccggcgctcgccggcctgttgctcaacgacagccgctatctgcgcgacagcgtcggcgaacgcctgcgccaggccagcgacggcgaggccggcggggaggctccagaaggctggttcaaggcgctcggctcctggggcaagagcgccgatggcagccacggcagcgaaggctaccggcattcggtcggcggcttcctgctcggcgtcgacagccaggtcgccagcgacacgcgcctcggcctggtggccggctacagcaacagctcgctgaacatggacagcagcctgcaatcctccgccagcatcgacagctaccacctcggcgcctacctcggtcggcaattgcagcaatggcgcctgagcctcggcgcagcgcacgcctggcaccgcgccgaggtcaagcgcgacctgcaatacggcgccgtggccggcaagcagaaggccaagctcgacgcacagagcagccagttgttcgccgaggccgcctacgcgctgggctggcgcagcctggagctggaacccttcgccgggctggcctacgtgcacgtcgccagcgatgacttccgcgaacgcggtagcgccgcggccctggagggtggcgacgacaacctggacgccgccttcaccaccctgggcctgcgcgcgaaacggcatttcgagctggatgccgaacgccgcctggcgctctccggcaccctcggctggcgccacaacctgagcgacaccaccccgcaacggcacctggcgttcgccagcggcagccagccattcagcgtggaaagcgtggccctgtcccgcgacgccgcgctgctcggcgtcgacgccagcctcgcggtgaatcgcgaagtgagcgtgcggctgggctacaacggcctgctgggcagccgcgagaaggaccatggcgtcggactggccgtcgactggcgtttctga

SEQ ID NO: 323239 - DNA, 2109 bp, Pseudomonas aeruginosa
atgagcaagaccctccactaccgtgcgtgccatctctgcgaggccatctgcgggctcgccatcgagaccgagagcgacgagggcggcgtgccgcggatccgctcgatcaagggcgacccgcaggacagcttcagccgcggccatgtctgtcccaaggcggtggccctgcaggacatccaggacgaccccgaccgcctgcgccagccgttgcgccgggtcggcagcgagtggcagccgatcggctgggacgaggccttcgcgatggtggccagccgcctcggcgagatccgcgagcgccatggcaacgatgcggtggcggtctaccagggcaacccgagcgtgcacaactacggcctgatgacccatagcaactacttcctcggcctgctgaaaacgcgcaaccgcttctccgcgacttccgtcgaccagttgccgcatcacctggtcagccagcagatgtacggccatggtttgttgatcccgatccccgacatcgaccacaccgacttcatgctggtgctcggctgcaacccgctggcgtccaacggcagcatcatgaccgtgccggacgtggagaagcgcctgaaggcgctgaaggcacgcggcggccggttggtggtggtcgatccccggcgcagcgagaccgcggctatcgccgaccggcacctgttcattcgtcccggccaggatgcggcgctgttgctcgggatactcaacaccctgttcgaggagaacctcggtcgccccacgccgctgccggtcgacgggctggagcgggtgcgcgaggcggtcgcggccttcgacgccgagtccatgagcgcgcgctgtggcgtgccggccgaaagcattcgccaactggcgcgggatttcgccgccgccgaacgggcggtctgctatggccggatgggcgtttccacccaggccttcggcacgctctgccagtggctggtgcaactgatcaacctggtcaccggcaacctcgaccgggtcggtggcgcgctgtgcacctcgccggccctggacctggtggcgagtacctcgggtggccacttcggccgttggcgcagccgcgtctcggggctgccggaatatggcggcgaactgccggtggcggcattggcggaagaaatcctcggtgaaggcgaggggcaggtgcgcgcgctggtcacggtagccggcaacccggtgctgtccacgcccaacgggaggcggctcgaacaggccctggacggcctggagttcatgctcagcatcgacctctacatcaacgagacgacccgctacgccgatctcatcctgccgcccaccgcgccgctggagcacgatcactacgacaccaccttcaacgtcttcgccgtgcgtaacgtgacccgtttcaacgaggccgtgctgccgcgtcccgagggtgcgctgcacgactgggagatcttcgtcggcctggcgcgggccttcgccgcgcgcaacggcctggagctgaaaccgaccctggagccgcagcagatgatcgacctcggcctgcgcgctggcgcctacggcgaccgttccgagcacaggctgagcctggccactctgcgcgaacatccccacggcatcgacctcgggccgctgcggccgaacctggcgccgcgcctgaagaccgccgaccagcgcatccaggccgcgccgccgctgttcgtcgacgacctgcaacgcttcgccgcacagccgctgcctgcgtccgaccagttgctgctgatcggacgacgccacgtgcgcagcaacaattcctggatgcacaactaccatcgcctggtgaagggcaagccgcgtcaccagttgctgatgcacccgcgggacctggagggtcgcggcctggtcgacgggcaacgggtgcgggtgcgctcgcgggtcggcagcgtggaggtggaggtggcggcgagcagcgagatgatgcccggggtggtcagcctgccgcacggctggggccacgcgcggcccggcgtgcaactggcgatcgcccgcgcccaggccggcgccagcgccaacgacctgaccgacgagcgtcatctcgacctgctgtcgggtaacgccgcgctcaacggcctgccggtggaggtggaagcggcctga

SEQ ID NO: 323240 - DNA, 327 bp, Pseudomonas aeruginosa
atggacatcatcgaaaccattaaagagcagatcgccaacaaccccatcctgctgtacatgaagggttcgccgaacgccccgcagtgcggtttctcctcgcgcgcggcccaggtgctgatggcctgtggcgagaagttcgcctacgtcgacatcctgcagaacccggaaatccgcgccaacctgccgaagtacgcgaactggccgaccttcccgcagctgtgggtcaatggcgaactggtcggcggcagcgacatcctcgccgagatgttcgagaagggcgaactgcagaccctggtcaaggacgcggcggccaaagccaacgcctga

SEQ ID NO: 323241 - DNA, 1152 bp, Pseudomonas aeruginosa
atgtcggaagtcaatcctcgccagggtcgcctggcttgcatctatttcttcgccatggccgggctggtcatcggcaacctgatgggacgcatcccggcgctcaaggagcagacccagctggacgagcgcgcgctcggccaggccctgctcggcgtcggggtcggcgcgctcacggcgttcccgttgagcggtttcctggtccagcgcatcggcagccgcagcgtagtgatcggcggttgcctgatcatgctgctggtgtttccgctgctcggcctgagccagggctggtggcaactggcgttggccttctacgtgctgggcgtgagcttcgccgggatggacgtggcgatgaacatccaggcggtggatgtcgagcgcctgctcggcaagccctgcatgtccatgctgcatggcatgtacagcctcggctgcctggtcggtgcgttgggcgccgcggccctggccggactgacgccgttctggcacttcctcattctcaccgcactcggcctgctgagcctgccattcttcgtacgcgcgttgcttccgccggacccgagcaaggcgggcgcgcgcaagggcggcggcttcaccttgccgccgcgggccttgctcggcctgggcctgctgattctctgcgcgttcgtttccgagggcggcgtggctgactggagcgcgctgttcctgcacagcgttctggatgcttccgagcgggtggcggcgctgggcttcgcggcgttttccgcggcgatggtggtggggcgcctgttcggcgaccgcctgcgcggacgcatcgacgatgcgccattgctgcgcggcctgggctcgctggccacgctgggcatgctggtagcgctgttcagcccctggccggcgctgagcatcgccggtttcggggtggttggcctggggctgtcggtgatggtgccgatcgtgatcagcgccgccggcaaccagccgggcatcgatccggtgatcggggtcgccgccgtctctaccgtgggttatggaggactgctgatggggccgccgctgatcggcctgctggcccacgagatcggcctgcgctgggcattgctggtgctggtcggtctttgcctgttgctggccctgcgcgccgatctggtccggcgcaggccgcgcagcgcctga

SEQ ID NO: 323242 - DNA, 477 bp, Pseudomonas aeruginosa
atgaaaggcgacaagaaagtcatccagcacctcaacaagatcctcggcaacgagctgatcgcgatcaaccagtacttcctccactcgcgcatgtggaacgactggggcctgaagcgcctcggcgcccatgagtaccacgagtcgatcgacgagatgaagcatgccgacaagctcatcgagcgcatcctcttcctcgaaggcctgcccaacctgcaggacctcggcaagctgctgatcggcgagaacacccaggaaatgctgcagtgcgatctgaacctggagctgaaggcgaccaaggacctgcgcgaagccatcgtgcattgcgagcaggtgcacgactacgtcagccgcgacctgctgaaggacatcctggagtcggaagaagagcacatcgactacctggagacccagctgggcctgatccagaaagtcggcctggagaattacctgcagtcgcacatgcacgaagacgactga

SEQ ID NO: 323243 - DNA, 222 bp, Pseudomonas aeruginosa
atgtacgtctgcctctgccaaggtgttaccgacaaccagatccgcgatgccatctacgaaggctgctgcagctatcgtgaggttcgcgaagccaccggcgtcggtacccagtgcggcaagtgcgcatgcctggccaagcaggtggtacgcgaaaccctcaacgacctgcagagtgcccagccggtaccggcgttcgggactacggcgttcgtcgctgcctga

SEQ ID NO: 323244 - DNA, 603 bp, Pseudomonas aeruginosa
atgagcgtactcgtaggtaagaaagcgcctgacttcaacgttgccgcggtactgggcaatggcgagatcgtcgagagcttcaccctgtccgaggccatcaagggcaagtacggcctggtgttcttctatccgctggacttcaccttcgtctgcccgtccgagctgatcgccctggaccaccgcatcccggaattccaggcgcgcaacgtcgaggtgatcggcgtttccatcgactcccacttcacccacaacgcctggcgcaacaccccggtggacaagggcggcatcggtgccgtcaagtacaccctggcggccgacaccaagcacgagatcgccaaggcctatgacgtcgagtccgacggtggcgtggccttccgtggcgcgttcctgatcgacaaggaaggcgtagtgcgctcgcagatcgtcaacgacctgccgctgggccgcaacatggacgagctgctgcgtctggtcgatgccctgcagttccatgaggagcacggcgaagtctgcccggccaactggaagaagggcgacaagggcatgaccgcatcgcccgaaggcgtggccaagtacctggccgagaacgccagcaagctgtaa

SEQ ID NO: 323245 - DNA, 675 bp, Pseudomonas aeruginosa
atgagcgaagacaacttcgacgacgaattcgacggcagcctctccagcggcccgcgccatccgatggcgcgccgcttccgcggctacctgccggtagtggtggacgtcgagaccggcggcttcaactcggccaccgacgcgctgctggaaatcgccgcgaccactgtcggcatggacgagaaaggcttcctgttcccggaacacacctacttcttccgcatcgagcccttcgaaggcgccaacatcgagccggccgcgctggaattcaccggcatcaagcttgaccacccgctgcgcatggcggtgcaggaggaagcggcactcaccgagatcttccgcggcatccgcaaggcgctgaaggccaatggctgcaagcgggcgatcctggtcggccacaacagcagcttcgacctcggtttcctcaatgccgccgtggcgcgtaccgggatcaagcgcaatccgttccatcccttctccagcttcgacaccgccaccctggctggcctcgcctacggccagacggtcctggccaaggcctgccaggccgccggcatggagttcgacaaccgcgaggcgcactcggcacgctacgacaccgagaagaccgccgagctgttctgcggcatcgtcaaccgctggaaggaaatgggcggctggatggatgacgacgactga

SEQ ID NO: 323246 - DNA, 1047 bp, Pseudomonas aeruginosa
atgtccgaccgtctcaccctcctgcgccccgacgactggcacattcacctgcgtgacggtgccgcgctggccaataccgtcggcgacgccgcccgcaccttcggccgcgccatcgtcatgccgaacctggtgccgccggtgcgcaacgccgccgaagccgacgcctaccggcagcgcatcctcgccgcccgccccgccgccagccgcttcgagccgctgatggtgctgtacctcaccgaccgcaccagcgccgaggaaatccgtaccgccaaggccagcggcttcgtgcatgccgccaagctctatccggcaggcgccaccaccaactcggattctggcgtgacccgcatcgacaatatcttcgaagcgctcgaggcgatggccgaggtcggcatgccgctgctggtgcatggcgaggtgacccgcgccgaggtcgacgtattcgatcgtgagaagcagttcatcgacgagcacctgcgccgggtggtcgagcgcttcccgaccctgaaggtggtcttcgagcacatcaccaccggcgacgccgcccagttcgtccgggaagccccggccaacgtcggcgcgaccattaccgcccatcacctgctgtacaaccgcaaccacatgctggtcggcggtatccgtccgcacttctattgcctgccgatcctcaagcgcaacacccaccaggaagccctgctggacgccgcggtgagcggcaatccgaaattcttcctcggcaccgactcggcgccgcacgcccgccacgccaaggaagccgcctgcggttgcgccgggtgctacagcgcctacgccgccatcgagctgtatgccgaggccttcgaacagcgcaatgcgctggacaagctggaaggcttcgccagcctgcacggcccggacttctatggcctgccgcgcaacaccgaccggatcaccctggtccgcgaggaatggcaggcgcccgccagcctccccttcggcgacttcgacgtggtgccgctgcgcgccggcgagacactccgctggaaactgctggaggccggggcatga

SEQ ID NO: 323247 - DNA, 2415 bp, Pseudomonas aeruginosa
ttgaaggattcgaccaccgcgagccatgccgccgcatggcgtcagcaactgcattcccgcctgaaggaaggggtcctgatcgcgctgggcgcgctctgcctctacttgtggatggctctgctcacctatgatccggccgatccgagctggagtcactcgagccaggttgaccaggtgcagaatgccgccggtcggctcggcgcggtatccgccgatatcctgttcatgacgctcggctacttcgcctacctctttccgctgttgctgggcatcaagacctggcaggtattccgccgccgcaacctgccgtgggaatggaacacctggctgttttcctggcgcctggtcgggctgatcttcctgatcctggccggctcggcactggcctacatccatttccacgccagcggccacatgccggccagcgcctcggccggtggcgccatcggccagagcctgggccgcgtcgcggtggatgcgctgaacgtgcagggcagcacgctggtgttcttcgccctgttcctcttcggcctgacggtgttcgccgacctctcctggttcaaggtgatggatgtcaccggcaagatcaccctggacttcttcgaactgatccagaacgccttcaatcgctggatgggcgcgcgcgccgagcgcaagcaactggtcgcgcaactgcgcgaggtcgacgagcgcgtcgccgaggtggtggcgccgagcgtgccggaccgccgcgaacagtccaaggccaaggagcgcctgctggaacgcgaagaggccctggccaagcacatgagcgagcgggagaagcgcccgccgccgaagatcgatccgccaccgccgccgaaggccccggagccgagcaagcgcgtgctgaaagagaagcaggcgccgctgttcgtcgatacggcggtggagggcaccctgccgccgctgtcgctgctcgatccggcggaagtgaagcagaagagctactcgcccgagtcgctggaggcgatgtcgcgcctgctggagatcaagctgaaggagttcggcgtcgaggtcagcgtggattcggtgcatccgggccccgtgatcacccgtttcgagatccagcccgcggcgggggtcaaggtcagccgcatttccaacctggccaaggacctggcgcgctcgctggcggtgatcagcgtgcgggtggtggaagtgattcccggcaagaccaccgtcggcatcgagattcccaacgaagaccggcagatggtgcgcttctccgaagtgctgtcgtcgccggagtacgacgagcacaagtccaccgtgccgctggccctgggccacgacatcggcggtcggccgatcatcaccgacctggcgaagatgccgcacctgctggtggccggtaccaccggctccggtaagtcggtgggggtcaacgccatgctcctgtcgatcctgttcaagtccacgccgagcgaggcgcgactgatcatgatcgacccgaagatgctcgaactgtcgatctacgaagggatcccgcacctgctctgcccggtggtcaccgacatgaaggaagccgccaacgccctgcgctggagcgtggcggagatggagcggcgctaccgcctgatggcggccatgggtgtgcgcaacctggctggcttcaaccgcaaggtgaaggacgccgaggaggctggcacgccgctgaccgacccgctgttccgtcgcgaaagcccggacgacgagccgccgcagctgagcaccctgccgaccatcgtggtggtggtcgacgaattcgccgacatgatgatgatcgtcggcaagaaggtcgaggagcttatcgcccgtatcgcgcagaaggcgcgggcggccggtatccacctgatcctggcgacccagcggccgtcggtggacgtgatcaccggcctgatcaaggccaacatcccgacccggatcgccttccaggtctccagcaagatcgactcgcgcaccatcctcgaccagggtggcgccgaacaacttctcggccacggcgacatgctctacctgccgccgggcacaggcctgccgattcgcgtgcacggcgccttcgtttccgacgacgaggtgcaccgggtggtcgaggcctggaagctgcgcggcgcgcccgactacatcgaggacatcctcgctggcgtcgacgaaggcggcagcggtggcggttccttcgatggcggcgacggctccggcgaaggcagcgaggacgacccgctctacgacgaggcggtacgtttcgtcaccgagagtcgccgggcatcgatctccgccgtgcaacgcaagctgaagatcggctacaaccgcgccgcgcggatgatcgaggcgatggagatggccggcgtggtcaccccgatgaataccaacggctcccgcgaagtcatcgcgccggcgccggttcgtgattga

SEQ ID NO: 323248 - DNA, 627 bp, Pseudomonas aeruginosa
atgcgactgatccgcacgttgttcgttgccgccctggccatgggcgcttcgctggcccatgccgacgacagcgccgctgtccagcgcctgaccggcctgctgaacaaggcccagaccctgaccgcgcgtttttcccaactgaccctggacggtagcggcacgcgcttgcaggaaaccgccggccaactgagcctgaagcggccgggactgttccgctggcataccgatgcgccgaacgagcaattgctcatttccaacggcgagaaggtctggctgtacgacccggacctggagcaggtgaccatccagaagctcgatcagcgcctgacccagacgccggcgctgctgctctccggcgacatctcgaagatcagcgaaagcttcgccatcacctacaaggaaggcggcaacgtagtcgatttcgtgctcaagccgaagaccaaggacaccctcttcgacaccttgcgtctgtcgttccgcagcggcaaggtgaacgacatgcagatgatcgatggcgtcggccagcgcaccaacatcctgttcttcgacgtgaagatgaacgaggcgctggatgccaagcaattcaccttcgacgttccgccgggcgtcgacgtgatccaggagtaa

SEQ ID NO: 323249 - DNA, 1326 bp, Pseudomonas aeruginosa
gtggatctgttccgcagcgagcccgtcgcgcagcccctggcggcacggctgaggcccgcaaacctggacgagtacgtggggcaggaacacctgctggcccgcggcaagcccttgcgcgaggcgctggagcagggcgcgctgcactcgatgatcttctggggcccgccgggagtcggcaagactaccctggcgcggctgctggcgcaggtgtcggacgcccatttcgagaccatttccgcggtgctgtccggggtcaaggagatccgccaggcggtcgaggtggccaagcagcacgcggcgcaatacgggcgccggaccatcctgttcgtcgatgaggtgcaccgcttcaacaagagccagcaggatgccttcctgccctatgtggaagacggcacgctgatcttcattggcgcgaccaccgagaacccgtccttcgagttgaacaatgcgctgctctcgcgggctcgcgtgtatgtcctcaagagcctcgacgaagccgccctgcgcaagctggtgggccgcgcgctgaacgaggacaagggcctcggcaagcgcaagctgaggctgccggaggagagcttccaggttctcctggccgccgccgacggcgatgggcggcgcctgctgaacctgctggagaacgctgccgacctcgccgaggacggcagcgagatcagccccgagctgctgcagaatctgctcggcgatacccgccgacgtttcgacaagggcggcgaggcgttctacgaccagatcagcgcgctgcacaagtcggtgcgcggctccaatcccgacgcggcactttattggttcgcgcgtatgctcgacggcggctgcgatcccctgtacatcgcccggcgggtggtgcgcatggccagcgaggaggttggcaacgccgatcctcgcgccctcggcctatgcctgtcggcctgggacgtgcaggagcgcctgggcagccccgaaggcgagctggcggtggcccaggccatcgtctacctggcctgtgcgccgaagagcaatgcggtgtacagcgcgttcaacgcggcgatgcgcgacgtcgccgaaagcggctcgcgggaagtgccattgcacttgcgcaacgcgccgaccaaattgatgaagagcctcggctatggcgaggaataccgctacgcccacgacgagccggatgcctatgccgccggagaggattatttccccgaggatctggagccgcggcgttactatcaaccggtgccgaggggcctggaactgaagatccgcgacaagctggaacacctggccgagctggatcgcaccagtccccgccaacgcagaaaatcctga

SEQ ID NO: 323250 - DNA, 1281 bp, Pseudomonas aeruginosa
atgctcgatcccaaactggtacgcacccagccgcaagaagtggctgcccgcctggccacccgtggcttccaactggatgtcgcacgcatcgaagcgctggaagagcagcgcaagtcggtacagacccgtaccgagcagctgcaagccgagcgcaacgcgcgttccaaggcgatcggccaggccaagcagcgtggcgaggacatcgcgccgctgctggccgatgtcgaccgcatgggctccgagctggaggaaggcaagcgacagctggacgccatccagggcgaactggatgccatgctgctgggcattcccaacctgccacacgagtcggtgccggtcggtgccgacgaggacgccaacgtcgaagtgcgtcgctggggcacgccgaagaccttcgatttcgaggtcaaggaccatgtcgccctcggtgaacggcacggctggctggatttcgagaccgctgccaagctttccggcgcgcgcttcgccctcatgcgcggcccgatcgcccgcctgcatcgcgccctggcgcagttcatgatcaacctgcataccgccgagcatggctacgaggaggcctacaccccttatctcgtccaggctccggcgctgcaaggcaccggccagttgccgaagttcgaggaggacctgttcaagatcggccgcgacggcgaagctgacctctacctgatcccgaccgccgaggtttcgctgaccaacatcgtctccgggcagatcctcgacgccaagcaattgccgctgaagttcgtcgcccataccccgtgcttccgcagcgaggccggtgcctccgggcgcgatacccgcggcatgatccgccagcatcagttcgacaaggtggagatggtgcagatcgtcgatccggccacttcctacgaggcgctggaaggcctgaccgccaacgccgagcgcgtcctgcaactgctcgagttgccgtatcgggtgctggcgctgtgcaccggcgacatgggcttcggttcgaccaagacctacgacctggaagtctgggttcccagccaggacaagtaccgcgagatttcctcctgctccaactgcggcgacttccaggcccggcgcatgcaggcccgctaccgcaatccggaaaccggcaagcccgagctggtgcacaccctcaacggctccggcctggccgtcggccgcaccttggtggcggtactggagaactaccagcaggcggacggctcgatccgtgtgccggaagtcctcaagccctacatggctggcatcgaggtgatcggctga

SEQ ID NO: 323251 - DNA, 1398 bp, Pseudomonas aeruginosa
atggatttcctgccgctgttccactccttgcaagggcgcctcgcgctggtggtcggtggcggcgaagtcgccctgcgcaaggcgcgcctgctggccgacgccggcgcgcgcctgcgcgtggtcgcgccgcagatccacatcgaactgcggcatctggtggagcagggcggcggcgagctgctcgaacgcgactaccaggacggcgaccagcccggctgcgccctgatcatcgccgccaccgacgacgaaccgctgaacgccgaggtgtcgcgagcggccaatgcgcgcgggataccggtcaacgtggtggacgcgccggccctgtgcagcgtgatcttcccggccatcgtcgaccgttcgccgctggtggtggcggtctccagcggcggcgatgcgcccgtgctggcgcggctgatccgggccaagctggaaacctggattccctcgacctacgggcaactggccggactcgccagccgcttccgccaccgggtcaaggaattgctacccgacctgcagcagcgccgggtgttctgggaaaacctgttccagggcgagatcgccgagcgtgtcctggccggccgtccggcggaagccgagcgtctcctggaagagcgtctggccggaggcctcgcgcacatagccacgggcgaggtatatctggtcggggccgggccgggggatccggacctgctgacgttccgtgccctgcgcctgatgcagcaggccgacgtggtgctctacgatcgcctggtggcgccgtcgatcctcgaattatgccgccgcgatgccgaacgcctgtacgtcggcaagcgccgcgccgaacatgcggtgccgcaggatcggatcaaccgcctgctggtggagctggccagccagggcaagcgcgtgctgcgcctgaagggcggcgacccgttcatcttcggccgcggcggtgaggaaatcgacgaactggctgcccacggcatacctttccaggtcgtgccgggaatcactgcggccagcggctgcgcggcctacgccgggattccgctgactcatcgcgaccatgcgcaatcggttcgtttcgtcaccggtcatctgaaggacggcaccaccgacctgccgtggcaggacctggtagcgcctggccagaccctggtgttctacatgggcctggtgggattgccggtgatctgcgagcaactggtcgcccacggtcgctccgcacagaccccggcggcgctgatccagcaggggaccaccgcccagcagcgggtattcaccggaaccctggaaaacctgccgcaactggtggctgagcacgaagtgcatgcgccgaccctggtgatcgtcggcgaagtcgtgcaactgcgcgacaagctggcctggttcgaaggcgcccgcgaggacgcctga

SEQ ID NO: 323252 - DNA, 975 bp, Pseudomonas aeruginosa
atgggacagttgatcgatggccgctggcacgaccagtggtatgacacacagaaagacggccgcttccagcgcgaaaacgcccagcgccgccattggctgggcgagccggcgttccccgccgagggcgggcgctaccatctctatgtctcgctggcctgcccctgggcccatcggaccctgatcgtgcgcaagctgaaggggctggagtcgctggccgatgtttcggtggtcagttggctgatgcgcgagaacggctggaccttcgaccccgcccacggctccaccggcgatcgcctcgacggcctggcctttctgcaccagcgctacacccgcgacgacccgcactacagcggccgggtcacggtgccgctgctgtgggacaagcaggcgcagaagatcgtcaacaacgaatcagccgatatcgtccgcatcttcaacagcgccttcgacgccatcggcgccaacgcgctggacttctacccggagccgctgcgcgaggagatcgaacgcctcaacggacgcatctatcctgcggtcaacaacggcgtgtaccgtgctggcttcgccactcgccaggacgcctacgaggaggccttcgtccagttgttcgaggagctggactacctggaaggcttgctcggcgaacgccgctacctggccggcgaatacctgaccgaggccgatatccgcctgttcaccaccctggtgcgcttcgatgcggtgtaccacggacacttcaagtgcaacctgcggcgcatcgaagactacccgaatctctccggctggttgcgcgagctgtaccaacgcccgggcatcggcgagacagtggacttcgaacatatcaaggggcactactacgccagccaccgcaccatcaacccgaccgggatagtaccgctgggcccgcgtctcgacctggcgcgcgcgccaggccgggaacgacttcccggcaagggcatctggggagaaggctga

SEQ ID NO: 323253 - DNA, 984 bp, Pseudomonas aeruginosa
atgactctctcgactcccgccgaacatccgttcgcccagttcgtccgcatcctcggcaaaggcaagcgcggagcgcgcagcctgacccgggaggaagcccgcgaggccctcggcatgatcctcgacggcagggtcgaggacgcccagctgggcgccttcctcatgctcctgcggcacaaggaggaaagcagcgaggaactggccggtttcaccgaggcggtgcgcgaacgcctgcaagtcccgtccttgcgcgtcgacctcgactggcccagttacgccggcaagaagcgccacctgccctggtacctgttggccgccaaatgcctggccggccatggcgtgcgcatcctcatgcacggcggcggcgcgcataccgccggacgcctgtacagcgaacagttgctggcggcgctggagatcccgctctgccacgactggctgcaggtagaacaggccctggagcgcggccacctggcgttcattccgctcggcgcctggatgccggtgctgcaacgcatgatcgatctgcgcaataccctcggcctgcgctcgccgatccattcgctggttcgcctgctcaaccccctgaatgcggattgcatcctgcagagcatcttccaccccggttaccaggaaacccaccgcgaggccagccgcctgctcggcgaccgggccatcgtcatcaagggcgaaggcggcgagatcgaagtcaacccggacgtcgtcgcccacctgtatggttgcgaccagggcgaagcctgggacgaggaatggccggcattgtcgacgcaccggcacatgaagccggaacagctcgacccgggtttccttcgggccgtctgggacggccgcgaaggcgacgcctatggccacctggcggtgctctccagcatggccctggcgctacgggcccttggcaagaatcgcgaagaagccttcaaggaagccgcacactactgggcgacccgaaacgaatcgatctga

SEQ ID NO: 323254 - DNA, 336 bp, Pseudomonas aeruginosa
atgacgctccttacgctggaaggccgggaaatccggctggacaaggacggctacctcgccgccctcgacgattggtcggagccggtggcggaagccctggccgcccgcgaggagctggccctgaccgccgagcactgggagattctccaactgctccgcgagttctatgcggagttccagctgtctccggccaaccgcccgctgatcaagtacgtcgcccagcgactgggtccggacaagggcaacagcctgcacctcaaccacctgttcaagggcgccccggccaagcttggcgcgaagctggccggcctgccgaaaccgagcaactgtctatga

SEQ ID NO: 323255 - DNA, 306 bp, Pseudomonas aeruginosa
atggccacgaccctccacgtactgtcccgctcgccgttcaatgacggccgcctgggcagttgcctgtacctgctcaaccccggcgacggcctgctgctctgcggcgacgccgtgcacgccctgctggccggcagccacgcctgccaggccctggaactgatgccggcggaaatcgaactgttcgccctgctggaagacctccaggcgcgcggtatcgaggacgtccccgctcgcctggtggcggtggactaccccggcttcgtcgaactcgccacccgcttcgacaaggtcaacagttggctatga

SEQ ID NO: 323256 - DNA, 360 bp, Pseudomonas aeruginosa
atgagccagtcgctgctgatcatcagccgccagtcgccctggtccggcccgagcgcccgcgaggcgctggacatagccctggccggcggcgccttcgatctaccggtcggcatgctgttcctcgacgacggcgcgttccagctggctcccggccagcatcctgcgcacctgcagcagaaggacctgcaggccaacctgcaggccctgccgatgttcggcgtggacgacctctacgtctcggcccgtagcctgcgcgagcgtggcctggctgaagagcgcctggccctcgcggtcgaggtgctcgacgaccaggccctgcgcgacctgctgcaacgctacgaccaggtgattaccctctga

SEQ ID NO: 323257 - DNA, 396 bp, Pseudomonas aeruginosa
atgaaattcgccatcgccctattcgaccctccccactcccccgccgcccgccgcgcgctgcgcttcagcgaagccgcgctggccggcgggcacgaaatcgtccgcctgttcttctaccaggacggcgtgcacagcgcctcggccaacgtcgtgagcggccaggacgagttcgacctgcccgccgcctggtgcgagttggtcgagcgcaacggcctggacgccgtggtctgcatcgccgccgccctgcgccgcggcgtgctgaacgccgaggaagccgaacgctacggccgtcccggcgccaaccttggcgcaccatgggaactgtccggactcggccagttgcacgaggcggcgcaaagcgcggaccgcctggtctgcttcggaggcgaccgatga

SEQ ID NO: 323258 - DNA, 669 bp, Pseudomonas aeruginosa
atgcaagaacagcaatatcagctgaactccgccgtcgcggaacagcgtgaagtcagcggcgttctgcgcaatacctacggcctgctggcactcaccctggccttcagcggcctggtggcctacgtttcgcagcagatgcgcctgccctatccgaatgtgttcgtggtgctgatcggcttctacggcctgttcttcctcaccgtgaagctgcgcaacagcgcctggggtctggtcagcactttcgccctgaccggcttcatgggctacacgctcggcccgatcctcaacatgtacctcggcctgcccaacggcggcagcgtcatcacttcggcgttcgccatgaccgccctggtgttcttcggcctgtccgcctatgtgctgaccacccgcaaggacatgagcttcctgtccggcttcatcaccgccggcttcttcgtcctgctgggcgccgtgctggtatcgctgttcttccagatcagtggcctgcaactggcgatcagcgccggcttcgtcctgttctcctcggcgatgatcctctaccagaccagcgcgatcatccacggcggcgaacgcaactacatcatggccaccatcagcctgtacgtgtcgatctacaacctgttcatcagcctgttgcagatcttcggcatcgccggcggcgacgactga

SEQ ID NO: 323259 - DNA, 1584 bp, Pseudomonas aeruginosa
atgagccagatcgccgtacgcaccttccacgatatccgcgccgctctcctcgcccgccgggagctggcgctgctcgacgtgcgcgaggaggacccgttcgcccaggcccatcccctgttcgccgccaacctgccgctgtccaggctggaactggagatccatgcccgggtgccgcgccgcgacacgccgattaccgtctacgacgacggcgaaggcctggcgccggtcgccgcgcaacgcctcctcgacctcggctacagcgacgtggccttgctcgatggcggcctgtccggttggcgtaacgccggcggcgagctgttcagggatgtgaacgtgccaagcaaggccttcggcgaactggtggaggccgagcgccacacgccatcgctggccgcggaggaagtacaggctttgctcgacgccagggccgacgcggtgatcctggatgcccgtcgtttcgacgaataccagaccatgagtatccccggcggcatcagcgtgcccggcgccgaactggtgctgcgcgtcgccgaactggcgccggacccgcgcacccgggtgatagtcaactgtgccgggcgcactcgtagcatcatcggtacccagtcgctgctcaacgccggcatccccaacccggtggcggcattacgcaacggcaccatcggctggacgctggccggtcagcaactggaacacggccagacgcgacgcttcggtgcgatctcccaggacactcgcaaggccgccgcccagcgcgcccgtgccgtcgccgaccgcgccggcgtcgaacgcctcgacctggccggtctggcccaatggcaggacgagcacgaccgcaccacctacctgctcgacgtacgcacgcccgaggaatacgaagccggtcacctgcctggctcccgctccacgcccggtggccagctggttcaggaaaccgaccatgtcgccagcgtgcgcggcgcgcgcctggtactggtggacgacgatggcgtacgcgccaacatgagcgcctcctggctggcccagatgggctggcaggtcgcggtactggacggactctccgacgccgacttcagcgagaggggcgcctggagcgcgccgctgccgaggcaaccccgggccgacaccatcgacccgaccaccctcgccgactggctgggcgaaccgggcacccgggtgctcgacttcaccgccagcgccaactatgcgaaacgccacatccccggcgccgcctgggtattgcgcagccagttgaagcaggcactggaacggctgggcacggccgagcgctacgtactcacctgcggcagcagcctgctggcacgcttcgccgtggcggaagtccaggcactcagcggcaagccggtgttccttctcgacggcggcaccagcgcctgggtcgccgcgggcctgccgacggaagacggcgaaagcctgttggcgtcgccgcgcatcgaccgctaccgccgcccctacgaaggtaccgacaatccgcgcgaagcgatgcagggctacctggactgggagttcggcctggtggagcaactcggtcgcgacggaacccacggcttcttcgtgatctga

SEQ ID NO: 323260 - DNA, 273 bp, Pseudomonas aeruginosa
atgcggggggggcgtccgcatcccagcggagcccgtcgacgcctggagcccggcgaggtcgaagcgctgtcgccacgcattggcgacgtgcaccaggtgagcaacgccttcagcgaccgcacatccatcagtatccacgtctacggcgccaatatcggtgcggtacggcgtgccgtgttcagcgccgaaggtgaggaaaaacccttcatttccggctattccaacagccgcttgcccaatatctgggacctgtcgaaagagaaccccgcatga

SEQ ID NO: 323261 - DNA, 195 bp, Pseudomonas aeruginosa
atgcagcaggtactgttggtagcgctgtggatcggggcgggcgcagtcttccggcagccagtcgtcctggcgcaccagctcggccagcagggggtgggcttgggtgagcagggtggattcgtcgggacggctgtcgagcagtgtcgccagctcgccgatgaactggcgcaggcggtcgaggcgcaggatggatga

SEQ ID NO: 323262 - DNA, 897 bp, Pseudomonas aeruginosa
atgaaaatcgatgacatcgacgccttcgtcgcggtgatccgcaacgcttccctgagccaggccgccgagagcctgggtttgacccagtctgcgatcacccggcgggtacagagcctggaggagtccctcggagtggcattgctggaccgcaataccaagccgctcaaacccaccgccagcggactgcgggtctacgaacagtgccggcgggtgctgcgcgaggtggatggcctgcgcgaactggtggccggtgacgccacaccaagtggcgtgctgcgcctgggcgtgccgcagagtatcggcgaggtggtgttgctggatgcccttcggcggctggccgacgagtacccggagctgcgcgcgcaggtcggcactggctggggcagccatttgctggcgcgcctggagaatgccgaactggacgcggcagtggtgttgtttccgccaagcaaggtgttccccgaagaactcggcgccacgcccctagggcgcatggaactctgcgtggtggtcgcccgcgacagtgccatccaggcgcgacgcctgctcgattgctaccaccatggctgggtgctcaaccccgatggctgcggcttccgtgccggcctgcaacgggccctggccgatcagggcctgggcctgcaactgaacctagagactttcggcagcgagctgcaactgggcctggtcgtcgcgggccggggtctcggcctggtgccggcgccggccctggcgcgtagccgctaccgcgatcagttgcaggtgctgcaactggaggatttccagccgctgatccagctctggctggtgcgtccgcgcctgctgggcaatctggagacgccggcacggctgttcggcagggcggtggccgaggggttggatatgcaagccggttga

SEQ ID NO: 323263 - DNA, 1089 bp, Pseudomonas aeruginosa
gtgagcgtggaaattctcggcatgatcaccgccacaccgagttccgaggtggaccagccgttgggggaggctgtggacgccggtttcgtccggcgtttcgcccaggcccatgaggacgccggcttcgaccgggtgctggtggggtatttcagcaatgccgccgagggcgcggtggtcagttccttcgtcgccgcggccacccggcgccttggcgttctcctggcctatcgcccgggggtgatcgcagcgccgctggcggcacgccaactggccaccctggatcagttcagcgagggccgcctggccctgaacgtagtcagtggtggtaacgacgaggacctcgcgcgcgatggcgactacctcgaccatgaccgccgctacgcccgtaccgacgaatacctgcaagccctgcgtgctatctggaccgccacgggaccggtggatttcgacggcgagttctaccgcttccagggcgcctcgccagcggtgcgcccgcgccagtcgccgcacataccgatctatttcagtggctcctccgacgcagccatcgaggtcgccgccaggcacgccgacacctacatgctctggggcgagccgctggccgcggtcgacgggcatatccgccgagtgcgcgccgccgccaaggcccagggacgcgatccgcgcttctcggtgtcattccggccgatcgtcgcggataccgaggaggccgcctggaagcgtgccgccgaggtgctcgaacaggtccgcgagaaccgtgcgcgcctcggtctgccgctgcgcgaccaccagccgcagaacgtcggttcgcagcgcctgctggccgccgccgagcagggcgaggtgctcgacagccgtttgtggaccggcgtggcccggctgaccggggcgcgctggaactccaccgccctggtaggcacccccgagcaggttgccgctgcgcttggcgagtactaccggctgggcgtctcgaccttcctgattcgaggcttcgatccgctcggcgacgccgtgcgctacggccagggcctgattcccgccatacatgaccatatcgcccgcctgccgctgttgcggcacgccggttga

SEQ ID NO: 323264 - DNA, 945 bp, Pseudomonas aeruginosa
atgaaactcaagcaatacctgctaaccagcttcgccacgcttctgctcggtgcctccctggcccaggccgcagagctgccgacgttgcgtgtgggcgaccagaactactacaacgtgcgggcttccatggaggcctcgggagttctcgaaggcgcgccttaccaggtcgaatggaagcatttccagtccgccgcgccggtggccgaagggttgcaggccggagcgctggacctgggtttcctcggcgactcgggcttcatcttcctcgccgccaagggtgcgccggtgaagctggtcggcgtctcgcggcagaaccccgataccatagccctgctggtgccgaaggattctccggtgcgcagcattgccgatctcaagggcaggaaagtcgcctactggcccggtgcctggagccagcaactgaccttgcgcgcgctggagaaagccggcctgccgaaggactacgtggagttcgtcaagctgatgccgatcgacgccgccgccgccttgccgcgcggcagcatcgatgcctttccggtgtgggagccgtatatctcgcagcagatcgtggtttccggcgcacggccgattctcaccgcccgcgacctgatgccggggctgtccagcatcgccgccaacgctgcttccatcgagcccaggcgcgcgcagatcgccgacttcctcggccgcctgcgcaaggcacgggcctgggtcgaggcacacaaggagcagtacgctgacctctgggcgcagaaggccaatctcgaccgggcagtctcccgccattggatcggccaggccggcatgagcgtcggcccggtagacgcccaggccgccaccgactaccaggagaccgcggatttcctgctgcagaccggtgccttgcccaagccgttcgacacttccacggtgatcgacacgtccttcaacgaagccttccactga

SEQ ID NO: 323265 - DNA, 1083 bp, Pseudomonas aeruginosa
atgagcatccagtttctcggcatgatcggccatcgcctggcctcggagaccctcgcgccggtcggacctatcctcgacaagccttacatcgccgctttcgcacgcgcccacgaagaggccggcttcgatcgaatcctggtcggctactggtcggaccagccggatggattcctggtggccgccgccgctggcctggtcacttcccggatcggtctgctgctggcgcaccgccccggtttcgtcgccccgaccctggccgcgcgcaagctggcgaccctcgaacacctcctcgacgggcgcctggcggtgcatatcatcagcggcggcagcgacgccgaccagcgcaaggacggcgattatctcgaccacgaccagcgctatgcccgcagcgacgaattcatcgaactgctcaagcgcacctggaccagcaccgaacccttcgatttccacggcgcgcactaccgcgtggagcacgccttctcggccatccgtccgcagcagaaaccgcacattccggtgtatttcggcggctcctcggaagccgcgctgaaggtcgccggcaagcaggccgatgtgttcatgctctggggcgaacccctggcacaggccgccgaaaccatctccgctgtgcgcgaacaggcgcgctcgaatggtcgcgaagtggaattcagcctgtcgttccggcccatcctcgggcgcacggaggacgaggcctgggccaaggccgaggcgatacgcgcaagcgccggcgcgcgcctgggcgaggccggtttccccaagggcaagccgcagagcgtcggcgcccagcgtctgctcaaggcggtggagcagggcgagcgcctcgacgagcgcctttggaccggaatcgccaggctggtcggtggcgggcacaactccaccgccctggttggtaccgcggaacaggtggccgacgccctgctcgcctactacgacctgggcgtgcgcaatatcctcattcgcggtttcgatcccctcgccgatgccgtggaatatggccgcgagctgatcccgctgacccgcgccaaagtcgccgagcgcgagcgccggcgcgccacggcctga

SEQ ID NO: 323266 - DNA, 1152 bp, Pseudomonas aeruginosa
atggccgtcctgcagactccctcggcggcgttcgatgaacggctgccagaactgacccggcaactggcggaaagcgccgatgcccatgaccgcagcggagattttccccatgccaacctggccctgctgcgacaccacgggctgctcgccctggccttgccgcctgcgctcggcggtcccggcgccagcctcggcgagctgcgccgggtaattggcgcggtggctcgcggcgaaccctccacggccctggtgctgtgcatgcagtacctgcatttgcggcgcctggccgataaccccgattggcccggcgcgctcaagcggcgcgtggcgcgcgaggtgctggagcagggggcgttgatcaatagcctgcgcgtggagcccgagctgggttcgccgtcacgcggcggtctgccgggtacgctggcgcggcgtgtcggcgacggctggcagctgtccgggcacaagctctacaccaccggcattcccggcctgacctggctggcggtatgggcgcgcagcgacgagccgatcccccgcgtgggtacctggctggtgcgccgcgacagcccaggcatccgtatcgtggagagctgggaccatctgggcatgcgcgccagcggcagccacgaggtgctcttcgaagaggtggcggtgcctctggaaaacgccatcggcctgcatccccacgaccagcctccggcgccggaccaggccgtgctgcgcgacttcgcccaggctagcgcggtgttgctcggcgctctctacgacggtatcgccgggagcgcccgcgagtggctcgtcggctggctgcgcgagcgcgtgccggccagtctcggcgcgccgttggcgagcctgccgaggatgcaggaggcgctcggcgagatcgacggcctgctcctgcagaaccgcctgctgctcgatgccgcgtgctgcggacagttgcccgccagcgactccgggctgctcaaggtcgcggtcatcgacaacgcgttggcggtggtcgagaaggccctggaactgagcggcaaccacggcctcagccggcacaatccgctacagcggcactaccgcgacgtgctttgcggacgtgtccacacgccacagaaagatagcgtctggagcgcggcggggagggcggcgctgagtctttga

SEQ ID NO: 323267 - DNA, 987 bp, Pseudomonas aeruginosa
atgaaacgacccctgtgtgtgcttgccggcctgctggccgcgaccctgctggctggagccgccagcgccgccgacttcatcagcctgcgcctgggcgatgtgaagggcgaccgctacgccgccctgcgcgcgtccggcgagctcgacgacctgccgtacaagctggaaatgtcggcgttcccctccggtgcaccggtgctcgaggcgctcaacgccggggccctggacataggctttaccggcgacatcccgttcctcttcgtctacgctgccggcgcgccgctcaaggcggtgggcgcctggcacttcaacccggcgaccgtggcgctggtggtcggcaaggactcgccgatccgttcggtggccggcctcaagggcaagcgcattgccgtcaatcgcggcggctgggggcatttcctcgcccttggcgcgttgcgtcgcgccggcctcggaccgcaggacgtaagcttttccttccttggtccggtggacggccgcgccgccctggtgcgtggctcggtagacgcctgggtgccctgggagccctatacctccagcgccgtgctgctcgatcaggcgcgggtcatcgacaacggtgccgggatcatgaccggctactcctatgccctggccagcgacgctgcgatcgcccgcaagaaggccgcgatcagcgacctgctgacccgcctggcgcgtgcccaggcctgggccctgaggcatccggaggcgttcgccgaggccctggccaaggatctgaacatgccgcgcgaagtcactcggcgctgggttggcgaggcgcgcatcagtcctgtggtcttcggtccggaggttgccgccaccttgcagaccgccgccgatttcttccatgccgaaggcgtgctgccgaagtcgctggaggtcgccccggcgttcgacttcagcctgtccgccggtgccgccgaagtggcccgccagttgcccgccgacctccgcgtcggccagcgttga

SEQ ID NO: 323268 - DNA, 957 bp, Pseudomonas aeruginosa
atgcgtcagaccctgagcctgttcctgcttctctgcctgctcgtcggccaggcctgtgccgacgagcgcgtgaccctgcgcctggccgaccagaagggcaacatgcgcgcccagttggaggctgccggcgcgctggacgagctgacctacgacatccgctggttcgaattccccgccgccgcccccctcgccgaagcactcaatgccggtgcggtggatgccggcatcatcggcgacgcgccattgctcttcgccctggccgccgatgcccggctgaaggccatcgccgtcgacaaatccgatccctacggtaccgccgtgctggtgagaggggattcgccgctgcgctcggccaacgacctgaaaggtcagcgcattgccaccgggcgcggttccatcggccacttcgtcgcgctcaaggccttggcctcggtcgggctgggcgagaaggacgtcgaattccgcttcctcggcccggtggacgcgaaaatggccctcgccaatggttccgtggatgcctgggcgacctgggagccctacaccgcgctcgcggagaccgccgacaaggctcgggtactggtcgacggtcgcggcctgtgggctggcaacagcttcctcgctgctaccgatagcgcactggccgacccggcgaaacgcgccgtgctgcaggactacctgcaacgcctggccagcgcccagcgctgggcgtacctgcacctggacgagtattcgcgaagcctggcgcagatcatcggcttccccgaggacgccgcgcgcttgcagttcgaacgccggcgcttgcgttggcaggcgctggatgagcgaacgctcggccagcagcaggagaccgccgatttctaccaggcccatggattgattccgcagcgcctcgatgtgcggccgaccttcgccagcggctttgcggtcaggcaggcgtcggatgcggatatccggtag

SEQ ID NO: 323269 - DNA, 960 bp, Pseudomonas aeruginosa
atgtctcgtccgttcctgcgtcgcttggccatcgtgtttgccgcttccgtcgtcctgtcgggcattggtggcgcacaggccgaggaggtcctgcgcatcggcttccagaaatcctcgactctgctgaccctgatccgcagccagggcaccttcgagcgcgagttggccaggcagggcatccgggtgtcctggcatgagttccccagcggcctgccgttgctcgaatcgctcaatgtcggcaacgtcgatctctccgccgacgtcgccgacaccgtgccggtgttcgcccaggcggcgggtgctcgcctgacctacttcgcccgcgaaacaccttcgcccgcggcgcaggcgatactggtcggcgaacattcgccgctgaagtccctggccgagctgaagggcaagcgcatcgccgtgaccaaggccgccggcagccactacctgctgatcgccgcgctggccagcgccgggcttgagttctccgacatccagccagcctacctgacgccagccgacggccgcgccgccttcgagaacggcaaggtcgacgcctgggtgacctgggacccctacgtggcaagcgcccagcgccagcaacgcgcgcgggtactggccgacggccagggcctggccagctaccagcgctactacctcgcctccagcgactacgccaggaaacatcctgaagtgctccagcaggtcttcgccgaactgcagcgcaccgggcgctggctcaagagccacccggccgacgcggccaaggtgctggggccgctgtggggcaatctcgatgccgctaccgtcgagcaggcgaatgcgcggcgcagctacgacgtacaaccggtgagcgcagatggtctcgacgagcaacagcgcatcgccgacgccttccacgcccagggactgctacccaaaccggtggatgcgcgcgccgtggaggtatggcagccgcggcactga

SEQ ID NO: 323270 - DNA, 573 bp, Pseudomonas aeruginosa
atgcttatccatttctgccccaggctgctgacgcctgcggggttcgacctgccgtgcgagctgatcgacatccgcatcaaggagttcgacctgcacctgcttggcgggcgcgacgtggtggcgcgtcaccccctccccgacaagcgctaccacgtggcctgccgcaagtccggctgcaaggcggtgaatggcctgctggtggacgtggaaaagcacgttccgctgttcaccgtggacacccgctggagcatcgacgccgaagtggtcctgcgccaccgcgtcgagtacgtggtgctcgacgccgagcacgatgcggtgagcgactacatgctgctgtggtgcgacgaggtgcccaactacttcctcggccagagcaccccggccatgcaggttccgttgatggaactgatgcgcggcaatgcgttgcagaccgagcggcaggatgtgttccgcctgccgacgctgaggtccgaacgcctgcgccagggcaacgccgatgccaaccagcatcttccgagccgtgagcaggcgttccacgtcaaagccgagcagatcagctatgggctggcctga

SEQ ID NO: 323271 - DNA, 1104 bp, Pseudomonas aeruginosa
atgaaaaaagtttgtgcactggcgttatcgatcctgacgacgatcggtgcgacagcggcggacagtgcatgggctgcgcaaaccagcgtccatctttacaactggtatgacttcatcgccccggaaacgcccaaggctttccagaaggaaaccggcacccgtgtcgtcctcgacaccttcgacagcgccgagaccgcgcagggcaagctgatggtcggccgctccggctacgacgtggtggtgatcacctccaacatcctgcccgggctgatcaaggcgggcgtcctccaggaactcgaccgcgaccggctcccccactggaagaacctcgacgcggacatcctcgggaagcttcaggccaacgatcccggcaatcgctatgccgtaccttatctctggggaaccaccgggatcgcctacgacgtggacaaggtccgcaagctgctcggccccgacgcgccggtcgactcctgggacctggtcttcaaggaggagaacatctcccgcctcagccagtgcggcgtggccacgctggactcctccaccgagctggtgtccatcgccctcaactacctgggcctgccgcacaacagccagaatcccgaggactaccagaaagcccaggaactgttgctgaaggttcgcccctacattcgctatttcgactcctccagagtcgacaccgatctctccaacggcaacgtctgcgtggtggtcggctggcagggcacggcctacatggcccaggtcaacaacgaacaggccgggaacggtcgccatatcgcctacagcattccccgggaaggctcgctggtctgggccgagaacatggtgctgctcaaggatgcaccgcatccgcagcagggttatgcgctgatcgactacctgctgcgtccggaggtcatcgccaggacctccaactacgtgggctatccgaatggcaaccaggcggcgctgccgctggtggagcggaagctgcgggaaaacccggcggtttacctgagcaaggaaaccatggcgaccctcttcccgctggaaaccctgccactgaaggtcgagagaatccgtacccgggtctggagccgagtcaagaccgggagctga

SEQ ID NO: 323272 - DNA, 807 bp, Pseudomonas aeruginosa
gtggatatcgcattgcacggcggcgcctggcacgagtcactgggaaagttgctcgaagcgctggaccggccgttcttctggcggatcctggcgcagaccctcggccagttcgcccccgtcgacaactgggcggccctgatattcagcgattccagtcccttgattctttccttcatggaggaggagagagaagaagtcgagccggacccgctgatcagtcgatatataaccggactttatctgcaagatcctttctaccaggtatccaggaactgtcggcgcggcgggctttttcatcttgcggatatcgtctccgaagatttcgaaacgaccgaatattacaatacgtactttgcgcattatgtggtgacggacgaagttcaatataacgtcccgctggatggtgaaagaaccctatgcctgtcgttgggcagcgagagccgcttcggtgccgagcagatcgcgctgttcgagctgcttcgcccgtgggtcatcgcgctgatgaaaaaacgcatccacttcgaggatgcggtcagggaggaggcgaaaccgatcgcagcggcggaggtggaagtccagccctggagagggttgatatcgccgctgaccgcgcgggagtcggatgtcatccggctgatgctggatggatactcgaacaaggaaatagcggatcggctgacgctgtcgatcgccactatcaaggtgcatcgccggcacatctacgcgaagctgaacgtgaagtcccactccgagatattcgcgctgttgatcaacccgcccgcgccgcggctcgccgacgcacgctag

SEQ ID NO: 323273 - DNA, 2655 bp, Pseudomonas aeruginosa
atgcccgatgtacgtctttcctctcgttcgttgacccccgtgctctgtgcggtggggctcgcctgcgcgctgcagggcgaggtgcaggccgccgacggtgggccgcgcgacgcggccacggcgccccgggtattcgacatagcgcccggcgaactggccgaggtgttgttgaacatcgtgcgccagggacacgtgccgatcgccttcgaccagcgcctggtggcggggttgcgcggaccggatatccgcggccggctcagtgtcgaggacgccttgcggcgtgccctggccggcagcgggctggcatacgcgcaggacgaaagcggtgccttcgtcctgcgccgcggacaggcgcctgtgcaggagacgcgaggtgcgacggtggcaccgaccttgtccaccgtggtggtcaccggcacgcgcaagagcgatgtgaaggcgcaggacagcctgagcccgatcgatgtggtcagcgctacccagctacgcagcagcggtgcggtcgacctgcgcgatgcgctggtcaaactgttgccctcgctgacccgccaggcccagccgttcaacgcctcggcgttgacccacacgcagtcgctgcgcgggctgagccccaaccatgtgctggtgctggtgaacggcaagcgtcgccacgaaacggccaatctcaatatcagcggcgggctggagaagggctccaccggcgtcgatctggacaccatcccgatcaacgccatcgagcgggtcgaggtgctgcgcgacggcgcctcggcgcagtacggttcggacgccatcgccggggtgatcaacgtcatcctcaagtccgccgacagcggcgggtcggcggccgctgacgtcgggcagaccggcgacggcgacggcttcacccatggcggcggggggaacatcgggctggccttcggcgatagcggcttcgtcaacctcaccgccgaatatcgcgagcaggagcgcacgatgcgcagcggcatcgatgagcgcaccggtcggcgcgacaacatttccatgggcgatcccgcgttccaccggcaatcgttggcgctcaactcgggtttcgggttgggcgacgatatcgaggtgtacggcttcggcacctatacccggcgcaaggcctcctcggcggccaactatcgcctggcttcggtggcgccgacgctgtatccggacggcttcacgccgcgcccgaacagcgacgaggacgactatgcgttcctcgccggggtgcgcggcgagcgtctgctggatgcctggcactgggacctgagcagtggctacggcgccgaccgtcccgatatcggcatgacccagtcggtgaacgcggcgatctaccgtgaaaccggcaacagtccgagaagcttcgacctggcgcgctaccgcaacagccaatggaccagcaacctggacctggggcgggaattcgaactggatttcctcgctgctccgctggcgttgtcgctgggtgcggaataccggcgggaaagctaccgcatcgacgccggcgacccggcgtcctactacagcggcggggcggaatccctggctggcctctcgccgctcagcgaggggcaatggtcgcggcacgcctgggcgtcctacctggacctgggtacctccctgaccccagcctgggaggtcgacgtggcggtgcgccacgagaaattcagcgacttcggcagcaccaccaacggcaagttcgccacccgttaccagttcgatccgcgggtggcgctgcgcgccagcgtaagcagcgggttccgcgcgccgtccctggtccaggagcactacaccggcctcagcgttggcccgaccatcgcccttggcctgctggcggccaactcgccggcggcgaagatgctcggcgccgacgaactgcaaccggagaagtcgaccagcttcaaccttggcctggtactcagcccgtgggaaaacgtcgggctgaacatcgacgcctaccagatcagcatccgcgaccgcatcgtcgacagcgccacctattccggccaggaagccatcgatgccctggccgcggcggggatctcgttgccggccagtgccagtacggtcagtacccattacctggccaacggtgccgacacccgcacccgcggtgtcgacatcaccggtcactacctcgtcgcgcttggcgagtacgggcaggtcgactgggaactgtcggccaacttcaaccgcaccaccttgcgcaagaaccatcgaggcgccaacggcgagccgctgctcaatgcccagcaggtcgcctggatcaccagctccaccccgcgcagccaggtttccctcggcggcacctggagccgccaggactgggaggtcagcctgcgcctgacgcgctacggccggaccagctcggaactcgactacacggtagggccggacgcctggtcgacggagaaattcaaccatttcgtcaacgacccgaagtacatcaccgacatcgccgcgcgctaccggctcagcgccgacctgacgctgaccgccggcgccgacaacctgttcgacgtccgtccggacaagctgcccgcgcagaacaccacctatggcgacgtgctgcgctacgacacctatgcctcgcagatcggcttcaacggcgccttctactacctacgcgcggcataccgcttctag

SEQ ID NO: 323274 - DNA, 489 bp, Pseudomonas aeruginosa
atgctcgataatgccattccccaaggtttcgaagacgccgtggagttgcgcaggaagaatcgcgagacggtggtcaagtatatgaacaccaaaggccaggatcgcctgcgccgccatgaacttttcgtcgaggacggctgtggcggtttatggaccaccgataccggctcgcccatcgtcattcgtggcaaggacaagctggccgagcacgcggtgtggtcgctgaaatgcttcccggattgggagtggtacaacatcaaggtcttcgagaccgacgatcccaaccacttctgggtcgagtgcgacggccacggcaagatcctcttccccggctatcccgagggctactacgagaaccacttcctgcattccttcgagctggacgacggcaagatcaagcgcaaccgcgaattcatgaacgtcttccagcaattgcgcgccctgagcattccggtcccgcagatcaaacgcgaaggcattcccacctga

SEQ ID NO: 323275 - DNA, 489 bp, Pseudomonas aeruginosa
atgcgagagtaccaacggttgaaagggtttaccgacaacctggaattgcgtcggcgcaaccgtgccacggtcgagcactacatgcgcatgaagggggccgaacggttgcagcggcacagcctgttcgtcgaggacggctgcgccggcaactggaccacggaaagcggcgaacccctggttttccggggccatgagagcctcaggcggctcgccgagtggctcgagcgctgcttccccgactgggagtggcacaacgtgcggatcttcgagaccgaggatccgaaccacttctgggtcgagtgcgacgggcgcggcaaggcgctggtcccggggtatccggagggctattgcgagaaccactacatccattccttcgaactcgagaacggccggataaaacgcaatcgcgagttcatgaacccgatgcagaaattgcgtgcattgggaatagccgttccacaaataaaacgtgacggtattcccacctga

SEQ ID NO: 323276 - DNA, 714 bp, Pseudomonas aeruginosa
atgcatgatgagagagagggatatctcgagattttgtcaagaataacaaccgaggaagagttcttctccctggttctcgagatatgcggtaattatggattcgaattcttttcattcggtgcgcgggcgcctttcccgctgaccgcacctaaatatcatttcctgtccaattacccaggggaatggaaaagcagatatatctccgaagactacacatccatcgacccgatcgtgcgccatggtctcctggaatacaccccgctgatctggaatggcgaagacttccaggagaaccgtttcttctgggaggaagcgctgcatcacggcatccgtcacggctggtcgatcccggtccgcggcaagtacgggctgatcagcatgctgtccctggtgcgttccagcgagagcatcgccgccacggaaatcctggagaaggaatccttcctgctctggatcaccagcatgctgcaggctaccttcggcgacctgctggcgccgcgcatcgtcccggaaagcaatgtgcgcctgaccgccagggaaaccgagatgctcaagtggaccgcggtgggcaagacctacggcgagatcggcctgatcctgtcgatcgaccagcgcacggtgaagttccatatcgtcaatgcgatgcgcaagctcaactccagcaacaaggcggaggccaccatgaaggcttacgccatcggcctgctcaactga

SEQ ID NO: 323277 - DNA, 768 bp, Pseudomonas aeruginosa
atgatttattacttgatcggagtggcgctattcatcttcatgctggaacagttggttcccggctggaaattgcccaaggtgagcacctgggtggcccgggtgatcttcctcaacatcgtccaggtgtcgatcgccctgctcgccggcatcacctggaacaaatggatgatggggcacagcctgctgcacacctcggatgccctgccaccactgctggccggcttcgccgcctacttcgtcaacaccttcgtcacctactggtggcatcgcgcgcgccacgccaacgacacgctctggcggctgttccaccagttgcaccacgcgccgcaacgcatcgaggtattcacctccttctacaagcatccgaccgagatggtcttcaactcgctgctgggcagcttcgtcgcctacgtggtgatgggcatcagcatcgaggccggcgcctactacatcatgttcgccgcgctcggcgagatgttctaccactcgaacctgcgcaccccgcacgtcctcggctacctgttccagcgcccggagatgcaccgcatccaccaccagcgcgaccgccacgagtgcaactacagcgacttcccgatctgggacatgttgttcggcacctacgagaacccccgccgcatcgacgagccgcagggcttcgccggcgacaaggagcagcagttcgtcgacatgctgctgttccgcgacgtgcacagcctccccggaaaaacccagcccgctcccgtcctggtcaagcccgacgtcaggtga

SEQ ID NO: 323278 - DNA, 1170 bp, Pseudomonas aeruginosa
atgattccagacatcgattcccgtctcagccggaacatattgaaatccatctcgtatggcctccccctcgccgaagtggtccccgaccatacctatgcgcaactggaaacgcgcctcggcgaactgaaacgcaggtatctggagctgcgcatctcccacggcgcgcgcgagctgccgttcagcaactacctgttctacctgatcctccagtcgcgccaccaggaattcgacttcaagctgcgccagggcaactcggtggtcaccaacatccaccgattcaagagcaagggacgcatcccgtccctgaccaccctgctcctggccgatgcggtcaacgccaagagcgagctggagctcaagcatccggacatcccgcagctcgaccgccacgctcgcgacatcgagcgctggctggccgccggcaacgtcatgccgcccagcgagcgggccctgcgcggcctggttgaggcgctggagcgcgccgctggcgaaggccgtccgttgcacctggtgagcgcggtatgcccggactactcgcactccagcgatgccgagggcaagccgcgctacaccttcgagcgagtcggcgaccagcccggcctggccggcgccaagctggtcagcgccggccaggcggtggcggagctggccagggcgcgccaggtggaaatccgccacgcgatcctcggcggcgagttcgagtacctatcgttcaaccgcaaccccgccaccggcgagacccgcgagggtttcctcggcaaggtcgagcgccagctcgagcggatcgccggggccctgccctgcccggccgcgacctgctcgttcttcgagatgtgcggcggcgaggacggctggcaccgggcccacggcgagatcgtccagcgcctggaacagggcgactacggccagaccgggctggactacccggccctggaatcgatcttcctgtcgcgcctgccgctctacgagaaatggttcgccagccagtcgcgcgagcagatctgggccagcttcgtctcccaggccgccgagtacgcattgatgggaaaactcttcggcgagcgcttcgacaacttcgtcgtgctggccgtcgatcactaccggatggagccgttctactcgttcttcgcgaccgtcccgacgctctacatccgaaccgactacctgtaa

SEQ ID NO: 323279 - DNA, 1275 bp, Pseudomonas aeruginosa
atgcaagatgaactgttcaagacccgatactccaagtacggatacggcatcgacgtgcgccgtacctacaaggacctgccctgccagccgttctggacctgggtcaccggcaagtcgctgaacgaccgcccgccgcgacggccgaaagacactctgctcaagccctggcagctctacctgcacatcagttggggctacgcggtgttcttcctcgcggtgatctacggccagcaactgctcgcctcgcagcagccactgtggctgaagtgcctgctgggcgcgctgatcatgtgcctggtggtcaaccgccagcgtggcttcctccataccttccactacaccacccatggcgccagcctggagaacaaggcgctggcccgcttcacctgcaagtggatcctgtcgatcccgatcctgcacaccccgcgcgacgagtacgtgaagctgcacgtgaacgaacaccacagcgtgcgcaccttcaataccgagcacgacgtcgacctggtcttcatgaaacagcacggcttctacaagggcatgtccgagagcgccttctggacccgcctggtgctcgcgcccttccatccggcgcggatcctcgagcacctgaagttccgtttcgacgtcagcttcgtctccgccccgcgccacgagcgcgtcagccgggcgctctactgggctgcgctgctcggcctggtgtacgccagcggctacctggaggcgttcgcgctgttctacctgttcccgatcttcatcctcacccagtactcgtcgtggatccagcacgtctccgagcacctctggttcgcccgcaacgagcacggcctgccgcgcttcctgcactacggctcgctgagctggggacgcttcctcggccgcccctacccggccgacaagcagggcctggccttcgccctggcgttcgttcgctggagcctgggcgtgctgctgatcgacatcccgctgcgggtgttctccttcatgcaggacctgcccagccacgacttccaccatcgcaagccgggagtgaacttctggcgcatcgcgccggagcgcgcggccaacgaggcgcgcccctcgaagttcggcccgatgaccgagacctggggcatgtgggagaacttcctgatcctgcgcgaccacctctgccgcggccagtcggacccgttcggaatcgtcgactggtaccgcgagaaccatgcccggctcgctccggagaccgatgccgccaaccagccccacaccaaccaacccgcatcccaggctaccgcctga

SEQ ID NO: 323280 - DNA, 624 bp, Pseudomonas aeruginosa
atgaatactcagattgcccagatcacccagagcctggcagccaacggctgcgcctatatcacccccagcgacgcgctctacgacgagcaggactgggaactgatgaaccaggtcctggccaactcgaccctgccgtgggagaagatcctgatcggcgacgccgacgaggagaacgacctctacgtggcccgtttcatgaccgaccgcgaccgtcccacggtggtcaaccatgcgctgtcggagctgatcatcccgcgcgtctgcaacgacaacgtgatgagcctgttccgcaagctgatgggcgacgacgccttctacgtccggcgcatgcaggtgaaccggatgaaggccggctcgttcatcggccggcacctggataccgacagcaacccggactaccagtactccatcgtcctgcagctcggcacctacttctccggcggccagttcgtggtctacgaccgcgacggcaacctgcgcaacgacatcaagccggagccgcgctcggtgatcatcagcgactgcagctatccccacgaggtccagcaggtgaccgccggcgagcgcgtctcgctggtgttcttcgtcagtcgccatgcggaccggaaccggcgggtctattga

SEQ ID NO: 323281 - DNA, 2430 bp, Pseudomonas aeruginosa
atgtcgaagaacgcacgttacgcctggcgcctgtccctcggcggcctgctgctggggctactggcctgcgcggtctacctgctggccgtcccgctgggcttcaagtacggcgagatccaggtcggccatggcctggaacacgaggggcggatcgcctgggacgccgccggcgtcccgcatatccgcgcgcagagcctggaggacggctatttcctgctcggctacagccacgccagggatcgcctgtggcagatggagttcgcccgccgctatgccggcgggacgctctccgaagtgttcggcgccaagaccctgccgatggacaggttcgcccgcaccctgggcttccggcgcaccgccgagggcatctacgccaacctggacgcgcccacgcgcgtcctgctgcaacgctacagcgacgggatcaacgcctacctggagctggccccggcggcgctgccgctggaattcagcctggtgcgccacgaacggccggggccctgggggccggtggacagcctgtccctgcacctgctctattcctggaccctgagcgccaacctgggcatgcagttgcagcgcctggcgctggccgagcacctggacctggcgcggatcaacgaggtgttcgccccctatccgggcgagcggccgccggccacccgcgactacgccagcctgtaccgctccctgcacggcacgccggacgccggcaagctgctggggcaactgcccggttccaacgtcgaaggcatcggttcgaacaactgggtggtctccgccagccgcagcgccaccggcaagccgctgctggccaacgatccgcacctgcgcctgaccaacccggcggccttctacctggccagcctgaagatccccggcctgagcctcaccggcgccaacttcgccggcgccccgctgttcgtcatcggccataaccagcgcatcgcctggggctacaccaataccggctcgcacatccaggacgcctacctggagcgcgtcgatccccaggacccgcggcgctacctggccccggacggctaccggcccttcgagacgcgcctggaacgcatcgccgtgcgcgacggcgagacggtctcgctggaggtccgcagcacccgccacggcccgatgatcagcgacatctacgaaccggcgcggctgccgcaggcgcagcgcgaccggctggtgatcgccctcgcctggaccggcctcgaccatcacgacaagaccttcccgagcctgctggcgatcaaccgggccgaaggctgggaacagttcctcgacgccgccgccgacttcggcgtgccgccgcagaacatggtctatgccgacgtcgagggcaacatcggctacgtctccgccggtcgcgtaccgctccgcggcgccgacgacgacctccatggcctggccccctcgcccggctgggagagccgctacgactgggtcggctacgttccggaaagcgccaagccacgcagcctcaacccgcgcgaagggttcatcgccacggcgaaccagcgcatcgtgccgcccgacaatgccttcgacttcggccacgactgggtcctgccctaccgctacgaccgcatccgcgagtggctcggcggccccggccagcgcaccctggaagacagcctggagttgcagaacgacgagttctccagcgtgatggcgagcctgttgccgaagatgctggagcaggtcagcgaccccgaactgcgcgccagcgaggccttcgccctgctccagggctggaaccaccaggccgccgccgacctggccgcgccactgatcgccggctactgggtacgcgccttcacccgcgagctgctgcaaccgaggatcggcacgcagttgctggccagcggctggaaccagcgcaactacgacggattcctccggctgatcctcgacggccaggccgatctgcgcttctggtgcggccaggaacaaggctgcgacctcaagctgaaccagtcgctgcgccgcgccctcgacgaactgcgggccgcccacggaagcgcgccgagcggctggaagtggggcgaggcgcacgccgccctcgccgagcacgtgcccttgcacaagaccccgttgcgcgcgctgttcgacctgaagaacaacaagggcggcgacaacttcagcgtcaacgtcgggcgcttcgactacagcgacccggccaacccgttcaacacacggatcgccgcgaccctgcggatggtcatcgacctggcggacttcgacaactcgcgctacgcgctgtccacccgcaattccggcctgccgttcgacggcgccaccgacctcaacgaactctgggcccgcggcgcgtacatccgtatcgccgacgacgcccccgacgcgacggaccgccagttggtcctgcgcccttcagccccttcctccggcgagccacgaccatga

SEQ ID NO: 323282 - DNA, 738 bp, Pseudomonas aeruginosa
atgaccagcgatccgcagaaaaacgccttcgacctcgactactccagccgcgaacggcaattccccgagggcttcaaacgcaagatagtcgccgacctgcaagagggaatgccgcagttcgacgtgctgcaatacttcggcaaccagccggatatcttcgagacctacgaccacctggtactggcgaccgatccggagggcgaacggatcatcggcatcctgggcgcgaaggacttcgtccgcggcgcgacgcgtttcctctacctgtggacagcgatggtggtcgaccgctaccaccgcaccagcctgttcaagcggatcaaccagttcttcctgcgccaggtcagcgagcgcaacggcgggctgccgccactgatcgtggcgaagacctacaacccggtggtctacaacatgttccgcgccctaagcgcgcggatcccgggagcgacgctgtacccggacctggaagcgccgcgccagagcccggacatggtcgacctggcccgcgacgtggtcggcacgctgtccgccaacctgcgcctggatgcggaaaccggcctgatacccggcgggcaacgcagcgtcgccccggatttcttcccgcgcatggcgatgtccagccacgccaggaccaacgaccacttcgtcgcccacgtcggcagcagcgaccagatcctctgcatggtccgcctcgcgcccggtgccgaaccctacgtgcagcagaggatcatccggtga

SEQ ID NO: 323283 - DNA, 390 bp, Pseudomonas aeruginosa
gtgagcggactcgcgcagcgctccgacgacccgtggctggcggcgctgccggccgcggtgctctacggcgcctgggcggcctatgccaaccaggacggcggcctggccgggatgggcgtcgccgccctgctccagggcgccgcgagtctcctggcgacgcgcttcggcctgtaccttttgcaatgtctcggccgccgccacggccttgcgcaacgccaggcgcccctgctggtggtgctcctgctgaccgcgccgatggccgcgctgcactggctctcgggcacgccgcatccattggcgagcgtggcgccatcgttcgtcatcggctggctctacttcgccctctgggcgcgccgccgcccgggccgccggcaagccagcggcgcctag

SEQ ID NO: 323284 - DNA, 624 bp, Pseudomonas aeruginosa
atgctggagattctcggaaaggcctcttcgatcaacgtgcgcaaggtgctctggacctgcgccgaactggacctgccctaccgccgcgaagactggggcagcggcttccgcgacacccacgcggcggaattcctcgccctcaacccgaacgccatggtgccggtgctgcgcgacggcgaactggtgctctgggaatccaacagcatcatccgctacctggccaaccgctataccggcgaacgcctctatccgcagcaggcggcgccgcgcgcgcgggtcgaccagtggctggactggcaggcctccgacctcaaccgctcgtggagctatgccttcatgagcctggtccggcagtcgccggcgcaccgcgacgcggcccaggtggaggcttcgttgcgcggctggacgggcttcatggaaatcctcgagggacaactgctacgcaccggcgcctatgtcgccggcgagaccttcagcctggccgacatcgccatcggcctgtcggtcaaccgctggtacgagacgccgttcgagcatccgtcgctgccagcggtgcgcgcctattacgagcgcctcggcgcccgtcccggcttcctcgcccacggccgcaacggcgtaccctga

SEQ ID NO: 323285 - DNA, 384 bp, Pseudomonas aeruginosa
atgaagctacccgtgctcgctgtattgggcgccgcgctgctgttgagcgcctgcgcgaagaaggaggccgaggcctgtgcctcgccggacgtgaaggaccaactgatgcggatcttcctccagggcgcgatcaccgagcgctcgccggagttcaaggacagcgcgctgcgcgacgtggcgatcctcgagaaggatcccgacagcggcgtgctgtcctgcgtcggcaccctcagcgtgccggccggccagcaggtggtcgagggcgtcctgcaataccgcatcgccccggtggccaagtccgactacgactacctgctgctggataccgccggcgccaacaccaccgccctggcgcagcgcctgaacaaggcgctcggccagtga

SEQ ID NO: 323286 - DNA, 288 bp, Pseudomonas aeruginosa
atgtaccgagacaccgtgaccctcaccgtcagcgccgagcaacgcggccgcgaaagcgaggccgtggacaacccgaacgtcgccatcggcctggaaagcgtcgagccgggcgtgctcaagctgcacttcgaaggccagctggacgccccggagaacgctacccacatctgcttcagcctgaccatcggcctcacctactacggcccgatcctcgacggcgcggccagcgagaacggcggctggatgaccttcgaaagcgacatgctcgacccggcgcaactggcctga

SEQ ID NO: 323287 - DNA, 1410 bp, Pseudomonas aeruginosa
atgaaaatactcgcccttctcgcagcctgcctgctggcaggctgcgccgccaacgccccgctgcgcgatgacagcgaatcgacctgcgccgacatgcggccttgcagcgacagctactacgaacgccatccgaactacgagatcggcttcgtcgaatacagcgagcgcggcaacgacttcgcgcctgccagaacgcaacgcctgatcgaccagctaaagcgctactccgcccggggggacatcgccatggtggtgttcattcacggttggaagcacaacgcgggacgggacgacggcaacgtcgccagcttcaacaaggcactcgccaatctcgcctcctccggggtgctgggcaaacgcaggctggtcggcctctatgttggctggcggggcaagtcgatgcatggcctgtatagcgagaacctgacctactgggacaggaaggccgtcgccgaggaagtcggccggggtggcgtcgccgagttgctcgcccagttggaacggatcgatcgcaaggacaggaactatctggtgatcgtcggccacagcttcggcggcgcaatcaccctcggcgcacttcacgacccgttgctcgaacgcctgctggctctccaggacggtcagcggatacgcgccttcggcgacgcggtaatcatgctgaatccggcgatagaggccaatcagggcctgttgctcaaggagaacagcctcaaggtcggcgccctgggagcccggccgccgccgctgctgtacgtcatcagttcgcacggcgacagcgccacccacttcgccttcccgctcggccaatgggtcggcgtcaacctcacctggagccaggtggacctggacaggacctacaacggaacccgctatcgcctccgggaagaagacctggataccaccgccctcggcaactacagcctgtatcggaccgccctgctgatcgaccgcgagtgcccgctgccggatggcagcgacaactgcgcgccaagaccgcccgaaccacgggtgatcgacgacaccgatatcggcaaatggcgcttcaggagcttctgcagcgcggacggcggcaacgccgatccggcgctgccgcgcatgccctgctacagcaacgagccggtcaacttcatctacacctcgcagtccttcatcgccgaccacaacgatatcttcaacgaccaggtgatcgccttcatggccaccgccgtcagcaaggccatctacgaacgtacggctggcgcctcctactaccgggagtgccacgacccggtgcggaagaacttctcgttcggcaagtgcttcgacttccactacctcaaagccacggccatgcaccggcggctgcaacggcaactctcggaacccggcacccgcagcgaacaggacgtcctctatgaaaaccctctctag

SEQ ID NO: 323288 - DNA, 669 bp, Pseudomonas aeruginosa
atgaaaaccctctctagcctgctcctgatcggcttcgccgtcgttctgctcgccccgcggatggcgcccgccgccagcgccgccgaagacaaggccacctattgcggctccggcttcacccagtatctggttccggacgacgtcgcgggctgctcgctcagcgaggcctgccgcctgcacgatatctgctacggccgctgcgacaaggacggcgacctctacggcagcgcctactgcgcgcaaagcgaaaagtccgaagcccgcaacatgagcaagcagcagtgcgacgccaggctgcaggccgacatcgccgcacagaacggcaacagccacctgtgccgcgcggtgggaggcgtctaccgggtattcgtgaagcacctggggcaaggtccgttcaatggccgggaggcactggacatctacctgaaggtcatgcaatcggcgcccagcgcagccgacgccgacgcccgcctcgaagccatccatcaactacagaagcagggcctgaccgacgccaaggaaatccgttacgacgccgagcgtatcgtcatcccactcaacaggcccgtggaatcgccgttgaccaacggctcggacactctcgtcctgccgcgcaacctcgaccgggaacggctgcgccagctggaccagcggctcatccgccaatga

SEQ ID NO: 323289 - DNA, 2367 bp, Pseudomonas aeruginosa
atggtggagttactgcaagggttcgtcctgacccggcactggcgcgatacgccggccggcacggaagtcgcgttctggctggcgaccgagcagggcccgcggcaggtgcggctgccgccgcagccgtcggtggcgttcgtcctcgccgagcagcgcgggcgcgtcgagtccctgctcgccggggagactggcgccgagctgcggccgctggcgctgcgcgacttccagcagcggccggtgctcggcctgtactgccagcagcatcgccaactgatgaatctggagaaacgcttgcgccaggccggcgtcgaggtgttcgaggccgatatccggccgccggagcgctacctgatggagcgcttcatcaccgcgccggtcagcctggaggcgagtgtcgaggccgacggcagcctgctcgcccggcgcctgaagccggctccggactatcgcccgcgcctgcgcctggtgtcgctggacatcgagaccaacgcccgcggcgatctctactccattgccctggaaggctgcggccagcgccaggtatacatgctcggcccggccaacggcgatgccgcggccgtggatttccgcctcgactattgcgacagccgtgccgggctgctggaacgtctcaaccagtggctggccgagcacgatcccgacgccatcatcggctggaacctggtgcagttcgacctgcgcgtcctgcatgagcatgcccagcgcctgaaggtgccgctgcgcctggggcgtggcggcgacgaaatgggctggcgcgagcacggcagccgcaacaaccactttttcgccgcggcggccggccgcctgatcatcgatggcatcgaggcgctgcgctcggcgacctggagcttcccctcgttcagcctggagaacgtcgcccggaccctgctcggcgaaggcaaggcgatcgacaatccgtaccagcggatggacgagatcgatcgcatgttcgccgaggacaagccggccctcgcgcactacaacctgaaggactgcgaattggtgacgcggatcttcgcccgtaccgaactgctcgacttcctcctcgaacgggccaccgtcaccggcctgccggcggaccgcagcggcggctcggtggcggccttcacccacctgtacatgccgttgatgcaccgcgccggcttcgtcgccccgaacctcggcgagaagcgtccggaagccagtcccggcggcttcgtcatggactcgcggccgggcctctacgaatcggtgctggtgctcgactacaagagcctgtatccgtcgatcatccgtaccttcctgatcgatccggtcggcctggtggaaggcctgcgccagccggacgacgagcactcggtggaaggctttcgcggcgcccgcttctcgcgtacccggcattgcctgccggccatcgtcgcacgggtctgggagggccgcgaggcggccaagcgcgaacgcaaccagccgctctcgcaggcgttgaagatcatcatgaacgccttctacggggtgctgggttccagcggctgccgcttcttcgacccgcgcctggcctcgtccatcaccctgcgcgggcatcggatcatgcgccgtacccgcgagctgatcgaggccgagggctatacggtgatctatggcgataccgactccaccttcgtctggctcggcagcccccgcgccgaggaggaggccgcggccatcggccgggcgctggtggcgcgggtcaacgactggtggcgcgagcacctgaaagaagaattcggcctcgacagcgccctcgagctgcaattcgagacccattaccggcgttttctcatgcccaccgtgcgcggcgccgaggagggcagcaagaaacgctacgccggcctggtgcgccgcgccgacggtggcgaggagatggtcttcaagggcctggagaccgtgcgcaccgactggtcgccgctggcccagcgcttccagcaggaactctacctgcgcatctttaatcgccagccctaccaggactacgtgcgcgattacgtacgacggaccctggccggcgagctggacgacctgctggtctaccgcaagcgcctgcgccggcgcctcgacgattaccagcgcaacgtgccgccgcatgtgcgcgcggcgcgcatcgccgacgactacaacctcgagcgcgggcgcccgcggcagtaccagagcggcggctggatcagctacgtgatcagcgtcgccggtcccgagccgctcgaggcgcggcgttcggccatcgactacgagcactacgtgggcaagcagttgcagccggtggccgacgccatcctgccgttcgtcggcgatgatttcgccactttggtcgaccggcagatggcactattctga

SEQ ID NO: 323290 - DNA, 534 bp, Pseudomonas aeruginosa
atgaccgaaccgacgattcgccgcctggctggcgaggagatcctggcgcgcctggacgaactggccgaggtactgctggactgcgtggaaggcggggcttcggtcagcttcatgtggccgttgccgcgggagcgggcgctggctttctggcgcggcgtcggcgagagcgtggcgggcgatgaacgcctgctgttggtggcggaagcggaggggcggatcgtcggtaccgtgcaactgctcctcgaccaaccgccgaaccagccgcaccgcgccgacgtggcgaagatgctggtgcaccggcgtgcgcgtcggcgcggcatcggcgaggcgctgatgggcgagctggaccggctcgcccgggcctacggcaagtccctgctggtgctggacacggtcagcggcagcgccgccgaacggctgtacctgaagaccggctggacacgggtcggggaaattccggactacgccctgatgccggacggcacgccctgtcccaccacctatttctacaagcgcctggctgctgccggctga

SEQ ID NO: 323291 - DNA, 552 bp, Pseudomonas aeruginosa
atggatatcgacgaactgattgcccgacgcctagccgccctgcgcaaggagcgcgagctgaccctcgcccaactggccgaacgctgcgcggtgagcaaggcgatgatctcgcgcatcgagcacaaccaaagcagccccaccgccagcgtcctcggccgtctcgccggcggcctgggggtcgccctctccgagctgctcggcgacgcgcaggcgccggccgaaccgctctgccggcgcgcgcagcaggaagtgtgggaagacccggccagcggctaccgccgccgccaggtcggcgctcgcgatccgcgcagcggctgcgagatggtggaagtggagatcccggcgaacgcccgcctcgactatccccgctggggcggccggccctaccggcagcgcctgtggctggtcgagggtgcgctgcgggtggattacggcgagcagtcgttccacctgcaacgcggcgaccgcctggacttcggcgtcgaccgcgcggtgaccttcgccaccgccgggcaagcctgccgctacctgctggtgatcctccacgactag

SEQ ID NO: 323292 - DNA, 399 bp, Pseudomonas aeruginosa
atgtacgcatccttcgctcccgcgacctgggccttgctcgcctacctcttcggcgcgctcgccctttgcctgctcatgctggggttgggccgggtgctgggcggccgatcgcatggccgggcgaagaacctgccgttcgagtcgggggtggattccaccggctcgtcgcgcttgcgcttctcggtcaagtacgcgttggtcgccatgctgttcgtgatcttcggcatcgagatgccgttcctctacctctgggcggtgtcgctacgggagaatggctgggcgggtttcgtcgaggcgacgctgttcgtctccctgctgctggtcggactgttctacctgcaccgggtcggcgccctcgactggtcgccggagcgccggcggaaaaagccgcacgactag

SEQ ID NO: 323293 - DNA, 324 bp, Pseudomonas aeruginosa
atggcgtggatctatctcttgctcgccggtgtcttcgaaatcgtctgggccacggccatgaaggagtcggccggcttcacccgcctgtggccaagcctggtcaccctgctgttcatgatcctcagcttcggcctgctggccgtttccatgaaaaccctgcccctcggcacggcctacaccatctgggtcggcatcggtgcggtcggcgccttcgccctgggcatcctgctcttcggcgaaagcccgagcccgttgcggctgctggcggtggggctgatcgtggccggcatcgtcattctcaagctggcgacccgtcagggctga

SEQ ID NO: 323294 - DNA, 462 bp, Pseudomonas aeruginosa
atgcccacctcgctcgtcctgaacggcaagaacgtcaccctcgacgtcgatcccaacatgcccctgctctgggccatccgggaaagcgccggcctgcacggcaccaagttcggctgcggcatggcccagtgcggcgcctgcaccgtgcagctggacggcaccgcggtacgttcctgcgtgctgccggtctccgcggtcgccggcaagcgcgtcaccaccatcgagggtatccagagcaagcccggcaaggccgtgcaggacgcctgggtcaagctccaggtaccgcagtgcggctactgccagtccggccagatcatgtccgccacagcgctgctggagcagaacgccagccccagcgacgccgacatcgatgccgcgatgaacggcaacatctgccgctgcgccgcctatgtgcggatccgcgccgccatccacgaagccgccgacaccctgaaggcctga

SEQ ID NO: 323295 - DNA, 2196 bp, Pseudomonas aeruginosa
atgaacagcaagatcgatctgagcaacgccctgcccggctcgcgccgcggcttcctcaaaggcgccgcggtggtcggcctgaccatcggcttccagtggagcggagcccggcgtgccctcgccgcggccctgccggacgccggcttcgcgcccaacgccttcctgcggatcgctccggacgacagtgtcacggtgatcgccaagcacgtggagatgggccagggtgcctataccggtatcgccaccatcgtcgccgaggaactcgacgcggactggagcaaggtccgcgtggaaagcgcgcccgccgacgccaagcgctacgccaacctggccttcggcaccatgcagggcaccggcggcagttcggcgatggccaactcctggatgcaattgcgcgaggccggggccaaggcgcgcgcgatgctggtcgaggccgccgcccgccagtggcgagtgccggccaccgaactgcgcacccgcgacggcttcgtcgaacatccggccagccagcgcaaggccagctacggttcgctggccgctgcggcggcggaactgccggtgccggaaaacgtgcaattgaaggatcccaaggacttccgcctgatcggtcaccaggcgccgcgcgtcgacgttcccggcaagaccgacggcagtgcgcaattcaccctcgacgtcagcctgcccggcatgctggtcgccctgctccagcgcccgccgctgttcggcgccacggtgaaatcgttcgacgccacggcgaccagggcgattccgggggtggtcgaggtggtccaggtgccgcacggcgtggcggtggtcgccaagggcttctgggcggcgaagcaaggccgcgacgcgctcaaggtcgagtgggacgagagcaaggccgagaagcgtggttccgaggcgctgatggcggagtaccgcaagctcgccgagcaacccggcaagcccgcgcgcagggacggcgacgccgccaaggcggtggccggggcgacccgcaggatcgccgccagctacgagttcccgttcctcgcccatgcgccgatggagccgctggacgcggtggtcaggctgaccgccgacagctgcgagatctgggccggcgaccagttccagaccgtcgaccagggcaacgcggcgcgcaccgccgggctgaagccggagcaggtgaagatcaatacgctctacgccggcggcagcttcggccggcgcgccaacgcctggtcggactatatcgtcgaggcggtatcgatcgccaaggcgctgggcgccaacggcgtgccggtgaagctgcaatggacccgcgaggacgacatccacggcggtttctaccggccgatgtactaccaccggctcgaagccgggctcgacgccgacggcaagctggtcggctggcaacatcgcatcgtcggccagtcgatcctggaaggcacgccgttcgccgcggtgatggtcaaggacggcatcgacgccacctcggtggaaggcgccgccaacctgccctatgcggtgcccaatgtctcggtcgagctgagcaccacccaggtcggcgtgccggtcctgtggtggcgggtggtcggcagctcgcacacggtctacgcggtggaggcgttcatcgacgaggcagcgcaggccgccggcaaggacccctacctgttccgccgcgacctgctggcagagcagccgcgcctgcgcggcgtgctcgaactggctgcggaaaaggccggctgggacccgtccaggccgctgcccgccgggcgcgggcgtgggatcgcggtgaccgaggcattcaagaccttcgtcgcccaggtggtcgaggtctcggtggacaaggacggcaagctgaaggtcgagcgggtggtctgtgcggtggactgtggcatcccgatcaacccggacgtgatcgccgcgcagatggagggcggcatcggcttcggcctcggcgcgatcctgcacagcgcgatcaccctgaaggacggcaaggtcgagcagaacaacttcgacggctaccaggtgctgcggatcgccgagatgcccaaggtcgaagtgcacatcgtgccctccggcgaagcgcccaccggggtcggcgaacccggtgtggcgcccatcggcccggcgctggccaatgcgatcttcgccgccaccgggcaacgcctgtacaacctgcccttccccacctccttcgccaaggcctga

SEQ ID NO: 323296 - DNA, 555 bp, Pseudomonas aeruginosa
atgaccgagcctctcccttcttcgtccctgggccccgccctgcgtcgctggcgcctgctgcaccgggtcaagcaaacgcatgccgccgaattgctcggcgtggcgcaatcgaccatctcgcgctgggagtccggtacccaggcgctgctggtggaggaacgggcacgcctggagcgtctgctcggcgcccgcctggaagccgccgccgaccaggcactggcccgcctggtcgaggccaacccgcaacccgtgcacctgatctgcgacctcacccatcgcctgttggcctgttcgccggcacgcgccgcgcaattcggcgtgcctctcggcgaactgctcgaccgttcgctgtggccctattgcagcgaggaaatcctccgccaggaagccaccctcgaggaactcggctggcgcgaactgctggcaccgccggcgctggagttcgccagcggagcgaacgcctcggccatcgtgccgatccggcgcagccgttgccgctggacccgcatgaccctctcggacggacgcgcggtgcgcctggtggaaaccctctga

SEQ ID NO: 323297 - DNA, 579 bp, Pseudomonas aeruginosa
atgtccctcgaactgctgagcaaccgcctcgaattcctccgcgaagccgaacgcctgaaagacgtcctgcgctccgcgcacacctcctccggccgcccggaaagcaccgccgaacatagctggcggctgtgcctgatggcactggccttcgaggaccaactggccggcctggacctcggcaaggtcctgcgcatgtgcgtggtccacgacctcggcgaagcgatccacggcgacatccccgccgtcgagcaggccgcgcacccggacaaaggcgaacaggaacgcgccgacctgttgcagctgacccgtcacctcgacgcgccgctgcgcgaccgcctgctcgccctgtgggacgaatacgagcgcggcgagtccgccgaagccctggcagtgaaggccctggacaagctggaaaccctgctccagcacacccagggcgacaatccggcggacttcgactatgccttcaacctcgactacggccgtcgctataccgaccgcgcaccgctgttcaagaccctgcgcgagctactcgacgccaggacccgacagcgcctcgcagctcggcgcgacgcctag

SEQ ID NO: 323298 - DNA, 1188 bp, Pseudomonas aeruginosa
atggactctgaccgcgacgccgccgccctgcgccggcaactggccgacccgttgctggcggctacccacccggtctaccggccgctgctctggaccctgctcggttgcgtgctgctgttcatcggctgggcggcctgggcgcaactggacgaggtgacccgcggcgacggtcgggtcgtgccgttcagccgcatccagaagatccagagcctggagggcggcatcctcgaccgcctgctggtgaaggagggcgacctggtggaagtcggccagccgctggtgcgcctcgacgagacgcgcttcctcaccaacttccaggagtcggcgaaccaggccagcgtgctgcgcgcggccattgcccggctcgacgccgaggtgctaggcaagaagagcatcgagttcccgccggacgtcgatcccgaggggccgctggcgcgttccgaacgcgagctgttcaagtcgcgccgcgacaaactggtggagggcacccaggcgatccagcggcagatccacctggcgcagagccagctcgacctggttcgcccgctggtggccaagcgtgcggtgagccagatggaggcgctcaagctgagccaggacatcgccaccctcagcggcaagctgaccgagctgaaaagcacctatttccaggatgcctataccgagcgcgcacagcgcaaggccgatctcagcgccctggaaccgatcgtccagcagcgccaggaccagttgcgccgcaccgagatcctgtcgccagtgcgcgggcgggtgaacaccgtgctgatcaacacccgcggcggggtgatccagcccggcgagccgatcatggaagtgatcccggtagaggagcgtctgctggtggaggcgaagatcaagccgcgcgacgtggccttcctggttcccggcatgccggccaaggtgaagatcaccgcctacgactacaccatctacggcgacctcaagggcaccctggagcagatcagtgccgacaccatcgaggaggacaccccgcatggcaaggagtcctactaccaggtgctgatcaagaccgatggcagccagttgaagcgcggcgaggaggtattgccgatcattccggggatggtcgccgaggtggacatcctcagcggcaagcgcagcgtgctcaactacctgctgcggccgctgatcaaggcgcgcctttactga

SEQ ID NO: 323299 - DNA, 2172 bp, Pseudomonas aeruginosa
atggaagctgagaaaaccccggataacgtcgtgatcctcaaccacgaccccatcgtcgacccgttgcgccagggcttgttgctgctctgccggcggcttggccgaccgctcggcgacgccgaactggtggacggcatgccgctggagcacggtcgcctgccgttgcacctggtggcccgcgcgttgcgccgcgccgacatcaccgcccaggtcacccgccagccgttgcgccggatcgatcgctacctgctgccggccctgctgctgctcgacgacggccgcgccctggtgctggtgggcaacgacggcgagcatgccgaggtgctggtaccgcagagcgacggcggaagccagaggatgccgctggccgagctggaagcgctgtacagcggcacggcgatcttcgccaagtgccgctaccgcccggacgggcgggtcggcgactacgccagcgccttgcccgaacactggttcttcggcccgctcaagcggctctggcgttcctacgccgaggtcgccgccgcagcgttggtggccaacgtcctggcggtcgcctcggcactgttcgccatgcaggtctacgaccgcgtggtgcccaacgcggccttcgacaccctgtggatcctcgccagcggcgtggccctggcgatcgtcctcgacggtgtcctgcggatcatgcgcggccacctgctcaacgtgctcggcaagcgcctcgacctgcaactctcgaccctgctgttctcccgcgtgctgagcacccgggtcgccgccaagccggcgtcgatgggcgccttcagtacccaggtgcgggagttcgagtcggtgcgcgagttctttacctcgtccagcgcggcgctgatcagcgacctgccgttcgtggcgatcttcctgctgatcatcgccgtgatcggcggccatgtggtctgggtgccgctggtggcctgcgtgctgatgatcctgccggggctgctgacccagcgcctgctcggccacctgtcgcggcagaacctgcgcgaaggggcgatgaagaacggcgtgctgctggaagccttcgagcacctggagacggtcaaggcgacccgcgccgaaggccgctgcctgcaccagtgggaaaccctgaccggcgaactggccggtacggcgatgaagacccataccctggcctcgaccctgagctactcggcgagcatcgtccagcagctctgctacgtcggcgtggtggtcttcggcgtctatcggatcagcgagggcgcgatgaccgtcggcggcctggtggcctgctcgatcctcgcctcgcgggccatcgcaccgctgtcgcaggcggccggcatcctcggtcgctggcagcacaccaaggtggcgatggaaggcctcgaccaactgatgagcgccgagcaggagcgaccccagggcaagcgcttcgtgcacaaggagcgcctgcagggacattaccgcctggagggcgtgcgcctggcccacggcgacagcccgccggtggtcgacgtgcaggccctgaacatccgcgccggcgagcgggtggcgctgctcggcggcaacggcgccggcaagtcgaccctgctgcgcctgctcagcggcctgctcgacgcgcaggcgggacgcctgctgctggacgacgtcagcctgacccagatcgacccggccgaccgccagcgcggtatcggctacctgccgcaggacgtggcgctgttccatggcagcctgcgcgacaacctcaacctggagaacgccgcgctgggcgacgaggaactgctggagaccctcgacggggtcggcctgggcgccttcgtccgcggccacccgctggggctggacatgccgatccagggcaacgccagcctgtccggcggccaacgccaggccgtcgggctggcccgggtgctgctacaggaccctccgatcctgctgctcgacgagccgaccgcggccttcgaccagggcagcgagaaacaggtcatcgactacctgcagcaatggttgggcaagcgcaccctggtcatcaccacccacaagaaaagcatgctcgccctggtcgagcgtgcggtggtcctgcgccagggcagggtgatcatggacggcccgctggagcaggtggtgcagggcaaccaggtacaggcaccgcaggccgccgaaggaggcaaccatggactctga

SEQ ID NO: 323300 - DNA, 1278 bp, Pseudomonas aeruginosa
atgcgcgggcgcaggcagtacgcgcgcaagggacggcggcatgggaagggagccatctggctcctttccctgggtctgccgatgttcgcgtcggccatgcccctcgaccaggcggtcagggcagggctggcgatccacccggaagtacgatccgcgatggccgaagcggaccgtgcaggcaccgaggtggagatggccaaaggggggtactacccctccgtgacgatgtccggggggccgcaggagttcgacttcggcgagatcgtctacgatctcaccgcgtcgcagatgctgtacgactggggtcgggtgacgagcaaggtcgacagcgccagcgcgacccagcgcaagctgtccgaggcggtgctggtggcgcgcgacgatgcggcgctggatatcgtcgagacctacctcgacgtgcttgcctcggagcgccgggtggaggcggtgcgcgaacacatccagcgcctcgacggcatccgcgagatgacccaggcgcgcggcggcgacggctacgccgaccgcagcgagctggatcgcgccaatctggaactgtcgcgggcccaggagcagttgtcgctggagaagggcaacctgcaggacgcgcgcaaccagtacgcgatcctggtcggccaggagcccgccgacctggtggagcccgagccgatgtcgctgcaacgctacctggcggccagcgatatggcgcgggtgatccgcgaatcgcctttgcagcgcaaggccctggaggacgccaatgtcgccgaggccgaggtccgcgaggccaaggcgtcgctgctgccgcaactgaacctggaggccagcgcgctgcgccgggagatcggcgggcatccggaaagcgactcggtggtatccctgcgcttccgcatggacaccttccaggggctttccaacttccgccggccgaccgccgcgcagcagcgcctggagtcggcgaaatggagcgccgacgcgatgcagcgcgacatccgccggcaactgcagaacctcttcgacaacggcgacacgctgcgctggcgggaacagtcgctgacccagcaggtgaccgagtcggagcaggtcggcgagttgtatcgcgaacagttcgaggttggccggcgcgacgtgatcgacctgctcaacgtgcagcgcgagcggttcgaggcagagcggcaactgatcaacctgcggatcgaacgcaagcgcatcgagtatcgggcggccgcgcaagtcggcctgttggggccgctattggagaaccggctgaatcatggaagctga

SEQ ID NO: 323301 - DNA, 1233 bp, Pseudomonas aeruginosa
atgggcccgttcccggagggcgcctcgaccgtcaccgccgacatcaacggcggcaccgcgtcgaccccggtgccgttcaccatcgacaccattccgccggcgaccccggtgctgtccctggtcggcaacatcctgaccatctcggcggagccagggaccgagttgacggtcaccgtcgacgtcggcggggtgaccgccaccgccacggtgaccgccgacaacagcgggctggcgtcgctgaacctgctcaccgacctggacatcgacttcagttgggaccagttgctcaatgcccaggtgtcggtggtcggacgcgacccggccggcaacccgagcaacacggcgagcatcggcgtcggcaccagcatcgagcaaccggtgaccatcggcaacttcggcctcgacgtcagcctcaacccgctgaacccgcgtttcggtttcagcggaaccaccgagcctgactccagcgtggtgatccgggtcatcaccccggcgttgaacgtcgaattgctgccgatccaggcggattcgtccggaaacttctcgctgaacctgctgagcccgaccatcctcacccagttggggctgaacatcaccgacatcctcaacctcggctcgcagatctcgttcaacctggtgtccaccgactccaatggcaacgacagcgccgcctacgggatcaccctgacccccaacggactgtcgctcaatatcggccagatcgatgtcaacggtacttccggcgacgacgtgctgtccggcgccaacggcagttcggagcacatcaacggcggcgacggcagcgacctgatcttcaacgtgggcaccggcgatcacgtggtggccggcaacggcaacgacaccatccagatcaccgcgaccgatttcgtcagcatcgatggcggcgccgggttcgacaccctggtcctggccaacggcatcgacctcgactacaacgccgtcggcgtcggcacgctcagcaacctcgagcgcatcgacctcggcaagggcgactcgggtagcgtgctgaccctgaccgcggcggaggtggatgccatcaccgatgccaacaacacgttgcagatcaccggcgagaacaacgacaccctgaacgtggtgggcgcggtgaataccggtaccacgcaactgatcaacggcattacctacgacgtctacaccttcggcagtaccaccctgctgatcgaggacaacacggtacaggtcgtggtctga

SEQ ID NO: 323302 - DNA, 186 bp, Pseudomonas aeruginosa
gtggcgaaggaagaggccgagcgtaagcagttctgcgaagagacccgcaacaacctcgcgcaactgaagaacaacccgcgcgtaagggtcgacgaaggcaagggcgaactccgtcgcctcggcgaggaagaacgccaggagcgaatcgccaaggccgaaaaggcgatccaggagaattgccgctga

SEQ ID NO: 323303 - DNA, 330 bp, Pseudomonas aeruginosa
atggatcgacgggtctatgcgctggccgaccagttgttgctgatcgagcgtgagttgcgtgccctcggctggtggagcgaaaaccgccccgccccggaagcgctggccagccccgagccgttctgcgtggatacgctggcgctcgagcaatggctgcaatggatcttcctgccgcggatgaagctgattctcgaaagcgacagcgccttgccgcaggcctcgggtatcctggccatggccgaggtggcctatgcgcagcgtggcgaggaagtcgccggtctgctggcggcgcttggcgagttcgaccggctgatcggcgggccgtcatga

SEQ ID NO: 323304 - DNA, 780 bp, Pseudomonas aeruginosa
gtgaagaagattttcgtattcgccgcgcttgccggcagtgccctgctcgcgggctgtgccagcccgcagcatggggcgatcccggtggtggattccggtactccggtttccaaccaggaaagcggcggtttccgcatcacccgtacccaggtaccgcgtacccagcaaggcgccgccacccagggcattccccagggcggcgactccggcgtggtggtgatggtgccgcagggcgccaattccgcaccgatccagactttcccggcgcagtccggcgccgcgccgatcagcagcgctccgctcggcaccggcacccagtaccaggctccgcccagcagcgcctccacgccaccgctgggcggcagctacaacatgccgcccagcggcgccagtcgttccgcgcccaccggcattccggcctccggctcggccggcagcctggcagccgacgagcagttggacgggccggtcctggcgatgctcacaaccgcccagcaacagcagggcagcggcgacctgaacagtgccgccgccagcctcgagcgagcccagcgcatcgctccgcgcgagcctcaggtgctctatcgcctggcccaggtgcgcctggcccagggcgatgcggctcaggccgagcaggtcgcgcgccgtggcttgagctacgccaatggccggccgaccttgcaggccgggctctgggaactgatcgcccaggcgcgggagaagcagggagactccgccggcgctgcgctggcccggcagaaggcaaaggtcagctcctga

SEQ ID NO: 323305 - DNA, 2325 bp, Pseudomonas aeruginosa
atgacgcgtccccgatccccccgttcccgtaacagcaaagcacgcccggcacccggcctgaacaaatggctcggctgggccctcaagctcggcctcgtcggcctggtgctcctcgccggcttcgccatctatctcgatgccgtggtgcaggagaaattctccggccggcgctggaccatcccggcgaaggtctatgcccgcccgctggagctgttcaacggcctgaagctgagcagggaagacttcctgcgcgaactcgacgccctcggctaccgtcgcgagcccagcgtgagcggccctggaaccgtatcggtggcggccagcgcggtcgaactcaatacccgtggcttccagttctacgagggcgcggaaccggcccagcgcgtgcgcgtgcgcttcaacggcaactacgtcagcgggctgagccaggccaacggcaaggaactggcggtggcgcgccttgagccgctgctgatcggcggtttgtatccggcgcaccatgaggatcgcatcctggtcaagctcgatcaggtgccgacctacctgatcgacaccctggtcgcggtcgaggatcgcgacttctggaaccaccatggcgtgtcgctgaaatccgtggcccgggcggtgtgggtcaacaccacggccggccagctgcgccagggcggcagcaccctgacccagcagttggtgaagaacttcttcctgagcaacgaacgcagtctgagccgcaagatcaacgaagcgatgatggcggtgctgctggaactgcactacgacaagcgcgacatcctcgagtcctatctcaacgaggtgttcctcggccaggatgggcaacgagcgatccatggcttcggcctggccagccagtatttcttcagccagccgctggccgagctcaagctcgaccaggtggcgctgctggtcggcatggtcaagggaccgtcctacttcaacccgcggcgttacccggatcgtgcgctggcgcggcgcaacctggtgctcgacgtgctcgccgagcagggcgtggcgacccagcaggaagtcgacgccgccaagcagcgcccgctcggcgttacccggcagggcagcatggccgacagctcctatccggccttcctcgacctggtcaagcgccagttgcgccaggactaccgcgacgaggacctgaccgaggaagggctgcgcatcttcaccagcttcgatccgatcctgcaggagaaggccgagacctccgtcaacgaaacgctcaagcgcctcagtgggcgcaagggagtcgaccaggtcgaggcggcgatggtcgtgaccaatccggaaaccggcgagatccaggccctgatcggcagtcgcgacccgcgcttcgccggcttcaaccgggccctggacgcggtgcggccgatcggttcgctgatcaagccggcggtctacctgaccgctctcgagcggccgagcaagtacaccctgaccacctgggtgcaggacgagcccttcgcggtgaaaggccaggacggccaggtctggcgaccgcagaactacgaccggcgctcgcatggcacgatcttcctgtaccagggcctggcaaactcctacaacctgtccaccgccaagctcggcctcgacgtcggtgtgcccaacgtgctgcagaccgtcgcccggctgggtatcaaccgtgactggccggcctatccttcgatgctgctgggcgccggttcgctcagtccgatggaggtcgccaccatgtaccagaccatcgccagcggcggcttcaacacgccgttgcgggggatccgcagcgtcctcactgccgacggccagccgctcaggcgctatccgttccaggtcgaacagcgcttcgactcgggcgccgtctacctggtgcagaacgccatgcaacgggtcatgcgcgaaggcaccgggcgttcggtgtacagtcaattgccgtcgtcgctgaccctcgccggcaagaccggcaccagcaacgactcgcgcgatagctggttctccggtttcggcggcgacctccaggctgtggtctggctcggtcgcgacgacaacggcaagacgccgcttaccggcgccaccggtgccttgcaggtgtgggccagcttcatgcgcaaggcgcatccgcaatcgctggaaatgccgatgccggagaacgtggtgatggcctgggtcgacgcgcagaccgggcagggctcggcggcggattgcccgaatgccgtacagatgccctatattcgtggcagcgagcccgcccagggcccaggctgtgggagccagaaccccgccggcgaggtgatggactgggtacgtggctggctgaattga

SEQ ID NO: 323306 - DNA, 1563 bp, Pseudomonas aeruginosa
gtgagccagaccctgatcgccgccctgcagaacccggccctctacccccacccggtggagcgcttcgaggtcatcgagacgcatatctcctgggtcctgttgaccggtccctacgcctacaagatcaagaagccgatggatttcggctttctcgatttcaccagcctggacaagcgccgtttctattgcaacgaagagctgcgcctgaaccagcgcctcaccgacgatctctacctggaggtcctgccgatcaccggcagcgaagaagcgccgcggatcggcggcgacggcgaggcaatcgaatacctgctgaagatgcgccagttcccgcaggacaacctgctggcggcaatccagggccgcggcgaactgtccaaccagcatatcgacgaactggccgagcagatcgcgcacttccaccagaacactccgaaggtgccgctggagcacccgctgggcaccgccgagtcctgcatggcgccggtgcggcagaatttcgagcaggttcgcccgctgctcaaggacaaggccgacctgcaacagctggatgccctcgaagcctgggcggaaagcagcttcgaacgcctgctgccggtgctccaggagcgcaaggcgaagggcttcatccgcgaatgccacggcgacatccacctgggcaacgccgcgctgatcgacggcagggtagtgctgttcgactgcatcgaattcaacgaaccgttccgcttcaccgatgtctgcgccgacttcgccttcctcgcgatggacctggaagatcgcggcctgaagtgccacgctcgacgcttcgtcagcctctatctggaacacaccggcgactaccaggccctggaactgctgaacttctacaaggcctaccgcgccatggtccgcgccaaggtcgcgctgttcagcctcggctaccagaccgatgccgtgcagcgcgccgcgaccctgcgccagtaccgcaactacgccaacctggcggaaagctacagcgccattccctcgcgcttcctggcggtcacccatggtgtctccgcggtcggcaagagccaggtggccatgcgtctggtggaggctctgggcgccgtgcgcctgcgctcggatgtcgaacgcaagcgtctgttcggcgagcagccggaacacgacaggggccagttcgccgccggcatctatagcagccaggccagcgaagcgacctatgcgcaccttcaccagttggccgcgaagatcctccaggccggctatccggtggtgatcgatgccgcctacctgaagcagaatcagcgccaggccgcttgccacatcgcggaagaaaccggcgtgccgttcctgatcctcgactgccaggcgcccgaagcggtgatcgccggctggcttgcgcaacgccaggcggaaggcaaggatccgtccgacgcgactctcgacgtgatccgcacccagcaggctacccgcgagccgctgacagcggcggagacagtccagagcaagcgcgtagacacccacgacgcggccagcctcgacgggctggtcgacggcattcgccagcgcctgcccggtctctga

SEQ ID NO: 323307 - DNA, 348 bp, Pseudomonas aeruginosa
atgaactcgccccgtcagctcgactcgccgctctaccaactgctccacgccgaagacatcgaaggcttcaaccgacagaagccggccgacggctggatcgacctggccggcggcgacttccgcggcctcgacctgcgtctgctggatgccgcccgcgtcgacttcagcgatgcctatttccgcggcgccgacctgcgcggcgtggatctgcgcgaggcgcgcctggagggcgccagcctggcccatgcgcagatatccggtacgtatttcccgttgcgcctggcgccggacgagatccgcatgtcggtgaacttcggcacccgcctgcgctacctgccggagccctga

SEQ ID NO: 323308 - DNA, 273 bp, Pseudomonas aeruginosa
atgaacgacgaactgctgaacctgaaaaacctcgggaaaacctcgacccaatggttgcatgccgtgggtatccacagcgccaccgatctgcgtcggctcggctcggtgggagcctatcgcgcggtccgcgcgcgcggcttccgagcctcgaaagtcttgctctatgccatcgaaggcgcactcctcgacgttcactggaacgagctgtccccagaccacaaggccgcactgctcggcgagctggagactttccccgtgcgaaacaagagctag

SEQ ID NO: 323309 - DNA, 798 bp, Pseudomonas aeruginosa
atgtatctactcggcgagcaaccggcgtatgccgaccaattgatcaatcgcctgcagggaatccctcaccgcttgctcgaaggcctggcacccagcggccccgccctggaactggaacgtagcgacgacttggaacgcgagctgcccgccgaccaggtattcctggtggaaagcggcctgctgcatgcgctggtcgacgaacgcccactgttctacctccaggaaggcgacctcctcggacttcgacgcggactcgagctccccgcctgccggcatgccaacgaagagccgatccgcctgctgccctattcgcgcgatgcgctgctccagcacatccatgctgaccaggaacgtcaggaactgctattgcagtacctgatcggacagactgccctgctcggcgatgcgctggcgcacctgaagcagccggaagtccacccggccaccggcttccgccacttcgccgcgggcgaggcgctgatccgccagggcgacgatgcggatcatgtgttcatcatcatcgaggggcatgccgaagcgctggtggacggccagaaagtcggcgatgtgcagaaggacgagatcttcggcgccatggccgtgttcactcgcgagaaacgcagcgccacggtggtcgccagcgaaccctgcacggtgatggtgattcccaaggagcagttcctcggccttatgcagaacaacccgcgaatcgcccatagcctgatcgaaggcatggcccggcggatagacctgcttaaccgggaagtgacccagctgcgcctgcgccgcagcgcctga

SEQ ID NO: 323310 - DNA, 888 bp, Pseudomonas aeruginosa
atgcgcattcgcctgttcgctttctgtctgctgctgggcggctgccagtcccaactgccgccgctgcctgattggcagagcgcggaagggcgcgacgatccgcagacgggacgaatagtcgaattgcgcagcggcgtgacgctgagcccgcagcaactagtcgcacgcctggcggccgcgccgcgagtgatcgtcggcgagaagcacgacaatcccgatcatcatgccgtggaactgtggctggcgcaggccctgggcgaatatcgggcgcagggcagcctgctgctggaaatgctcgatcccggccagcaaccacgggtggatgcggtccgcgcacaactcgggaccggcaagccggtggcgaacctggagcaggccctggactggcagaaaggttgggactggacgcagtacggacccctggtgtcctgggcggttgcgcaacccgcgccgttgctggcggcgaacctccagcggagcgagatcatgcgcatctacagggagcgtccgccgcttcccggaacggcctccaggcgtgacagcgtgcgcctgccgctgcttgcgcagattcgcgaatcccactgcggcatgcttcccgacgatcaattgccggcgatgctcgccgtccagcagcaacgtgaccgccgtatggccgagcgttttcgcgatgcgccactgccggcgatgctcgtcgccggcagcttccacgcccggcgcgacctcggcgtaccggtccacctgcgcgaccttggtgcggagaagggtgcgcaggtactgatgctggtcgaggccgggcaggcggtaacgacgcgtgaggccgactacgcctggtacacgccggcacagccggacaaggactattgcgcggagatgaagaaggcacgttga

SEQ ID NO: 323311 - DNA, 768 bp, Pseudomonas aeruginosa
atgctgcgcgtggagaacctgtccatccgccgtggcggaaagactgtactggaaggcctcgaactggagctgcggcctggcgagatgctcggcgtactcggccccaacggcgctggcaagagcaccttgcttggcgctctctgtggcgaactggagccggccgaagggctggtactgctcgacgagcgcggcctcgacgactggccgggcgtcgctcgcgcgcagcgcctggcggtgctgccgcagagttcgtcgctgggcttcgcctttccggtggaggcggtggtcggcttcggtcggctgccccattccagcggccgcgagcgcgatgtgcagatcgtcgccgaggccttggcggcggccgacgccagccatctggccgggcgcagctacctggcgctgtccggcggcgaacgccagcgcgtgcacctggcgcgggtgctggcgcagctgtggccgggcgagccggggcaggtgctgctgctcgacgaaccgacctcggcgctcgacccgctgcaccagcacaccaccctgcaggcggtgcatgatttcgcccgccgcggtgcctcggtgctggtgatcctccacgatctcaacctggccgcgcgctattgcgaccgcctgctgctgttgcagaatggtcgcccgcacctgctcggtacgcccgaggaagtcctgcgccccgagccgttgcgcgcggtgttcggcctcgaggtcctggtccagcgtcatcccgagcgaggtcatccgctgatcgtcgcccgttga

SEQ ID NO: 323312 - DNA, 984 bp, Pseudomonas aeruginosa
gtgttggtcctctggttgtccctcgccctcggtcccgtcagcctgccgctgggcgataccctgcgcgccgcgctgcgcctggccgggctgccgctcgatggaacgggcctggcccaggcggaaatgatcctcggccagatccgcctgccgcggaccctgctcggcctggccgtgggcgcggtgctggcgctgtccggggtggcgatgcagggcctgttccgcaacccgctggccgatccagggctggtcggggtgtccagcggcgcggccctcggcgcggcgctggccatcgtgttcggcgcctcgctgggtggcttgccggcgttcctcgcgccttacctgctgtcgctgtgcgccttcggcggcggcctgggggtgacctggctggtctatcgacttggccgccgcgatggccagaccagcgtggccaccatgttgctggcagggatcgccttgaccgcgctgtccggcgcggtgatcggactgtttacctatctcgccgatgacgccaccttgcgtaccctgaccttctggaacctgggcagcctgaacggcgccagctatccacgactctggccgctgctgctggtggcgctgctggtggcctgctggctaccgcgccgggcagatgcgctgaacgcactgctgctcggcgagtccgaggcccgtcacctgggcttcgacgtcgagcgattgaaggccgaactggtgctttgcactgcccttggcgtcggcgccgcagtggcggcggcggggatgatcggcttcatcggcctggtggtgccgcacctgatccgtctggttgccggtccggatcatcggacgttgctgccggcctcgatgatggccggcgccattctcctgctgcttgccgacctgctggcgcgcctggcgctggctccggcggagttgccgatcggcatcgtcacggcactgatcggcgcgccgttcttcctttatctgctattgcgggggcgggcctga

SEQ ID NO: 323313 - DNA, 894 bp, Pseudomonas aeruginosa
atgcgtatcgatcgactattcaacgggttggcgctgggcatcctgctcggcaccggcatggcccaggccgccgagctgccgcaacgctgggtgagcgcgggcggctcgctgagcgaatgggtggtggcgctgggcggcgagagcaagctggtcggggtggacaccaccagccagcatccgcaggcgctgaaacagttgccgagcgtcggctaccagcgccaactggctgccgagggcgtgctggcgttacgcccggatatcctcatcggcaccgaggaaatggggcctccgccggtactcaagcagctcgaaggcgccggcgtgcgggtcgagaccctctccgccaagccggatctggaggcactggaaagcaacctgaagaagctcggcgactggctcggcgtgccccagcgcgccgaggccgccgaacttgactatcgtcagcggctgcggcgccaggcggactggatcgcggccgcgcagaagagtcagccggccccgggcgtcctgctggtgatcggcaacgccggcggtcagttgctggtagccgggcgcaataccggcggcgattgggtcctgaaccgagccggagcacgcaacctggctacccatgagggttacaagccgatctcggtggaagccctggcagcgctcgatccggtcgcggtggtgatcgccgaccgcagcctcgaaggtgatgcggcgcgtgccgcgctgctcaagcagaaccccgggctcgccgcgacccgcgcggcgcgtgacggacgtctgctggtgctggacccgacgctcctggtgggcggcctcggtccgcgcctgccggatggcctggcggctctctccgcagccttttatccttccgcgaaaccgctgagtacggaagccgcccattga

SEQ ID NO: 323314 - DNA, 654 bp, Pseudomonas aeruginosa
gtgttcgaccagcagggcgtggcggtgcacaaggtgttccttgccgaggccagcgacgtccgcgcctgggaaccgctggtcgagcgcctgcgggctgccgagcaggatgccgtgctggcgctgcacgaaccccgcgcaccggctgcggcgctcgtcgatgcgcagatcgatgccgccgccttgcgcgaaggctgggccgcgttgaaggacacccatcatttccacgccctgctgaagaagcatggcgcgcagcgcacccaggcgctgcgcctggctggcggcgaatgggccgagcgcctggataatggcgacctggcgaaactcttcgaagcggcggccgaaagcggattgccgatcatggtgttcgtcggcaacgcccactgcatccagatccataccgggcctgtgtgcaacctgaagtggctggacgactggttcaacgtgctcgatccggaattcaacctgcacctgaagaccaccggcatcgccgagctttggcgggtgcgcaagccgagcaccgatggcatcgtaaccagctgggaggccttcgacgccgacggcgaactgatcgtgcaactgttcggcgcgcgcaagcccggcgagcccgagcgcgacgactggcgcgaactggccgaatccttcaaggcgctctga

SEQ ID NO: 323315 - DNA, 2295 bp, Pseudomonas aeruginosa
atgccgctctccccgcccttcgccctgcgcccctgcctggccctgctgttgctcagcccttccctggccctggcggggaacgccgtcccgctgaccccgaccaccatcaccgccacccgtaccgagcaggcagtggattcggtgccaagcaccgtcagcgtgcagacccgcgaacaactggaccggcagaacgtcaacaacatcaaggaactggtgcgctacgaaccgggagtctcggtcggcggcgccggccagcgtgccgggatcaccggctacaacatccgcggcatcgacgggaaccgcatccttacgcagatcgacggggtcgaactgcccaacgacttcttcagcggcccctacgcgcagacccaccgcaactacgtcgatccggacatcgtaaagcgcgtggaaatccttcgcggcccggcctcggcgctgtacggcagcaacgccatcggcggcgcggtgagctacttcaccctcgacccgtcggacatcatcaaggacggcaaggacgtcggcgcccggctgaaggccggctacgagtcggccagccactcctggttgacctcggccaccgtcgccggccgcgccgacgacttcgacggcctgctgcattatggctaccgccagggccacgagaccgaatccaacggcggccacggcggcaccgggctctcgcgcagcgaagccaacccggaagacgccgacagctacagcctgctcggcaagctgggctggaactacgccgagggcagccgcttcgggctggtcttcgagaagtacaagagcgacgtcgataccgaccagaagagcgcctatggcggcccgtacgacaagggcaagccggccatcccgccgagcatgctgccgggcggcatgtaccagtggcgcaagggcaacgacaccctgactcgcgagcgctacggcctggagcaccatttcctgctcgacagcccggtcgccgatcgcatccagtggagcctgaactaccagttggcgaagaccgaccaggcgacccgcgagttctactacccgatcacccgcaaggtcctgcgcacccgcgacactacctacaaggaacgcctgtgggtcttcgacagccagttggacaagagcttcgccatcggcgagaccgagcacctgctgagctacgggatcaatctcaagcaccagaaggtcaccggcatgcgcagcggcaccggcaccaacctggacaccggcgcggacagcccgcgcgatgccctggaacgcagcagcgactttcccgatccgacggtgaagacctacgccctgttcgcccaggacagcatcagctggaacgactggaccttcactcccggcctgcgttacgactacacgcgcatggagccgcacatcaccgacgagttcctgcgcaccatgaagcagagccagaacaccgcggtcgacgagtcggacaagaaatggcaccgggtttcgcccaagttcggcgtgacctacgacttcgcccagcactacacctggtacggccaatacgcccagggcttccgcacgcccaccgccaaggcgctgtacggtcgattcgagaacctgcaggcgggctaccacatcgagcctaaccccaacctcaagccggaaaagagccagagcttcgagaccgggttgcgcggcaagttcgacgaaggcagcttcggtgtagcggtgttctacaacaaatatcgcgacttcatcgacgaagacgccctgaataccgatagcaccggcggcaacggccagaccttccagtccaacaacatcgagcgggcggtgatcaagggcgtcgagctcaagggccgcctggagctgggcgccttcggcgcgccgcagggactctacacccagggcagcgtggcctacgcctacggtcgcaacaaggacaacggcgagccgatcaacagcgtcaacccactcaccggagtgttcggcctgggctacgacgaagcagacggcaactacggcgggctgctcagctggaccctggtcaaacgcaaggatcgcgtcgacgacagcaccttccacaccccggatggcaccgccagccagttcaagaccccgggcttcggcgtcctcgacctcagcgcctactacaggctgagcaaggacctgaccctcaacgccggtctctacaacctgaccgacaagaaatactggctgtgggatgacgtgcgcggctacgacagcgtcggcgaggcttcggcgctggccccggccaacatcgaccgactgtcccagccaggccgcaatttcgcggtcaacctggtctgggacatctga

SEQ ID NO: 323316 - DNA, 324 bp, Pseudomonas aeruginosa
atgatccacctgtgtccctcttcccatctcgccgaaggcaacagccgcggcttcctcgtcgatgagcggcggctgttcgcggtgcgtcgcgacggccgcgcctacatctacctgaaccgctgcccgcatcgcggcatcccgttggagtggcagcccgatgccttcctcgacgacagcgccagcctgatccgttgcgccagccacggcgcgctgttcctcatcgagtccggcgagtgcgtcgccggcccctgcgctggcgagcgcttgcgcgccctgccctgccgggaagacgccgaaggcctctgggtggagctggacgactga

SEQ ID NO: 323317 - DNA, 513 bp, Pseudomonas aeruginosa
atgcgccgattcagcctgcgcttcgtcctgctgctcctgttcggcctgctgctctatgcctgccgcaatgaaccgggccccgtacggctcgcccctggcgtaacagcggcggattaccggactttcttcatccaggcggtacgcgccgaggggcaccgcatcgacttcgaggagcgtttcgatacggccgtgcgccgcgccctggaggccaagggctatcgctaccacgcggaacacggcgacctgcgggtgatctacgccctcggcctgcaacgccagccgggcctggaaatgcgcccggtgatcacccaggatggcgtcttcacccagacccaactgaccgaagacaccgaggccaggctggcgctgcgcatccttgatgaaagcaacggcagggtccttctggaaagcgtgctgagccgccaactgcacgatccggcgctgacccaggaagcgttcgaccgcggcgtcgcgcagttgctgaaggacttcccgagtcgcagtcaaccttga

SEQ ID NO: 323318 - DNA, 450 bp, Pseudomonas aeruginosa
atgctcttcgcccgtttggttttgctggttcaggcgctggtatggggcgcgctgggagtgctgtactgggtgcgtccctacgagatggccaatctcagtggcatgctgctgatggagccttcggcggtcagcgatgcgcgggtgttctatggcggccatcagttcgccctggcgttgttcctgctgttcgccctgcgccgggcttcgctggtgcagccggcgttgatcctggtagtgctgctgcaatcgatcctgaccctgtcgcggctattgattgcctggatcgagggcgggatggaggccgacggcaacctgttcggcctgctgttccgcggcgcaatggctgccctggggatcgccgccctgtggtggctgcaacggcggccgccccggctgtcggcacccggcgagagcgccgagcgtcgcgaggacgacttcgacggcctgtga

SEQ ID NO: 323319 - DNA, 450 bp, Pseudomonas aeruginosa
atgcgccgcttcgcacccctggccgtcctggccgccaccctgctccacggttccctggtccaggccgccgaaccgctggccatcgacgtccaccgcgacgccaactgcggctgctgcaaggactggatcaagcacctcgaagccaacggtttcaaggtcaccgaccatgtggaagcagacatgagcgcagtcaagagccgtctcggcgtgccctacagcatgggctcctgtcataccggagtgatcgacggcaagttcgtcgaaggccacgtgccggcagccgacatcctcaagctgcgcgaacgcgccgacctggtcggcgccgccgtaccgggcatgccggtcggctcgccgggcatggaaatgggcgaccgccaggacgcctaccaggtcgtcggcctgaccaggagcggccaggcctcggtactggcggagtacccgggacgctaa

SEQ ID NO: 323320 - DNA, 1236 bp, Pseudomonas aeruginosa
atggctgaatcacgccctgcgcgccgtttcgcgcgcatcgaccgccttcccccctacgttttcaatatcaccgccgaactgaagatggccgctcgtcgccgtggcgaggacatcatcgacctgagcatgggcaatcccgacgggccgaccccgccgcatatcgtcgagaagctctgcaccgtcgcccagcgcgaagacacccatggctactccacctcgcgtggcatcccgcgcctgcgccgggccatctcgcactggtaccgtgaccgctacgacgtgcagatcgacccggaaagcgaagccatcgtcaccatcggctccaaggaaggcctggcgcacctgatgctggcgaccctcgaccatggcgacaccatcctcgtgcccaacccgagctatccgatccacatctacggtgcggtgatcgccggcgcccaggtgcgctcggtgccgctggtgccgggcatcgatttcttcaacgagctggaacgggcgatccgcgaatcgattcccaagccgcgcatgatgattctcggtttcccctccaaccctaccgcgcagtgcgtcgagctggacttcttcgagcgcgtggtggcgctggccaagcagtacgacgtgatggtcgtgcacgacctggcctatgcagacatcgtctacgacggctggaaagcgccgtcgatcatgcaggtaccgggtgccaaggatatcgccgtggagttcttcaccctgtcgaagagctacaacatggccggctggcggatcggcttcatggtcggcaatcccgagctggtctcggccctggcgcggatcaagagctaccacgactacggcaccttcacgcccctgcaggtggcggccattgccgctctggaaggcgaccagcagtgcgtccgcgatatcgcccggcagtaccagcagcgccgcgacgtcctggtgaaggggctgcgcgaggccggctggatggtggagaacccgaaggcctcgatgtacgtctgggcgaagatccccgagccctacgcgcatctgggctcgctggagttcgccaagaagctgttgcaggacgccaaggtctcggtgtcgccggggatcggcttcggcgactacggcgacgatcatgtgcgtttcgccctgatcgagaaccgcgaccgcctgcgccaggcggtgcgcgggatcaaggcgatgttccgcgccgacgggctgctgtcgccgcagaggaaggtcgatagcctggcggagtga

SEQ ID NO: 323321 - DNA, 855 bp, Pseudomonas aeruginosa
atgtcccgacgctactggcaactcgatgtgttcgccgagcgtccgctcaccggcaacggtctggccgtattcgacgacgccagcgccctcgatgacgccgccatgcaggcctggacccgcgaactgcgccagttcgagtcgatcttcctgctgccgggcgacgacccacgggccttccgcgcacggatcttcaccctggaggaagaactgccgttcgcgggccacccgctgctcggcgccgccgccctgctccatcacctgcgcggcggcgacaacgaacagcactggacgctgcacctggccagcaagtcggtggccctgcgcagcgtgcgggcgggcagcggtttctacgccgagatggaccagggccgcgccgaattcggcgccaccccggacgccgggacctgccgctggttcgccgaagccttctcgctatcggccaacgacctgtccgggcatccgccgcgggtggtgagcaccggcctgccctacctgctcctgccggtgaccgccgaggcactgggtcgagcccgtcaggtcaacgatttgcaagaagccctggataaactcggcgcggcgtttgtctatctgctcgacgtcgacgggcgcgagggccgcacctgggacaacctggggctggtggaagacgtggctaccggcagcgctgccggtccggtcgccgcctacctggtggaatacgggcttgccgcgcgcggcgaacccttcgtcctgcaccagggacgcttcctcgaccggccgagccgactcgacgtccaggtcgcgacagacggtagcgtaagggtcggcggccacgtccaactgctcgcccgcgccgagctgctgacctcggcctga

SEQ ID NO: 323322 - DNA, 894 bp, Pseudomonas aeruginosa
atgctctggcgcaaaggacgacgcagtgacaacgtgattgatgcccggggcgaaggaggcgcaggcggcggtggcggcatgcgcatcggcggcaagggcctcagcctgggtggggtggccatcgtggtggtggtcggcctgctgatgggccaggacccgatgcagatcctcgggtcgctgctcggccagatggacagcccggcgccggccacccagcagcaggccggcggtcgggccccggcggccaatgacgagcagagcgagttcgtccgctcgatcctcggcgacaccgaggacacctgggaacagatcttcgccagcggccaggcacaataccaacagcccaagctggtgctgttcagcaatggggtgaattccgcctgcggcttcgcctcgtcggccaccgggccgttctactgtccggccgaccgccgggtctacctcgacctggagttcttccgcgagatggaacagcgcttctccgccgccggcgacttcgcccaggcctatgtgatcgcccacgaggtcggccaccacgtgcagaacctgatgggcatctcggccaagatcaacgcagcccgccagcgcggcgcgcgcatggagggcgccaacggcctgtcggtacgccaggaactgcaggcggactgcttcgccggggtctgggccaaccgtgcacagcagcggctgaactggctggagccgggcgacatcgaggaagccctgaacgccgccaacgccatcggcgacgatcgcctgcaacgccagggccgcggcatggtggtgccggattccttcacccatggctcctcggcgcaacgcatgcgctggttcaagaccggcttcgagagcggctcgccggccagttgcgataccttcaaggcccagacgctctga

SEQ ID NO: 323323 - DNA, 477 bp, Pseudomonas aeruginosa
atgaaacgctcgaaactcgcactccttccgctgggcctggcgctgctgctggccgcctgcgccagcgatccgctgccgatcccgcagcacagcttcggggtctatgccaccgccagcacgccttccgcggcgttccgcaccctggccgacccgcagggcaaggccatgctggtggcgctgaagcccagcctgacccaggctgacgtactccgcgccgaggtcctgtacgaccagaacggtcgacccggcgtcgaagtcaccttcaccgaaccggccgcccgccgcctggccgcgctgaccggcgaggcccgggggcgcactctcgcggtactggtggacgggcgcctgcgcctggcgccgcgggtgcgcgagccgatccgcaacggcaaggtctatctcgacgggttggcttcggtctacgaggccagggaactggccgatcagttgaatgcgctgggaagccagccggggcgctaa

SEQ ID NO: 323324 - DNA, 1296 bp, Pseudomonas aeruginosa
atgctggaaaagctgtttcaactaaaggcgcacaacaccacggtgcgcaccgagatcctggcggggatcaccaccttcctgaccatggcctacatcctcttcgtcaacccgagcatcctcggcgagaccggcatggacaagggcgcggtgttcgtcgccacctgcctggcagcggccatcggctcgaccatcatgggcctgatcgccaactacccgatcgccctggcccccggcatgggcctcaacgccttcttcacctacaccgtggtgctgcacatgggccacagctggcaggtcgcgttgggcgcagtgttcatttccgccaccatgttcttcctgctgtcgatcttccgcatccgcgaatggatcatcaacagcatccccctgccgctgcgctcggcgatcgccgccggcatcggcctgttcctcgcactgatcgccctgcagaacgccggcatcgtggtggacaacccggcaaccctgatcggcatgggcgacctgaccaagccggcgccgatcctcgccaccctcggcttcatcctgatcgtcgccctggaggcgcgtagcgtcaccggcgcggtgctgatcggtatcctggtggtcaccgccatcgccatcctgctcggcgtgacccagttcggcggcgtggtctcgatgccgccgtcgctggcgccgaccttcctccaactggacatcaagggcgcgctggacatcggcctggtcagcgtgatcttcgccttcctcttcgtcgacctgttcgacaactccggcaccctgatcggcgtcgccaagcgcgccggactgatgggcaaggacggccacatgccgaagatgggccgcgcgctgatcgccgacagtaccgccgccatgggcggctcgctgctgggcacctcgaccaccaccagctacatcgagtccgccgcgggcgtcagcgccggcggccgcaccggcctgaccgccatcgtcgtcgccatcctgttcctcctcgcgctgttcttcgccccgctggccggcagcgtaccggccttcgccaccgccccggcgctgctcttcgtcgccgtactgatggcctcgggcctggcagagatcgactgggaagacatcaccgtcgccgcgccggtggtcgtcaccgcgctggccatgccgttcacctattcgatcgctaccggcatcgccttcggcttcatttcctggaccgcgatcaaggtgctgtccgggcgctggcgcgaactgaacccggcgctggtgatcctctccgtgctgttcgtgatcaagctgggcttcttcaacgcatga

SEQ ID NO: 323325 - DNA, 1092 bp, Pseudomonas aeruginosa
atgagccgtccacagttcgaccccagcgcctacgccgcgcaactggaagacaagaagtcccgcctcgccggattgctggccccgttcgcggcacccgcgccggaggtcttcgagtcgccgcgcgagcattaccggctgcgcgccgaattccgcctgtggcgggaaaccggcaacgagaagcgtcactacgcgatgttcgagcagggcgacaagcacacgccgatcctgatcgaggatttccccatcgccagccgccgcatcaacgaactgatgccgcgcctgaaggcggcctgggccgacccggcgctgggcttcaagctgttccaggtggagtttctcaccaccctggccggcgacgcgctgatcaccctctgctaccaccggccgatcgacgacgcctggcgacaggcagcggaaaagctcgcggcggaactgggcgtgaacctggtggggcgttcgcgcggcaagcgcatcgtcgtcggacgcgactatgtggaggaggaactgtcggtcgccggccggcgcttccgctaccgccagcccgagggggctttcacccagcccaacggcgaggtcaaccagaagatgctcggctgggcctacgaggcgctcggccagcgcgacgacgacctgctcgaactgtactgcggcaacggcaacttcaccctgcccctggccacccgggtacgcaaggtgctggccaccgagatcagcaagtcctcggtcaatgcggcgctggccaacctggccgacaacgcggtggacaacgtcagcctggtgcgcctgtcggccgaagagctgacccaggcgctgaacgaggttcgcccgttccgccgcctggccgacatcgacctgaagagctacgccttcggcagtgtcttcgtcgatccgccacgagccggcatggatccggacacctgcgagctggcccgacgcttcgagcgcatcctgtacatttcgtgcaacccggaaaccctggcgcagaacatcgcccaactgcacgacacgcaccggatcagccgctgcgcgctgttcgaccagttcccctacacccaccacatggaaagcggcgtcctgctcgaacgccgctga

SEQ ID NO: 323326 - DNA, 708 bp, Pseudomonas aeruginosa
atgcgtttcgagcagccactggaagaaggccgcctgctgcgtcgctacaagcgtttcctcgccgatatcgagagcgccggcggcgagcgcctgactatccactgtccgaataccggttcgatgctcaattgcatgagcgaaggttgccgggtctggttcagccgctccaacgaccccaagcgcaagctgccggggacctgggagctgagcgagactccgcagggccgcctggcctgcgtcaacacggcgcgggccaaccgcctggtagaggaggcgctgctggccggggacatcgcggagcttgccggtttcaccgctctgcggcgggaagtggcctacggcgtggagaacagtcgcgccgactttcgcctggaataccccacgggcgcactgttcatcgaggtgaagagcgtcaccctgggcttcgacgaaaccgccgtggcggcctttcccgacgcggtgacgctgcgcggcgccaagcacctgcgcgaactggcggcgctggcgcgggaggggatccgcgcggtgcagctgtactgcgtgaacctttccggggtcgaggcggtgcgccccgccgacgagatcgatccagcctatggcaaggcgttgcgcgaggcggcgcaagcgggcgtcgaggtgctggcctatggcgccgaggtgacgacggaaggattgcacctggcgcggcgcctcccggtgcgactctga

SEQ ID NO: 323327 - DNA, 1173 bp, Pseudomonas aeruginosa
atggctacctcctatagcgcgcgcagtcgggccatcgagcctttccatgtcatggccctgctggcgcgggccaacgagttgcaggccgccggccacgatgtgatccacctggagatcggcgagccggacttcaccacggctgagccgatcgtcgaggccgggcgcgccgccctggccgccgggcatacccgctacaccgccgcccgcggcctgccggcgctgcgcgaggcgatcgcgaaattctacggcgaacgctacggggtcgacctcgacccacagcgcgtgctggtcactccgggcggttccggagccctgctgctggccagcagcttgctggtcgaccccggccgccactggttgctcgccgacccgggctacccgtgcaacaggcatttcctgcgcctggtggaaggcgccgcgcaactggtgccggtggggccggacagccgttaccaactgacaccggatctcatcgagcggcactgggattcagacagtgtaggcgctctggtggcgacgccggcgaatccgaccgggaccctgctcgatcgcgacgaactggccggcctgtcgggcgccttgaaggcccgcggcgggcacctggtggtggacgagatctatcacggcctgacctatggcgtggacgccgcgtcggtgctggaagtcgacgacgacgctttcgtcctgaatagtttttccaagtatttcggtatgaccggctggcgcctgggctggctggtggcgccggcagcggcggtgcctgagctggagaagctggcgcagaacctctacatcagcgcgccgagcatggcccagcaggccgcgctggcctgtttcgagccgaccaccatcgccattctcgaagagcgtcgcgaagagttcgcccgccgtcgcgacttcctcctgccggccctgcgcgagctaggtttcggaatcgccgtggagccggaaggcgccttctatctctacgccgatatcagcgcgttcggcggcgatgcctacgccttctgcaagcacttcatcgagaccgagcacgtggccttcactccggggctggatttcggccgccaccaggccggccaccacgtgcgtttcgcctatacccagaacctgccgcgcctgcaggaagcggtggagcggatcgcccgcggcctgaagaactggcggccctga

SEQ ID NO: 323328 - DNA, 447 bp, Pseudomonas aeruginosa
atgtccaccaaagcaaaacaacagagcagccagcagatgacccgcggcttcgaaccctatcaggaaaccaagggcgaggagtacatgagcgagcgcatgcgcgcgcacttcaccgcgatcctgaacaaatggaaacaggagctgatggaagaggtcgaccgtaccgtgcatcacatgcaggacgaagcggccaacttccccgatccggccgaccgcgccagccaggaagaagaattcagcctggaactgcgcgcccgcgaccgcgagcgcaagctgatcaagaagatcgacgagaccctgcaactgatcgaagacgaagagtacggctggtgcgactcctgcggcgtcgagatcggcatccgtcgcctggaggcgcgccccaccgcgaccctctgcatcgactgcaagaccctcgcggaaatccgcgagaagcaactcggctcctga

SEQ ID NO: 323329 - DNA, 561 bp, Pseudomonas aeruginosa
gtgcccgtccggctggacgatcagcggcacgtgcaggtagcgcggctggctcaaccccagcaattcctggaggtaaagctggcgcggggtcgagtcgagcaggtcggcgccgcggacgatgtcggtgatgccctgccaggcgtcgtccagcaccaccgccagttggtaggcgtagaagccatcgcggcgctggatgacgaaatcgccgacctcgcggccgagatgctggcggacttcgccctgcacgcggtcgacgaagcgatattccagctccggcacgcgcaggcggatcgccgcatcctcgcgggcgtgcccggcgtcgcggcagaagcccgggtagatcccggcgaatccctcaagctgcttgcgcgagcaagtgcaggcgtaggccaggccgctgcgcagcagttgctcgaccactgcggcgtaggccgggaagcgttcgctctgccgctccaccgcgccgtcccattcgaagccgtagcgctccagggtttccaggatcgcctgctgggcgcccgggacttcgcggggcgggtcgaggtcctccatgcgcactag

SEQ ID NO: 323330 - DNA, 762 bp, Pseudomonas aeruginosa
atgaacgacagattccgcgacaaggtcgccctggtcagcggcgccgcccagggcatcggcctgggggtggcccggcgcctgctggaggaaggcgcgcgggtggtggcggtggaccgctccgagctggtccacgaactggccggcgacgcctgcctgtgcctgaccgccgacctggagcgctacgccgaatgccagcgggtactggagcggaccctggagcgtttcggccggctggacatcctggtcaacaacgtcggcggcaccctctgggcgaagccctaccaacactacgccgaggacgagatcgaggccgagctgcggcgttcgctgctgcccaccttgtggtgttgccgagcggcgctgccggcgatgctggggcagggcagcggggcgatcgtcaacgtctcgtcggttgccacccgcggggtcaaccgggtgccctatggcgccgccaagggcggggtgaacgcgctgaccgcctgcctggcgttcgagaccgccgaccagggcatccgcgtcaacgcggtggcgccgggcggcaccgacgcgccgccgcgaaggattccgcgcaacgccgcggcgcagagcgaggaggagcggcgctggtatcgacagatcgtcgagcagaccctcgacagcagcctgatgaagcgctacggcagcatcgacgaacaggtcgcggcgatccttttcctcgcctccgacgaggcgtcctacatcaccggcgtgaccctgccggtagctggcggcgacctcggctga

SEQ ID NO: 323331 - DNA, 1023 bp, Pseudomonas aeruginosa
atgaatcacaaagtcgccctcagcttcgccgacggcaagaccctgttcctgcccgtcggccacgacgacctgctcctcgacgccgccctgcgccacggcatcaacctgccgctggactgccgcgaaggggtctgcggcacctgcatgggccgctgcgaggcgggcagctacagcctggactacgccgacgaggacaccctctccgccgccgacctggagcagcgcaaggtgctcgcctgccagacccgggtgcgctccgacgcggccttctacttcgacttcgcctcgaccctctgccacgccgccgcggcccaggagcacagcggcgtggtgcgcgaactgcgcctgctctccgaggacacagcgctgctccgcctcgacgccggcgccgcgggccgccagttggacttcctgcccggccagtacgcgcgcctgcaagtacccggcagcgactgccggcgcgcctactccttcgccaaccggccgaatccgcagaaccacctgcagttcctcatccgcctgctcccgggcggcgccatgagcgactacctgcgccaaggttgccgggtcggcgacgagatccgcttcgaggcgccgctgggcaccttctacctgcgccaggtggagcgcccgttgctgctggtggccggcggcaccggcctgtcggcgttcctcggcatgctcgacgaactggccgagcgcggctgcgagcggccggtgcatctctgctacggggtacgccgcgccgccgatctctgcgaattgcagcggatcgccggctacgccgagcggcttcccggcttccgcttcgtcccggtgctcagcgaggcggacgccgactgggacggccggcgcggctacctgcacgagcatttcgacgccgcccgcctgcgcgacgaagctttcgacctctacctgtgcgggccgccgccgatggtcgaggcggtccgccagtggctgcgcgagcgctccctggagcatctgcggctgtacctggagaagttcaccgaaagcggcgactga

SEQ ID NO: 323332 - DNA, 492 bp, Pseudomonas aeruginosa
atgaacgccggactgcagtaccgcgtcgaacagttcctctaccgccacgccgaactctgcgatgcccaggactgggacggctacctcgcgcagttcgacgaacagtgcgagttccacctgccgcagtgggagtccgagcagcgctacacccgcgatccgaagcgcgagatgtcgctgatctactaccccagccgtgccggcctggaagaccgggtgttccgtatccgcaccggcaaggccgcgtccaccgtgccgatgccgcgcaccctgcaccagatcggcaacgtgcgcatcgccgaggaaggcgaaggcctgctgcgagtgcgggtcaactggcagaccctgttccagcgcctggaccagaccggcagcttcttcggccatgccacctaccgcctgaaaccccatggcgaggcctggctgatcgcgcgcaagcacatcgtcctgctcaacgaccggatcgactcggtcctcgacttctaccacctctga

SEQ ID NO: 323333 - DNA, 1395 bp, Pseudomonas aeruginosa
atgaacgctacccgcagaagcctcgaacagtggcgcgactatgtcggcggctgcctcgacttccgtcccgaggaaggcatcttccgcatcgcccgggacatgttcaccgaaccggagctgttcgacctggagatggagctgatcttcgaaaagaactggatctacgcctgccacgaaagcgaactggccaggccccacgacttcgtcaccctgcgcgccggacgccagccgctgatcgtcacccgcgacggcaacggccagttgcacgcgctggtcaacgcctgccagcatcgcggcgcgaccctggtgcgggtcggcaagggcaaccagtcgaccttcacctgtccgttccatgcctggtgctacaagaacgacggccggctggtgaaggtcaaggcgccgggcgaatacccggaaggcttcgacaaggccacccgtggcctgaagaaagcgcgcatccagagctacaggggattcgtcttcgtcagcctggacgtcgccggcgaggacgacctggtggacttcctcggcgacgcccgggtgttcctcgacatgctggtggcgcagtctcccagcggcgagctggaagtgttgcccggcacctccacctacacctacgaaggcaactggaagctgcagaacgagaatggcctggacggctatcacgtcagcacagtgcactacaactacgtagccaccgtgcagcaccgccagcaggtcgaggccgagcgtggcggcgtggccgccacccttgactacagcaagctcggcgccggcgacgcggccaccgacgacggctggttctccttcgccaacggccacagcgtgctcttcagcgagatgcccaaccccgccgtacgccccggctacgccagcgtgatgccgcggctggtggcggaatacggccaggcccgcgccgagtggatgatgcatcgcctgcgcaatctcaatctctaccccagcctgttcgtcatcgaccagatcagctcgcagctgcgcatcgtccgcccgctggcctggaaccgtaccgagatcgtcagccagtgcatcggcgtcaagggcgagtcggacgccgaccgggagaaccggatccgccagttcgaggactttttcaacgtctccgggatgggcacgcccgacgacctggtggagttccgcgaagcccagcgtggcttccaggcccgcctggagcgctggagcgacatctcccgcggccacggcaagtggctcgaaggcgcgacgccgaacagccaggcgctgggtatcgcgccgctgctgaccggcaccgagatcacccacgaaggcctctacgtcaaccagcacgcgcattggcggcgcttcctcctcgacggcctggagcgcctggccctgcgcgcgaaggaggtgaccccatga

SEQ ID NO: 323334 - DNA, 1002 bp, Pseudomonas aeruginosa
atgatgaggacccatcccgtcgccgatcgtggcgatctccatgccgaccacctggacctggccgccgcccgttcctggatgtcgaaggtctgcgggccgcaccggctcgaagcggcgagcccgggactggtgcagttcgagcaccacggcaacgtgctgaagtcgatgtgcaccaccctcggctacatcggctacggtaccgacgtcaccatcaccgtcgaggatgccgcggcgttcaacgcctacagcctgagcctgccactcagcggcgagcaggagctgtgccggggcgggctgcgcctgctctccgacgtccgccgcggggtgatcatcgcgcccaacgagcgccaggagctgagcatcgccggggactgccgcaagctgcaggtggtgatcggccgcacggcgatgcgcaaggtcctggaggagatgttgcagcggccgatcgatacgcccttgcgcttcgatccggaaatggatgccctggacggcgcctccgcgtcctggtggcgcaccgtgcggcacatcagcgaggagatggcgcgcagcgaactctacgcccaggcgtttttcagcagcgacctggaatgcgcgctgatcaagggactgatcctggcccagccgaacaactacagcgaggccctgcagcagggccttggcgggcgcccgccgcactacctgctgcgcgcccgcgagtttctccaggccaacgcccgcgagaccctgagcctggaggacgtggaacgcgccgccggggtctcgcggttcaagctgttcgagggcttccgtcgctacttcggggtgtcgccgatgagctacctgaagcactaccggctcgccgcggtgcgcgaggaaatcctcgccagcggcggcgcccgcagcatctcgacgatcgccctgggctggggcttcagccacctcggacgcttctccgtggactaccgcaagcgcttcgaggaaaccccgagcatgacccagcgccgcgctgcgcggcgctcctga

SEQ ID NO: 323335 - DNA, 873 bp, Pseudomonas aeruginosa
atggagcttcgtcacctgcgctacttccaggcgctggcccggaccctcaacttcacccgcgccgccgagcagttgcacatcgcccagccaccgctgagccggcagatccagcaactcgaggaaatgctcggggtggccctgctggagcgcggccggccgctgcgcctgaccgaagccgggcgcttcttccacgaacagagcgcgacgctcctggaccaactggaaagcatctgcgacagcacccggcggatcggccagggccagcgccagtggttcggcatcggcttcgtgccctcggcgctgtatggcgtgctgccggagctgatccgccacctgcgcggcgacccggagctggagctgggcctgctggagatgaccaccctgcaacaggtcgaggcgctgaagagcgggcgtatcgacatcggtttcggacgcatccgcatcgacgacccggcgatccgccagagcgtgctcagcgaagagccgctggtcgccgccctgcccgccgggcacccgttgctcggccagccgctgagcctggagcgcctgtcgcgcgagccgttcgtgctctaccccggccagccgcggccgagctacgccgaccacgtgctggcgctgttcgccacccacggcctgagcctgcgcgtgacgcaatgggccaacgagatgcagaccgccatcggcctggtcgccgccggactcggcgcgaccctggtgccggcctcggtgcagttgcagcaccgcgacgacgtcgcctaccaggccctggccgacgcctccctgacctcgccgatcatcgtcagccggcgccagggcgacggctccccgcacctgcggcgctgcctggcgctgatcggccgcgaggacgcctga

SEQ ID NO: 323336 - DNA, 1122 bp, Pseudomonas aeruginosa
atgagccaagccgtgatccaaagcctcgagtcgatcatcgtcgacctgccgaccatccgcccgcacaagctggccatgcacaccatgaaccggcagaccctggtgatcctccgcctgcgttgcagcgacggcatcgagggcctcggcgaagccaccaccatcggtggcctggcctacggcagcgagagcccggagagcatcaagagcaatctcgacgcgcatttcgccccgttgctgctgggccagccggcggacaacgtgaatgccgcgatgcagcgcctggaccgacacatcaggggcaacaccttcgcccgctcggcggtcgagaccgccttgctcgacgcccatggcaagcgcctcggcctggccgtcagcgaactgctcggcggccgcctgcacgacagcctggaggtggcctggaccctggccagcggcgacaccggccgcgacatcgaggaagccgagcggatgctcgacctgcgccgccaccggcatttcaagctgaagatcggcgccggtgaggtggatgccgacgtggcccacgcgatcgccatcaagcgcgccctcggcgagcgcgccagcgtgcgggtggacgtcaaccaggcctgggacgaaggcgttgcccagcgtgcctgcgcgacgctcggcgacaacggcatcgccctgatcgaacagcccatcgcccgccacaaccgcgtcggcctggcgcgcctgagcagccgcggcggcgcgccgatcatggccgacgaggccatcgagagcgtcgaggatgccttccatctggctcgcgagggcgccgccccggtgttcgccctgaagatcgccaagaacggcggaccgcgcgcggtgctgcgtagcgcggcgatcgccgaggcggccgggatcggcctgtacggcgggaccatgctcgagggcggcatcggcaccctggccgccgcccacgccttcgtcaccctcgaccgcctggcctggcacagcgaactgttcggcccgttgctgctgaccgaggacatcctcctcgagtcgccgcgctaccaggatttccacttgcacgtgccgcgtgcgccgggtctcggcctggcgctcgacgaggagcgcctggcgcgcttccgccggcgctga

SEQ ID NO: 323337 - DNA, 291 bp, Pseudomonas aeruginosa
atgctgttccacgtgaagatgaccgtgaagttgcccgtcgacatggacccgcaacaggccgagcggctcaaggccgaggagaaggaaatggcccagcgcctccagcgcgagggcagctggcggcacctctggcggatcgccgggcactacgccaactacagcctgttcgacctgcccagcgtcgaggcactgcacgacaccctgacccggctgccgctgtttccctacatggacatcgagatcgacgggctttgccggcatccctcgtcgatccatgccgacgaccgctga

SEQ ID NO: 323338 - DNA, 933 bp, Pseudomonas aeruginosa
atgaccgtgaagatttcccagactgccgatgtccagcgcttcttcgaagaggccagcggccagctcaacgaacgcggcgatccgcgcaccaaggccctggtgcggcgcatcctcgacgacacggcgaagctgatcgaagagatgcaggtcacgcccgacgaattctggaaagcggtggactacctgaaccgcctgggcagccgccaggaagccggcctgctggccgccgggctgggcctggagcattacctggacctgctgctcgacgcccaggacgccgaggccggcctcaccggcggcacgccgcgcaccatcgaagggccgctgtacgtcgccggcgcgccgctgagcgacggcgaggcacggatggacgacggccgcgacgccggcaccgtgatgttcctccagggccgcgtcagcggtcccgacggccagccgctggccggggccatcgtcgatgtctggcacgccaatacccaaggcacctattcctacttcgacagcagccagtccgaatacaacctgcgccggcgcatccgcaccgacgccgacggccgctaccgtgcgcgcagcatcgtgccgtccggctacggttgcccgagcgacggcccgacccaggaactgctcgaccgcctcggccgccacggccagcggccggcgcacattcacttcttcgtctcggcgcccggccatcgccacctgaccacccagatcaacctggcgggcgaccgctacctgtgggacgacttcgcctatgccacccgcgatgggctgatcggcgacctgcgcttcaacgacgaccccgccgcggcccgcgaccgcggcgtggagggcggacgcttcgccgaactggatttcgacttccagctccagtccagcccggcgcccgccgccgagcgccgcagccagcggccgcgggcattgcaggagtaa

SEQ ID NO: 323339 - DNA, 219 bp, Pseudomonas aeruginosa
atgaagatcatcccgatgctgctggccgccctgctggcgaccggcgccgccactacccaggcccaggacggcagcgaacgctcctggcagtacaacgccgaattccgcgccgcgcagaaagaactgcgcgaaaagcgcctgcagaagcaacaactggaagcgcaagcgcagaagaccgaccgcagcaaatgcgccgagcgcaagaacggcaacggctga

SEQ ID NO: 323340 - DNA, 1347 bp, Pseudomonas aeruginosa
atgcaaggggatggaaagaaacgactgtggacgcttccactgctgctgggcgccggactgatggcctcggccgtcgccgaggagaacgccgagcggagcaaggaaggtttcatcgagggcagcgaggtcaacctgctgctgcgcaacttctacttcaaccgcgacttccgcaagggccaatcgagcccggcgggcggcggctacaccgaggagtgggtgcagggcttcatggccaacttttcctcgggcttcacccagggcacgctgggcgtcggcatcgacgccttcgcccagctcggcgtgcgcctggacagcggcggcgggcgttccggcgccggcggtagcgtcgacctgctgccctatgacgaccaggggcggccgcaggacgactattcgcgagccggcggcgcggtcaagctgcgctggtatggcaccgtgctgcgggtcggcgacgtgttcccggaaaccccggtgatccagtacggcaacagccggctgttcccctccagcttccgtggcttcaccctggtcaacgacagcctggcgaagggcctgaccctgcaggccggcaagctgaactcgatgacccagccgaacagcaccagcggcagcgacgacttctacagcttctacaccggccggcgcatcgactcgccgtgggtcgcctacgccggcggcgactaccaggccaccgagcactggagcgtcagcctctacggcagccgccagaaggacgcctgggaccagtactacgccggcaccagcttcaactatccgctggacgacaagctgtccctgctcggcggcgccaactactacaaggtcaaggaccagggcaggcaggtgatgggcgaactcgacaacgacatctggagcgtgcgcggcggcttcgcctacggtccgcaccaggtgctgctgtcgtaccagcgcaacaacggcgacgacgacttcgactacctgcgccagaccgactccatctacctggacaactcgatccagtacagcgacttcaactcgcccaaggaacgctcgctgatgctccgctacgacctcgacatggccgccttcggcgtgccggggctgagcttcatgacccgctatggcaagggctgggacgccgattattcgaatgccaacagcgtctacatgcgcaccgacgccaacggcaacccgctgaccaaccagggccgctgggaacgcgacgtggaggtcaagtacgtggtgcagggtggcgcggccaaggacctggcgttccgcgtgcgccaggccaccgtgcgctccgacagcttcgagtcggacctcgacgaagtccgcctgatcgtcgaatacccgctgcaagtcctctga

SEQ ID NO: 323341 - DNA, 618 bp, Pseudomonas aeruginosa
atggcctcgtggaccttggtggacgccagtgcgatcgctgtccgccatccctacaccttctacaaaccggacgcggagaccatcgaccgggtcgccgccggggaaagcgtcaagctgatcttcgccttcgataccgacaaccccgatgcgccgcgcgccgagcggctctgggtgacggtcgagggcatcgaggcggatggcgccttcagcggccgcctggacaactatccgcaatacatccgcgacctgtcgctgggcgagcgcatcgtcttcgaggcgcggcacatcatcaacaccgagcacgacccgcgggaaacgccgatctcgcgctatgcccggcgctgcttcgtgacgcgccgggtgatagacgaggggaaggcggtcggctacctctaccgcgaggcgccggaagaggaaaacgacagcggctggcggctgatggccggcgacgagtcggacgactacatgaataccgccgggaccaccgcctacgtcagcctgggctcggtgctgaacgccgacgacagcatcctgccgctgctcgacgcgccgccgggacgggcgttcgagcggctggccgacggttccttcatcgaggtgcagggaccggagggttga

SEQ ID NO: 323342 - DNA, 1254 bp, Pseudomonas aeruginosa
atggaactctcccccgccgaacgccaactcctgctggcccatcgcctggccgtgttcgacggctgcgtggtgtacgacgcccaaccgccggtgtccgccgaacacgtccagcgtcttgccgaaggcctggccggaccgattccagaagacctgctacgcctctggcgcacctgtttcggcgggcgcctcggctatgacctggaagtcgactacgacggccaccgccacccgttctctttcagcgaactgttctatccggacagcgacggctaccacgacctctggggctggatcgaacacgagcgcgagctggcggcggaagccgcggcagaagaaggccgcgactggaacggcaagctggcctacctgccgttcggtggcttcgagtacctggagcggctctacgtctgcgtcgaacccggccccgagcatggcgcggtaatcgcctggagccacggcctgccgccggcctgggccggacgcctgcaccaggattcggtgacgcgcctggccgacgacgtcggcgggctgttccgcctgctgtccttcgaacaggacccgttcgacgccgagaacgcctgcggcgtggccgacgagctactggaagcgctggacgccctggaggccgccggggagcccggcaaggcgctgaagggccgcctggaagtcctgctgcgccagcgcatcctcgactggcggccggccctcgccgacggcagcctggccgccgagccaaggctgcgtcaactggccctggccgaagctgcgcaagacggcgacatcgacctgctgcaacgcctgcgcgatgccggctgcgacttcgccgaaaccttgcgcggacgcggcggtgtgctggaggcctgcctcgcccgcgggcgcctggaggccgccagatggctgctcgaccagggcgtcgcggtgcaccaggacagcctgcagattggcgccgcgcacctcgatgcggtcctggccgaacgcctgttgcggctcggcgcgatctccgacccgaatacggtgctcctcgccctgcaatacggcgacgccgacgccgcgcggatcatggcgcgaccgctgctggaggagtcgccggcgagggccagcgccctgcgtctggccctcgccagccgcgccgagcgcgagcgcagcgacgccaggcgggtcaggtcgggaaagatgggcagcaaccgcagtcccgacgactacctggccctggccgagcgcctggagcgcttcctcgccgagctgccaggctga

SEQ ID NO: 323343 - DNA, 1341 bp, Pseudomonas aeruginosa
atgcacaccttgcagcaactgcgcagcggcgaactggccggcgccacgcgcctggacctgtcctgcggcctgcgcgagttcccccgggaaatcttcgagctggccgactccctggaggtgctcaacctcagcggcaacgccctggacagcctgccggacgacctcgggcggctgcatcgtctcaaggtgctgttctgttccgccaacgacttcgccgaattgccggcggcggtgggggactgtccggcgctgagcatggtcggcttcaagtccaaccgcatcgagcgggtgccggccgcggccctgccgccagcgctgcgctggctgatcctcaccgacaaccggattgccacgctgcccgaggaactgggtcgccggccgttgcagaagctgatgctggccggcaaccgcctggaggccttgcccgagagcatggccgcttgcgaaggcctggaactgctgcggatcgccgccaaccgtttccagcgcctgccggcctggctggcgacgctgccgcgcctggcctggctggcctacgccggcaacccgttgtgccgtctgccggcgctggccgacagcggcatcgctgcgctggactggagcgagctgagcctggacggtttgatcggcgaaggagcctccggggtcatccatcgcgccggctggcaccagccggacggctcgacgcgcacggtggcgctgaagctgttcaagggcgaagtgaccagcgatggcacccccgccagcgagatggccgcctgcctggcggcggggcgccatgcgcaattgatcgaggtgctcggccagctcgccgggcatccgcaagggcgcgacgggctggtgctggagctgctcgacgacgcctatcgcaacctggcggggccgccgagcctggagtcctgtacccgcgacgtctatccgccgggactgcgcttcgagctggccacggcgctgcgcctggcggcctcgctcgccgcgttgatggcccatctgcatggacgcggcatcagccatggcgacttctatgcgcataacatcctctggcgcgaggatggcgcctgcctgctgggcgatttcggcgccgcgtcctttctcccggacgacaccgtgctcgccggcgccctgcggcgcctggaagtacgtgccttcgcctgcctgctggaagagttgctcgagcgcagcgaggcgccgccggggcaggcctcgctacgtgcggcgctggtcgagttgcagcgacgttgtgcgctgccacgggtgagcgagcggccggacttcggcgagatccaggcgatcttgcgcgaccttgccgctcgcagccaggcgtttcctcaagttcgatga

SEQ ID NO: 323344 - DNA, 168 bp, Pseudomonas aeruginosa
atggattcctacggcgtcactttcgcaatcatcgtgctgggcatgctcttcatcggcacgggtttcaccaagcgcgacacgccgttcggcctgttcctcatgtgggtcggggtgatctgcatgctggccatcatcagctaccgcatctatatcgccacccattactga

SEQ ID NO: 323345 - DNA, 1227 bp, Pseudomonas aeruginosa
atgagcgcgcgaatcccttccggcggccaggccgccaccggcgtcggcgcggcggaggtcagttgggtcggcctgctggtgatattctgcctcggcatcaacctgcgaccgatcctcaccggcatcggcccgctgctcgaggaaatcaccgccggcaccggtctcggcttccagggcgcgtcgctgctgacggtgttgccggtgctctgcatgggtctggtggcgctgttgctgccctggctcgggcgctggctggccgagcaccgcggcatcgtctgcggactgctggccatcgccgcagcctgcctctggcgcctggaactggatagcgggctggcgctgatcgccagcgccgcgctggccggcagcggcgtggcgatcatccaggcgctggtaccgggcgtggtcaagcgctggttcccgaggcgggtcccggcggcgatgggcctctactcggcctcgctgatggccggcggcggaaccgcggcggtgctcagcccgcggatcgccgaacacttctccaactggcaggccggcctcggcgcctgggccgtaccggccctgctggcgctgctgctgtggatgttcgcgcggccaagggaggtgctgccgagcgctggcgaggggccggtccggcacttcttcggcaatcgccgtggctggctgctggcggtgtatttcgggctgatcaacggcggctacaccagcatggtggcctggttgccggtgtactaccgccagctcggctggagcgcccaggacagcggcgggctggtcgggatcatgaccatcttccaggtgctcgccgcgctcagcgtgccgctgctgattcgccgccgcctcgaccgccggccctggctgctggccgcgctgctggtccagctcggcggcttctgcggcctgctgctgatgccgctacagcacgcggcactgtgggtggcgttgatcggctacggcctgggcgcctgcttcgccctcagcctgaccctgaccctcgaccacctccacgagccgcgtgcggcgggaagcctggcggccttcgtgcaaggcatcggcttcatcatcaccggcatcgtgccctacctgaccggctggctgcgcgacgtcaccggcagcttccaggcctcctggctgctgctcgcggcgagcgtggtggcgatgttgctggtgaccctgcgcttcgccccgtccggctatgcccgggccatgggcgagacgcgcgactga

SEQ ID NO: 323346 - DNA, 456 bp, Pseudomonas aeruginosa
atgtccgatgaaatcttcatgcgcgaggccatcgccctcgcccgcgccaacgtcgaggccggcggccgcccgttcggcgccgtgctggtgcgcgacgggcgggtcctggcccgcggcgtcaaccagatccacgagacccacgatcccagcgcccacgccgaactgcaggcgatccgccaggccagtcaggcgctcggcagcccgcgtctggacggttgtgtgatctacgccagcggccatccctgcccgatgtgtctggccgccatgcatctctgcggcatccaggcggcctggttcgcctattccaacgaggacggcgaagcgttcggcctgtccacggccacgctctacgccgagatggcgcgcccgccacagcggcaaagcctgccgctacgcgccctgcgtcctgccggcgaagagggtctgtaccggcaatggcggcaacgccaggcatga

SEQ ID NO: 323347 - DNA, 633 bp, Pseudomonas aeruginosa
atgctggtctgcgcagcattcagcggaggcgccggcgcgagcgacgccggagcattgctcgaagccgcgcgtcgcggcgataccgcgcaggtcgccatcctgctcgaacgcaaggtcgaggtcgacgcgcccagcgccgacggtagcaccccgctgctgctggccaccgccaacgaccacctggcggtggcgcgccagttgatcgaggccggcgccgacgtcaaccggcagaacagccggctcgacagcccgtatctgctggccggcgccgagggccgcctggaaatcctgcgcctgaccctgctccacggcgccgacctgaagagtaccaaccgctatggcggcaccgcgctgatcccggcctgcgaacgcggccatgtggaagtggtgaagacgctgctgcaagccggggtcgatcccaaccatgtcaacaagctcggctggaccgggctgctcgaggcgatcctgctgagtgacggcggtccgcgccaccaggagatcgtgcgcctgctgatcgacgccggcgccgacgtcaacctggccgatgccgacggcgtcagcccgctggcccacgcccgccagcgcggccagggcgggatcgagcggctgctgctggccgccggcgcccaatga

SEQ ID NO: 323348 - DNA, 879 bp, Pseudomonas aeruginosa
atgctcgatctggtcctgctccgtaccttcgtcagcgttgtcgacaccggcaacttcacccgcgccggcgaacacctgcacctgacccagtccaccgtcagccagcaggtcatccgcctcgaacagaacctcggttgccgcctgctcgaccgcagccagcggcaggttttgccgaccgaggaaggcgagcgtctgcttggctacgcgcggcgcctgctgcggctctcggacgaggccagcgaggccctcagcccggcccatggcgacggcgtgctgcgcctcggcgtgccggaagacctcgccggcgaagtgctgatgccggtgctgacgcgcttcaccgaagagcgtccgcgactgcgcctggaggtcgagagcggtctcagccatcacctgctgcgcctctatcgcagcggcgagctggacctgctgctggtcaagcagtggggggccgacagcgactgccatgcacgctgggccgagccgctgggctggttcggcagcgccgcgcggccgttcggcgagggttcgccggaggtgccggtgccgctggtggtgttcccggtcggcgcgctgtatcgccaggagatgatccatgccctggagagcatcgggcgtcgctggcgcatcggctattccagcgccagcctggccagcctggtggccgcggtcggcgccggactgggggtcagcctgctgccgctgggctgcgtcgggcccgagcatcgcctgcttggcgcgcaggccggcttcccgcccatcgctggcctggagctggcgctctacgcgcggcccgagctggacagcgccgggcgcaccctccgcgaccgcctgcgcgacctctgcgatgcacgcctggaagggttgcagggcgagcgctga

SEQ ID NO: 323349 - DNA, 516 bp, Pseudomonas aeruginosa
atgtcccgacccaccctgcaagtcgacctgctggtcgagtccttcaactacaaggcctggtccgaccgccgcaccctcgatgccatcgcccggatcgacgccgaggcgttcccggcctcgctggccttcgccttgcaacagctcaatcacatggcgatcgtcgaggaactgttcagggcgcgcctgctgggcgagccggcgccccaccaacagaccaacagcgaggtggtgcctggctacgacgtcctgcgtcgccggctggaggattcggccgcctggttcgccggctatgtcgccgagctgccgctggagcgtcgcggcgaatggctgcgcttccgcttcgccgatggccgcgacggcggcatgacgcgccaggagatcctcttccatatcgtcaaccatggcacctaccatcgcggcgccatcggtcatgccctcgacctggcgggcgcgccccggccggcggatacctacaccctgtatatccactccgcgcagccggagcggcgggaatag

SEQ ID NO: 323350 - DNA, 1410 bp, Pseudomonas aeruginosa
  misc_feature (899)..(908): n is a, c, g, or t
atgattcacgcgcagtcgatccggagcgggctcgcgtccgccctgggtctgttcagtctgctggcgctcagcgcctgcacggtgggtccggactaccggacccccgacaccgcggcggcgaagatcgacgccacggcgagcaagccctacgaccgcagccgcttcgaaagcctgtggtggaaacagttcgacgatccgaccctgaaccagttggtcgaacagtcgctgagcggcaaccgcgacctgcgcgtggccttcgcccgcctgcgcgccgcccgcgccctgcgcgacgacgtggccaacgatcgcttcccggtggtcaccagccgcgccagcgccgacatcggcaagggccagcaaccgggagtgaccgaggaccgggtcaacagcgagcgctacgaccttggcctggatagcgcctgggagcttgacctgttcgggcgcatccgccgtcagctggagtccagcgacgccctcagcgaagcagccgaggccgacctgcagcaactgcaggtcagcctgatcgccgagctggtggacgcctacggccaactgcgcggcgcgcaactgcgcgagaagattgccctgagcaacctggagaaccagaaggagtcgcgccagctcaccgagcaactgcgcgacgccggggtcggtgccgaactcgacgtactgcgcgccgatgcgcgcctggcggccaccgccgccagcgtgccgcaactgcaggcggaagccgagcgcgccaggcaccgtatcgccaccctcctcggccaacggccggaagagttgacagtggacctttcgccgcgcgacctgccggcgatcaccaaggccctgccgatcggcgatcccggcgaactgctgcgccgccggccggacatccgcgccgccgaacggcgccnnnnnnnnnncgtcggcgtggccaccgccgacctgttcccgcgggtcagcctcagcggcttcctcggcttcaccgccgggcggggctcgcagatcggctcaagcgccgcccgcgcctggagcgtcggcccgagcatcagttgggccgccttcgacctcggcagcgtgcgtgcccgcctgcgaggcgccaaggccgacgccgacgccgcgctggccagctacgaacagcaggtgctgctggccctggaagaatcggcgaatgccttcagcgactatggcaagcgccaggagcgcctggtctcgctggtccgccagtcggaagccagccgcgccgccgcgcaacaggcggcgatccgctaccgcgaaggcaccaccgatttcctggtgctgctggacgccgaacgcgagcaactctccgccgaagatgcccaggcccaggccgaggtcgagctgtaccgcggcatcgtggcgatctaccgctccctcggcggtggctggcaacccagcgcctga

SEQ ID NO: 323351 - DNA, 3189 bp, Pseudomonas aeruginosa
atgaatttctcccaattcttcatccagcggccgatcttcgccgcggtgctgtcgctgctgatcctgattggcggcgccatctccctgttccagctacccatcagcgaatacccggaagtggtgccgccgaccgtcgtggtccgcgccaacttccccggcgccaacccgaaagtcatcggcgagaccgtcgcctcaccccttgaacaggcgatcaccggggtggagaacatgctctacatgtcctcccagtcgacctccgacggcaagctgaccctgaccatcaccttcgccctcggcaccgacctggacaacgcccaggtgcaggtgcagaaccgcgtcacccggaccgagccgaagctcccggaagaagtgacccggctcggcatcaccgtcgacaaggcctcgcccgacctgaccatggtcgtgcacctgacctcgccggataaccgctacgacatgctctacctgtcgaactacgcggtgctcaacgtgaaggacgaactggcccgcctcgacggcgtcggcgacgtccagttgttcggcctcggcgactattcgctgcgcgtctggctggacccgaacaaggtcgcctcgcgcaacctcaccgccaccgacgtggtcaacgccatccgcgagcagaaccgccaggtcgccgccggcaccctgggcgcgccgccggcgccgagcgataccagcttccagttgtcgatcaacacccagggtcgcctggtcaccgaggaagagttcgagaacatcatcatccgcgccggcgccaacggcgagatcacccgtctgcgcgacatcgcccgggtcgagctgggctccaaccagtacgccctgcgctcgctgctgaacaacaagccggcggtggcgatcccgatcttccagcgtcccggctcgaacgccatcgagatctccaacctggtgcgggagaagatggccgagctgaagcacagcttcccgcaaggcatggactactccatcgtctacgacccgaccatcttcgtccgcggctccatcgaggcggtagtgcacaccctgttcgaagccctggtgctggtggtgctggtggtgatcctgttcctgcagacctggcgcgcctcgatcatcccgctggccgcggtgccggtgtcgctgatcggcaccttcgcggtgatgcacatgctcggcttctcgctcaacgcgctgtcgctgttcggcctggtgctggccatcggcatcgtggtggacgacgccatcgtggtggtggagaacgtcgagcgcaacatcggcctcggcctcaagccggtggaagccaccaagcgtgccatgcgcgaggtgaccgggccgatcatcgccacggcgctggtgctctgcgcggtgttcatcccgaccgcgttcatctccggcctcaccgggcagttctaccgccagttcgccctgaccatcgcgatctccacggtgatctcggcgttcaactcgctgaccctgtcgccagcgctggcggcggtcctgctcaagggccaccacgagccgaaggaccgcttctcggtgttcctcgacaagctcctcggcagttggctgttccgtccgttcaaccgtttcttcgaccgcgccagccatggctacgtcggcacggtgaaccgggtcctgcgcggcagctcgatcgccctgctggtctacggcggactgatggtgctgacctacttcggcttctccagcacgccgaccggtttcgtcccgcagcaggacaagcagtacctggtggccttcgcccagttgcccgacgcggccagcctggaccgtaccgaggcggtgatcaagcagatgtccgagatcgccctggcgcagcccggcgtggcggactcggtggccttccccggcctgtcgatcaacggcttcaccaacagcccgaacagcggcatcgtgttcaccccgctgaagccgttcgacgagcgcaaggacccgagccagtcggccggggccatcgccgccgcgctgaacgccaagtacgccgacatccaggacgcctacatcgcgatcttcccgccgccgccggtacaggggctggggaccatcggcggcttccgcctgcagatcgaggaccgtggcaaccagggctacgaggagctgttcaagcagacccagaacatcatcaccaaggcccgtgcgctgcctgagctggaacccagctcggtgttctccagctaccaggtcaacgtgccgcagatcgacgccgacatcgaccgcgagaaggccaagacccacggcgtggcgatcagcgacatcttcgacaccctgcaggtctacctcggctcgctgtacgcgaacgacttcaaccgcttcggccgtacctatcaggtcaacgtccaggccgagcagcagttccgcctcgaacccgagcagatcggccagttgaaggtgcgcaacaacctcggcgagatggtcccgctggcgtccttcatcaaggtcagcgacacctccggtccggaccgtgtgatgcactacaacggcttcatcaccgccgaactcaacggcgccccggccgcgggctacagctccggccaggcgcaggcggcgatcgagaagctgctgaaggaggaactgcccaacggcatgacctacgagtggaccgagctgacctaccagcagatcctcgccggcaataccgcgctgttcgtcttcccgctctgcgtgctgctggccttcctcgtgctggccgcccagtacgagagctggagcctgccgctggcggtgatcctgatcgtgccgatgaccctgctgtcggcgatcaccggggtgatcctggccggcagcgacaacaacatctttacccagatcggcctgatcgttctggtggggctggcgtgcaagaacgcgatcctgatcgtcgagttcgccaaggacaagcaggaggaaggcatggaccgcgtcgccgcggtgctggaagcctgccgcctgcgcctgcggccgatcctgatgacgtccatcgccttcatcatgggcgtggtgccgctggtgatctccaccggcgccggcgccgagatgcgccatgcgatgggcgtggcagtgttctccgggatgatcggggtgaccttcttcggcctgctgctgacgccggtgttctacgtcctcatccgccgcttcgtggagaaccgcgaagcgcgccgcgccgccaacgacaaaggcctgccagaggtgcatgcatga

SEQ ID NO: 323352 - DNA, 1245 bp, Pseudomonas aeruginosa
atggaacagtcatcccacttctcctggcgctaccccctcgcactcgcggccgtactggtcctgagcgcctgcggcaaggccccggaaaccacccaaggcatggcggcgcccaaggtcagcgtcgccgaagtcatcgaacaaccgctgaacgagtgggacgaattcaccggccgcctggaggccccggagtcggtggagctgcgcccgcgggtgtcgggctacatcgaccgcgtggccttccatgaaggcgcactggtgaagaaaggcgacctgctgttccagatcgacccgcgcccgttcgaggccgaggtcaagcgcctcgaagcccagctgcaacaggcccgcgcggcccaggcgcggagcgtcaacgaagcccagcgcggcgaacgcctgcgcgccagcaacgcgatctccgcggaactcgccgacgcccgcaccaccgccgcccaggaagccaaggcggcggtcgccgcgacccaggcgcaactggacgcggcgcgcctgaacctgagcttcacccggatcaccgcgccgatcgacggtcgcgtcagccgcgccgaggtcaccgccggcaacctggtcaactccggggagaccctgctcaccaccctggtcagcaccgacaaggtctacgcctacttcgacgccgacgagcgcgtgttcctcaagtacgtcgagctggcccgccaggccggtcgcgacacgcgcagcgagagcccggtgtacctcggcctgagcagcgaggacggcaacccgcacctgggccggctggacttcctcgacaaccaggtcaacccgcgtaccggcaccatccgcggccgcgccgtgttcgacaacgccaagggcgagttcaccccgggcctctacgtgcgcctgaagctggtcggcagcaagacctacgccgccaccctgatcaaggacgaagcggtcggcaccgacctgggcaagaagttcgtgctggtcctggatggcgacaacaagaccgtctaccgcaccgtcgagatgggaccgaagctggagggcctgcgcatcgtccgcagcggcctgagcaagggcgaccggatcgtcgtgaatggcctgcagcgggtccgcccgggcatgcaggtggatccgcagaaggtcgagatggccagcgccgacaccctggccaccctcgcgcgcctgcggcagtcggtcggcgacagcgaaccaccgaaggtggcggcgtccaaggacaacgccactcgcaacgagccgcgcggctga

SEQ ID NO: 323353 - DNA, 915 bp, Pseudomonas aeruginosa
atgaaccgaaacgacctgcgccgcgtcgatctgaacctgctgatcgtgttcgagaccctgatgcacgaacgcagcgtgacccgcgccgcagagaaactgttcctcggccagccggccatcagcgccgcgctgtcgcgcctgcgcacgctgttcgacgacccgctgttcgtccgtaccggacgcagcatggagcccaccgcgcgagcccaggaaatcttcgcccacctgtcgccggcgctggattccatctccaccgccatgagtcgcgccagcgagttcgatccggcgaccagcaccgcggtgttccgcatcggcctttccgacgacgtcgagttcggcctgttgccgcccctgctccgccgcctgcgcgcggaggcaccggggatcgtcctcgtcgtgcgccgcgccaactatctattgatgccgaacctgctggcctcgggggagatctcggtgggcgtcagctacaccgacgaactgccggccaacgccaagcgcaagaccgtgcgccgcagcaagccgaagatcctccgcgccgactccgcgcccggccagctgaccctcgacgactattgcgcgcgaccgcacgcgctggtgtccttcgccggcgacctcagcggcttcgtcgacgaggagctggaaaaattcggccgcaagcgcaaggtggtcctggcggtgccgcagttcaacggcctcggcaccctcctggccggcaccgacatcatcgccaccgtgcccgactacgccgcccaggcgctgatcgccgccggcggcctacgcgccgaggacccaccgttcgagacccgggccttcgaactgtcgatggcttggcgcggcgcccaggacaacgatccggccgaacgctggctgcgctcgcggatcagcatgttcatcggcgatccggacagtctctga

SEQ ID NO: 323354 - DNA, 1020 bp, Pseudomonas aeruginosa
atgtcccgagtgatccgttttcatcagtttggcccgccagaggtcctcaaatgcgaagagctgccgaccccggcgccggccgcaggggaagtcctggtgcgtgtccaggcgatcggcgtgagctggaaggatgtgctctggcgtcagaacctggccccggagcaggctgcgctgccgtccggtctcggcttcgaactggccggcgaggtgctggcggtcggcgccggcgtcggcgacctgccgctgggttcccgtgtggccagtttccccgcccatacccccgatcattatccggcctatggcgacgtggtgctgatgccgcgcgcggccctggcggtctaccccgaggtactcaccccggtggaggccagcgtctactacaccggcctgctggtggcctatttcggcctggtcgacctggccgggttgaaggccgggcagaccgtgctgatcaccgaggcggcgcgcatgtacggaccggtctcgatccagttggccaaggctctcggcgcgcgggtgatcgcttccaccaagtccgccgaggagcgcgagttcctccgcgagcagggcgccgacaaggtggtggtgaccgacgagcaggacctggtcctggaagtcgagcgcttcaccgagggcaagggcgtcaatgtcatcctcgacgaattgggcggcccgcagatgaccctgctcggcgatgtctccgccacccgcggcaagctggtgctgtatggctgcaacggcggcaacgagtcggcgttcccggcctgcgccgcgttcaagaagcacctgcagttctaccgccactgcctgatggatttcaccggtcatccagagatgggcctggaacgcaacgacgagtcggtgagcaaggccctcgcgcacatcgagcaactgacccgcgatcgcctgctcaagccggtggtcgaccgggtattcgagttcgaccaggtggtcgaggcgcaccgctacatggaaacctgtccgaagcgcggccgggtggtgatccacgtcgccgattga

SEQ ID NO: 323355 - DNA, 2718 bp, Pseudomonas aeruginosa
atggccactatccacgtagacggcaagacgctcgaagtcgatggtgcagacaacctcctgcaggcctgtctgtccctcggtctcgacattccctacttctgctggcacccggcgctcggtagcgtcggcgcctgccgccagtgcgcggtgaagcagtacaccgacgagaacgacaagcgtggtcgcctcgtcatgtcctgcatgacccccgccaccgacaacacctggatctccatcgaagacgaagaggccaagcagttccgcgccagcgtcgtcgaatggctgatgaccaaccacccgcacgactgcccggtgtgcgaggaaggcggtcactgccacctgcaggacatgacggtgatgaccggccacaacgagcgccggtaccgcttcaccaagcgcacccaccagaaccaggaactcggcccgttcatcgcccatgagatgaaccgctgcatcgcctgctaccgctgcgtgcgctactacaaggactacgccggcggcaccgacctcggcgtctacggcgcccacgacaacgtctacttcggacgggtcgaggacggcgtgctggaaagcgagttctccggcaacctcaccgaggtctgccccaccggcgtgttcaccgacaagacccactccgagcgctacaaccgcaagtgggacatgcagttcgccccgagcatctgccacggctgctccagcggctgcaacatcagccccggcgagcgctacggcgagatccgccgcatcgagaaccgctacaacggctcggtcaaccactacttcctctgcgaccgcggtcgcttcggctacggctacgtcaaccgcgaagaccgtccgcgccagccgctgctggtgctgagcaagcagaagctgagcctggacggcgccctcgaccaggccgccgccctgctgaaggagcgcaaggtggtcggcatcggttcgccgcgcgccagcctggaaagcaacttcgccctgcgcgagctggttggcgaaggcaacttctacagcggcatcaacgaaggcgagctcgaccgcctgcgcctgatcctgcaggtcatgcaggaaggcccgctgccggtgccgagcatccgcgacatcgaggaccacgacgcggtcttcgtcctcggcgaggacctgacccagaccgccgcccgcatcgccctggccctgcgccagtcggtgaagggcaaggccgtcgagatggccgccgacatgaaggtccagccgtggctcgacgccgcggtgaagaacatcgcccagcatgcgcagaacccgctgttcatcgccagcgtcagcgcgacccgcctcgacgacgtggccgaggaaaccgtccacgccgcgccggacgatctcgctcgcctcggcttcgccgtggcccacgcgatcgacccaagcgccccgtccgtggccgacctcgacccgcaggcccaggccttcgcccagcgcatcgccgatgccctgctggcggccaagcgtccgctggtagtgtccggcaactcgctgggcaacaaggcattgatcgaagccgcggcgaacatcgccaaggccctcaagcagcgcgagaagaacggttccatcagcctggtggtcggcgaagccaacagcctcggcctggcgctcttcggcggcgactccgtggaagccgcgctcgagcgactgacctccggacaggccgacgccgtggtggtgctggagaacgatctctatcgccgcaccgacgccgcccgtgtcgacgcggccctggcggcggccaaggtggtgatcgtcgccgatcaccagcagaccgccaccaccgccaaggcgcacctggtgctgccggcggccagcttcgccgaaggcgacggcaccctggtcagccaggaaggccgcgcccagcgcttcttccaggtgttcgacccgacctactacgacgccaggaacatggtccgcgagggctggcgctggctgcatgcgatccacagcaccctgcaaggcaagcgcgtcgactggacccagttggaccacgtcaccgaagccgtggccgaggccaagccgatcctggccggcatccgcgacgccgcaccggccgcctcgttccgcatcaagggcctcaagctggcccgcgaaccgcaccgctacagcgggcgcaccgccatgcgcgccaatatcagcgtgcacgagccgcgcaccccgcaggacatcgactcggcgttcgccttctccatggaaggctactccggcagccaggaagaccgtcagcagatcccgttcgcctggtcgccgggctggaactcgccgcaggcctggaacaagttccaggacgaggtcggcggccatctgcgcgccggcgaccccggcgtgcgcctgatcgaaccgaagggcgaaggcctcgactggttccaggccgtgccggtgccgttcagcgccaaggccgacagctggaaggtagtgccgctgtaccacctgttcggcagcgaggaaaacagctcgcgggccgcgccgatccagcagcgcatcccggagacctacgtcgccctgtccaaggaagacgcggaccgcctcggcgtcaacgacggcgcgaccctcggcttccagctcaagggccaggccctgcgcctgccgctgcgtatcgatgaacaactcggcgccggcctgatcggcctgccggtcggcttcgccggcatcccggcggcgatcgccggctgctccgtggaaggtctgcaggaggctgcacaatga

SEQ ID NO: 323356 - DNA, 1347 bp, Pseudomonas aeruginosa
atgacccttacctccattggtccggccaaccgcatggcgcgttcggcggaaacccatccgctgacctggcgcctgcgcgaagacgcccagcccgtctggctcgaggaataccagagcaaggacggctatgccgcggcgcgcaaggcgctgacccagatggcccaggacgacatcgtccagaccgtcaaggactccggcctcaagggccgcggcggcgcgggcttccccaccggcgtgaagtggggcctgatgccgaaggacgagtcgctgaacatccgctacctgctgtgcaacgcggacgagatggagccgaacacctggaaggaccgcatgctcatggagcagctgccgcacctgctggtggaaggcatgctgatttccgcgcgcgcgctgaaggcctaccgcggctacatcttcctgcgcggcgaatacgtcgacgcggcgcgcaacctcaaccgcgccatcgacgaagccaaggccgccggcctgctcggcaagaacatcctcggcagcggcttcgatttcgagctgttcgtccacaccggtgccggccgctacatctgcggcgaagagaccgcgctgatcaactcgctggaaggccgccgcgccaacccgcgttccaaaccgcccttccctgccgccgtcggcgtctggggcaagccgacctgcgtgaacaacgtggagacgctgtgcaacgtgccggccatcgtcggcaacggcgtggactggtacaagaccctggcccgccccggcagcgaagacatgggcaccaagctgatgggcttctccggcaaggtgaagaaccccggcctgtgggaactgccgttcggcgtcagcgcccgcgagctgttcgaggactacgccggcggcatgcgcgacggcttccagctcaaggcctggcagcccggcggcgccggtaccggcttcctgctcccggagcacctggatgcgcagatgttcgccggcggcatcgccaaggtcggcacccggatgggcaccggcctggccatggcggtggacgacagcatcaacatggtttccctgctgcgcaacatggaagagttcttcgcccgcgagtcctgcggctggtgcaccccctgccgcgatggcctgccgtggagcgtgaagctgctgcgcgccctggagcggggcgaaggccagcccggcgacctcgagaccctcgagcagctggtcaacttcctcggcccaggcaagaccttctgcgcccacgcgccgggagccgtcgagccgctgggcagcgccctcaagtatttccgtgccgaattcgaggcgggcatctcccgccagccttcggccgcgccgcgcccggcaacggtcggcgcctga

SEQ ID NO: 323357 - DNA, 501 bp, Pseudomonas aeruginosa
atgagccagagcaacctgattcagaccgaccgtttcgtcctcagcgaaaccgagcgctcgtccatcgagcatgaaatgcatcactacgaggacccgcgcgcggcgtccatcgaagccctgaagatcgtccagaaacagcgcggctgggtgccggacggcgccatcccggcgatcggcgaggtgctggggatcccggccagcgacgtcgaaggcgtcgccaccttctatagtcagatattccgccagccggtgggccgccacatcatccgcgtctgcgacagcatggtctgctacatcggcggccacgagtcggtggtcggcgagatccagaagcaactcggcatcggtctcggccagactaccgccgacggacgcttcaccctgctcccggtctgctgcctgggcaactgcgacaaggccccggcgctgatgatcgacgacgacacccatggcgacgtgcgtcccgacggtgtcgccaaactgctggaggcctacgtatga

SEQ ID NO: 323358 - DNA, 1782 bp, Pseudomonas aeruginosa
atgactgcagactccgctctgtacatcccgccttacaaggcagacgaccaggatatcgtcgtcgaactgaattcccgctttggcgccgagaccttcaccgtccagcccacccgtaccggcatgccggtgctctgggttccgcgcgaaagactgatcgaagtcctgaccttcctccgtcaggtacccaagccctacgtgatgctctacgacctgcacggcgtcgacgagcggctgcgcacccatcgccgcggcctgccgagcgccgacttcagcgtgttctaccacctgatgtcgctggagcgtaatagtgacgtgatgatcaaggtcgccttgtccgagcgcgacctcaacctgcccaccgccacccgtatctggcccaacgccaactggtacgagcgcgaagtgtgggacatgtacggcatcaccttcaccggccacccgcacctgacccgcatgctgatgccgccgacctggcagggccatccgctgcgcaaggactacccggcgcgcgccaccgagttcgatccctactccctgtccgccgccaagcaggacctggagcaggaagccctgcgcttcaagccggaagactggggcatgaagcgccacggcgagaacgaggactacatgttcctcaacctcggcccgaaccacccgtccgcccacggcgcgttccgcatcatcctgcaactggacggcgaggagatcatcgactgcgtcccggagatcggctaccaccaccgcggcgccgagaagatggccgagcgccagtcctggcacagtttcatcccctacaccgaccgcatcgactacctcggcggggtgatgaacaacctgccctacgtactctcggtggagaagctcgccgggatcaaggtgccccagcgggtcgacgtgatccggatcatgatggcggagttcttccgtatcctgaaccacctgctgtacctgggcacctatatccaggacgtcggcgccatgaccccggtgttcttcaccttcaccgaccgccagcgcgcctacaaggtggtcgaggccatcaccggcttccgcctgcacccggcctggtaccgcatcggcggcgtcgcccacgacctgccgcgcggctgggacaagctggtccgcgagttcctcgactggatgcccaagcgcctcgacgagtacgagaccgcggccctgaagaacagcatcctgcgcggccggaccatcggcgtcgcccagtacaacaccaaggaagccctcgagtggggcaccaccggcgccggcctgcgcgccaccggttgcgacttcgacctgcgcaaggcccgcccctactccggctacgagaacttcgagttcgaggtaccgctggcccacaacggcgacgcctacgaccgctgcatggtcaagatgggcgagatgcgccagagcctgcggatcatcgaacagtgcctgaagaacatgccggaaggcccttacaaggccgaccatccgctgaccacgccgccgccgaaagaacgcacgctgcaacacatcgaaaccctgatcacccacttcctgcaggtttcctggggcccggtcatgccggccaacgaagccttccagatgatcgaggcgaccaagggtatcaacagctactacctgaccagcgacggcagcaccatgagctaccgcacgcgtatccggacgcccagcttcgcgcacctgcaacagatcccctcggtgatcaacggcagcatgatcgcggacctgatcgcctacctgggtagcatcgatttcgttatggctgacgtggaccgctga

SEQ ID NO: 323359 - DNA, 678 bp, Pseudomonas aeruginosa
atgcaatacaaacttacccggatcgatcccgatgcggccaacgaccaatacccgataggcgaacgggaaaccgtagccgacccgctggtcgagggccaggttcacaagaacatcttcatgggcaagctcgaggatgtgctgaactccaccgtcaactggggtcgcaagaactcgctctggccctataacttcgggctgtcgtgctgctacgtggagatgaccaccgccttcaccgcgccgcacgatatcgcccgcttcggcgccgaagtgatccgggcgtcgccgcgccaggccgacttcatggtcatcgccggcacctgcttcatcaagatggccccggtcatccagcgcctctacgagcagatgctcgaacccaagtgggtcatctccatgggctcgtgcgccaattccggcggcatgtacgacatctattcggtggtccagggggtcgacaagttcctccccgtggacgtctacatccccggctgcccgccccgtccggaggcgttcctgcaaggcctgatgctgttgcaggaatccatcggccaggagcgccgcccgctgtcctgggtcgttggcgaccagggggtctaccgcgccgaaatgccggcccagaaagacctgaaacgcgagcagcgcatccaggtgaccaacctgcgcagccccgacgaagtgtga

SEQ ID NO: 323360 - DNA, 414 bp, Pseudomonas aeruginosa
atgccaaacccagctgaacttgcagctcatcactggggattcgctgccttccttctaggggtcgttggccttctcgccttcatgctaggggtttcgtccctgcttggcagcaaggcatttggtcgcagcaagaacgaacccttcgaatccgggatcgtccccaccggaggcgcacgcctgcgtctctcggcaaaattctatctggtcgcgatgctcttcgtgatcttcgacgtcgaagccctcttcctcttcgcctggtcggtgtcggttcgcgaaagcggctgggccggcctgatcgaggcaaccattttcatagcaattctgttggcgggtcttgtctatctttggcggatcggtgcgctcgattgggctcccgaaagccgtcgcaagcggcaggcgaagctaaaacaatga

SEQ ID NO: 323361 - DNA, 516 bp, Pseudomonas aeruginosa
atgcccaagcgcaatcgtctcagccgcgccgtcggcgccatcaacctcctcccccgccgcctgcgcagccgcagcctgacgctgctgctgggctcccaggtgcgcttcgccggcacggcgagggtgcgcatccatgaactggggcaggagcgcgccatcctcagcctgaagaaccgtcgaccggtgcagaaccacataaaaggtatccatgccgcggcgatggccttgctcgccgagtcggccagcggcttcctggtcggaatgaacgtaccggacgacaagctgccgctgatcaagaccatgaagatcgactatctcaagcgcgcccagggcaacctgaccgccatcgcgacgctggaggccggacagatcgagcagatacggcaacaggacaagggcgaggtccgcgtggcggtgttggtcagcgacgagaacggcaaccagccgatcgcctgcgaaatggtctgggcctgggtcggcaagaaaccccgggtcgctatcgcagcccccaggtag

SEQ ID NO: 323362 - DNA, 2019 bp, Pseudomonas aeruginosa
gtgagcctggagaaaaaagatgccatcctgttcggtgatggcgacgagttgcccagcaaccattcgaacaacccgcacatgaacgacctgatcgccggcctcggccgccgccaggtcctggccggcggcgcggcgctcggcgccctcgccttcctcggcgtcgcgctccccgccagcgccgctcccgccgaagcgcaggtgcccgccgcggaaggcctgcgcggcttgcctttcaaacgccgcaaccgcttgcccttcgaagccatcgccagcggccgtgccgataccatccgggtgcccgccggctacaaggcgacgcccttcataccctggggtaccccgatcagcggcagttatccgggcttcctcgacgacgccagcaacagcgcccaggaccaggccgaacagatcggcatgcaccacgacggcatgcacttcttcccgatcgacgcgcagttcggcttcggcggcggacacatcagcaaccatggcctgctggtgctcaaccatgaatacatcgacgcgccgctgctgcacaccaatggcccgaccgtggtcgatggcaagcgcaccgtcgccgatgaagtgcgcaaggaaatcaacgcccatggcgtttccgtcgtggagatccgtcgcaacgtgcgtggcgagtggaatgtcgtgccgtcgcaacgaaatcgccggatcaccgccgccacgccgatgcgtatcgccggcccggcgcgcggccacgaactgctgcgcacccgccacagtccggacggcacccgcacccgcggcactcacaacaactgttccaacggtttcaccccctggggcacctacctcacctgcgaggagaactgggtcggctatttctccactcaggacagcgaactgccgcgcgaactgacccgctacggcattcgcaacaccagccgtttcggctgggaaaccctggcgggcgacgagttcgaacgcttcgacgccacccgcaagggcaaacaggcccaggacgactaccgcaacgaaccgaacaacttcggctggatcgtcgagatcgacccgttcgacccgcaatcggtgccggtcaagcgcaccgctctcggccgcttcgcccacgaaggcctggtcttcgccccggtcaagccgggccgccaggtagtctgctactccggcgacgactcgcagaacgagtacatctacaagtacgtcagccgcgacaagttccgtccgggtcgcagcaacgctcgcctgctcgacgaaggcaccctctacgtcgcccgcttcaacgccgatggcagcggccagtggctgccgctggacatcgccgacggcaacttccgcgcggcctgtcgcaaggccggggtgagcttcgccgaccagggcgaagtgctgatcaacacccgcctggccgccgatgtcctcggcgcgaccaagatggatcgcccggagtggggcgcggtcaacccggacaacggtgacgtctacttcaccctcaccaacaacacgtcgcgcaccgtcgccgacgcggccaacccacgggtgaagaacgcctacggccatatcatccgctggcgcgaacgcagccgcgactatgccgggcaacgcttcacctgggacctgttcatgctcgccggtcccggcgaagacagccgcggcccggacggcaagccgctgaaccaggacaatatcctggccagccccgacggcctctggttcgacccggaaggccgcctgtggatccagaccgacatgagcggcagccagttgagcagcggcccgttcggcaacaaccagatgctggtggccgacccgcgcaccggcgaactgaagcgcttcctcaccggtccgctgggttgcgaggtgaccggcattgccgcgacgccggacttccgtacgctgttcatcaacatccagcacccgggggaaggctcgaccgccgataacctcctcagcacctggccggacgggccgggccgccggccacgctcggccaccgtggtgatcacccgcgaagacggccgacgcctgctctga

SEQ ID NO: 323363 - DNA, 1596 bp, Pseudomonas aeruginosa
atgtccgcatatcagaacgagatcaaggcagttgccgcgctgaaagagaagaacggcagcagctggagcgcgatcaaccccgagtacgcagctcgcatgcgtatccagaaccgcttcaagaccggcctggatatcgccaagtacaccgcggccatcatgcgcaaggacatggccgaatacgatgcggactcctccgtctacacccagtcgctgggttgctggcacggcttcatcgggcagcagaagctgatctcgatcaagaagcacctgaagaccaccaacaagcgctacctctacctgtccggttggatggtcgccgcgctgcgctccgacttcggcccgctgccggaccagtccatgcacgagaaaaccgcggtttccggcctgatcgaagagctgtacaccttcctgcgccaggctgacgcccgcgagctggacctgctgttcaccggcctggacgctgcccgcgccgctggcgacaaggccaaggaagccgagctgctggcccagatcgacaacttcgaaacccacgtggtgccgatcatcgccgacatcgacgccggcttcggcaacgccgaggcgacctacctgctggccaagaagatgatcgaagccggcgcctgctgcatccagatcgagaaccaggtgtccgacgagaagcagtgcggccaccaggacggcaaggtcaccgttccgcacatcgacttcctcgccaagatcaatgccgtacgctacgccttcctcgagctgggcgtggacgatggcgtgatcgtcgcccgtaccgactccctgggcgccggcctgaccaagcagatcgccgtgaccaacgagccgggcgacctgggcgacctgtacaactccttcctggattgcgaagaaatctccgaggccgagctgggcaacggcgacgtcgtgatcaagcgcgaaggcaagctgctgcgtccgaagcgcctggcttccaacctgttccagttccgcaagggcaccggcgaagatcgctgcgtcctggactgcatcacctcgctgcagaacggcgccgacctgctctggatcgaaaccgagaagccgcacgtcggccagatcaaggcaatggtcgatcgcatccgcgaagtgattccgaacgccaagctggtctacaacaacagcccgtccttcaactggaccctgaacttccgccagcaggtgttcgatgcgttcgtcgccgaaggcaaggacgtttccgcctacgaccgcaacaagctgatgagcgtcgagtacgacgacaccgagctggccaaggtcgccgacgagaagatccgcaccttccagcgcgatggctcggcccacgccggcatcttccaccacctgatcaccctgccgacctaccacaccgccgcgctgtccaccgacaacctggccaagggctacttcgccgacgaaggcatgctggcctacgtgaagggcgtgcagcgccaggaactgcgccagggcatcgcctgcgtcaagcaccagaacatggcgggctccgacatcggcgacaaccataaagagtacttcgcaggcgaagccgctctgaaggccagcggcaaagacaacaccatgaaccagttccactaa

SEQ ID NO: 323364 - DNA, 822 bp, Pseudomonas aeruginosa
gtgaccctgttgcgcaccaccctgctctcctcgctgttggcgacagtcgttctcggcgcctcggccgccccgcgcaccgaagtgatcccgctcaactaccgcaccgccgacgacgtgatggcggtggcccagtcggtcatcggcagcgaaggcaaggtcaccgcctatggcaaccagttgatcgtcaatgccgagccggcgaagatccgcgagttgcaatcggtcctgcagcagatcgactcgcgcccgcatcgcctgctgatcaccgtggataccagcgagaacctgcaacaggacagccgcggctattcggtggatggttcgaccagcgccggcaacatcgagatccagagcgaccgcggcgaggtcaacggcaaggatcgagtccgcatcatccgtcgctccaccgacagccgttccggcggcagccagcaggtccaggccaccgagggctacccggcgctgatccaggtcggccagagcgtccccatcaccagcaccgccaccggtccctacgggcagatctacagccagaccgaataccgcaacgtcaaccgcggcttctacgtcaccgcgacgctgaccggcaacctggtgcacgtcaccatcagctccagcaatgaccgcctcagccagagccatcccggcgtcatcgatacccagagcaccgacacccgggtcagcggcaagctcggcgagtggatcaccctgggcggcgtcagcgaacagaaccaggccgaccagcacggcttcgtgcgtcgctactcgacccagggacgcgacgacaccagcctgcgcctgaaagtcgaaaccctcgactga

SEQ ID NO: 323365 - DNA, 621 bp, Pseudomonas aeruginosa
atgagcgacgccccggagacctcgccggccgacctgccggccatcgaattcagctctccggggtgctttgcggtacgcaacccggccagcgccgcgctgcctgcggaacgctgggaaccagcgccattccgcctcggcgaacatgagccgctggagcgcttcgagcatccgcaggaagcccgcgcccatgccctggccctcctgcagcaggcccgccgctcactctgcctgcacagtcccgacctggaaagctggctctatcaccacagcagcatccaggaagcctgcacccgttttctcctggccaatccacgcaatcgcctgcgtatcctcgttggcgacagcgcccaggccgtgcgcaacggccaccgcctgatcaacctttcgcgccgcctgtcgagcaactgcctgatccgccgcctcaacccggactaccctaaagaggacgacgccttcctcctggccgacgaccagggcctgctgctgcgcccgaaaccggcgcaaccggcgggctacgcctgctaccgtgccgccgggcgggtgcgtcaactccaggcccgcttcgagcaggcctgggacaccagtctttccgacccggacctgcggagcttcctcctgtga

SEQ ID NO: 323366 - DNA, 426 bp, Pseudomonas aeruginosa
atgaataagatccgcgtacgcgtagccgactggcagaaggacaatgccgagctgcgccgcatccgcgaagcggtcttcattgccgaacagtcggttccgccggaactggagtgggacgccgaagacgacgaagccgtgcattttctcgcctatgaaggcgaatacgcgatcggcaccgcgcgcctgctgggcgacgggcacatcggcagggtctcggtactcaaggactggcgcggcctgaaggtcggcgacgcgctgatgcgcgcggccatcgaggaagccgagcgacgcggcctgaagcgccaactgctgaccgcgcaggtctatgccatacccttctacgagcgactgggcttcaaggtcgacagcggcgagttcctcgacgccggcctgccccatgtcgacatggttcgcgacagcgactga

SEQ ID NO: 323367 - DNA, 1170 bp, Pseudomonas aeruginosa
atgaatgctgatactcccctgcaacttctgggcggactgaccgctgccgaattcctccgcgactactggcagcgcaaaccgctgctggtccgccaggcgatcccggacttcgaaagcccgctgtccgccgacgagctggccgggctgtcgctggaggagtcggtggaatcgcgcatcgtcctcgaacacgggaaaaccccgtgggaaatgcgccgtggcccgttccaggaggaggactaccagcacctgccggaacaggactggaccctgctggtccaggcggtcgaccagttcgtcccggaagtcgcccaactgctggagcaattccgcttcctgcccagctggcggatcgacgacgtaatgatcagctacgccgctcccggcggcggcgtcggtccgcacttcgacaactacgacgtattcctgcttcagggccacggacgccggcgctggaaagtcggacagatgtgcagcagcgacagcccgctgcgcgagcacgccgacctgcgcatcctcgccgacttcgaacagagcgacgagtgggtcctggagcccggcgacatgctctacctgcccccgcgcctcgcccactacggcatcgccgaagacgagtgcatgacctactcgatcggcttccgcgcgcccagcgccgccgaagtgctgacccatttcaccgacttcctcggccagttcctctccgacgaggagcgctacaccgatgccggcctgcaaccggtaggcgacgatccgcaccagatccagcgcgacgctctggagcgcctgcaggtcctgatccaggagcacatgagcgacgagcgcctgctgctgacttggttcggccagttcatgaccgagccgcgctatcccgaactggttgccggcgaggagatccccgaggaggagctgttcggcgccctcgaggatggcgcgctgctggtgcgcaaccccagcgcccgcctggcctggagcgagatcgacatcggcctggtgctgttcgccagcggccagagcgtactcctgcccgggcagctcaaggaactgctgaagctggtctgctcggccgatgcgttgcatctggaaaacctcggccaatggctggccgatgacgatgcgcgtaagctgttggcggagttggtcaaacagggcagtttggagtttgcagatgaataa

SEQ ID NO: 323368 - DNA, 1371 bp, Pseudomonas aeruginosa
atgcagctttcctcgctcaccgcggtatcccccgtcgatggccgctatgccggcaaaaccagcagcctgcgtccgatcttcagcgaatacggcctgatccgtttccgcgtcatggtggaagtccgctggctgcagcgcctcgccgcccacgccgggattcccgaggtcgcgccgttctccgccgaagccaacgccctgctcgacagcctggccagcgacttccagctggaacacgccgaacgcatcaaggaaatcgagcgcaccaccaaccacgacgtgaaagccgtggagtacctgctcaaggaacaggccgccaagcttccggagctggccgcggtcagcgagttcatccacttcgcctgcacctccgaggacatcaacaacctgtcccacgccctgatgctccgcgagggtcgcgacagcgtgctgctgccgctgatgcgccagatcgccgaggccatccgcgaactggcggtgaaattcgccgacgtgccgatgctctcccgcacccacggccagcctgcctcgccgaccaccctgggcaaggaactggccaacgtcgtctaccgcctggagcggcagatcaagcaggtcgccggcatcgagttgctgggcaagatcaacggtgccgtgggcaactacaacgcccacctgtccgcctatcccgaagtcgactgggaagccaacgcgcgccagttcatcgaaggtgacctcggcctgaccttcaacccctacaccactcagatcgagccgcacgactacatcgccgagctgttcgatgcgatcgcccgcttcaacaccatcctcatcgacttcgaccgcgacgtctggggctacatctccctcggctatttcaagcagaagaccgtggccggcgagatcggctcctcgaccatgccgcacaaggtcaacccgatcgacttcgagaactccgagggcaacctcggcatcgccaacgcgctgttccagcacctggccagcaagctgccgatctcgcgctggcagcgcgacctgaccgactccaccgtgctgcgcaacctcggcgtcggcatcgcccacagcatcatcgcctacgaggccagcctgaagggcatcggcaagctggagctgaacgcccagcgcatcgccgaggacctggacgcctgctgggaagtcctcgccgagccggtgcagaccgtgatgcgtcgctatggcgtggaaaacccctacgagaagctgaaggaactgacccgcggcaaaggcatcagcgccgaagccttgcagactttcatcgaagagctggcgattcccgccgaggccaaggtcgagctgaagaagctgaccccggccggctacgtcggcaatgccgccgcccaggccaagcgcatctga

SEQ ID NO: 323369 - DNA, 891 bp, Pseudomonas aeruginosa
atggccatggccgggagccagccgcaacggcgcaacagcccgacccagggcgccgccatgctggctctttcggcgctgttcttcgccctgatgggcggcctgatccgcgaggcctccagcaccgtcaacaacgaaaccgtggtgttcttccgcaacctcgtcggcgtgctgttcttcctgcccctggcgctgactcgcggcatcggcccgctgcgcacccgccgcccgctatcgcacctgctgcgcaccacctacggcctgggcggcatgtactgctacttctacgccctcgcccacctgccgctgaccgacgccatgctgttcagctatgccgcgccggtgttcacgccgctgatcgcacacctgtggatcaaggagccgctgacccgccgcatgatggtcgccaccctggtcggcttcctcggcgtgctgctggtggccaggcccagcggcgcggtagtggctccgatcgccctggtcggcatcgcctccagcctgatggctgcctgcgccttcgtctcgatccgcgaaatgagcgacagcgagccagcctatcgcatcgtgttctacttcgccctgttcggcaccctgttctccgccgtgccgctggcctgggcctggcagccgctgaacggccaggaactgctcctgctgctcggcgccggactgttcgccagcctcggccaactgaccatgtcgcaggcctatgccctggcctccccgggagtgatcggaccgatcgcctacatggccatcgttttcgccggggtgatcgcctggctgcgctgggacgaactgcccagccacacgtcgctgctcggcgccgccctgatcttcgccgccagcctgatccccctgccgggcaaccgccccgccgaaaggccccgctga

SEQ ID NO: 323370 - DNA, 621 bp, Pseudomonas aeruginosa
gtgagcgatccgcgacagcaactgattgccctcggcgccgtcttcgaatccgcagccctggtcgacaagctggcacgcaccggacagatcagcgaagccccgctgggctgcatgctcggcagcctgctggcgcgcaacccggccagcaccctggacgtctacggtggcgacagcctcaacctgcgcgacggcttcaaggccctggccagcgccctggagcgcaagcccggcagcctgcagcgcgaaccgctgcgctacgccctggcgatgctgaccctggaacggcaactggacaagcgcggcgatatgctcgacctgatcggccagcgcctcgaccaggtcgaacagcaggtccagcacttcggcctggtccacgagaacgtcatcgcctcgttcgccagcatctatcaggacaccctcagcaccttccgccagcgcatccaggtacacggcgacatgcgccacctgcaggtcagcagcaacgccgcgcggatccgcgccctgctgctcgccggcatccgctcggcgcggctctggcggcaactgggcggcagccgctggcagatggtattcagccggcgccggctgctcaacgaactctatcccctgctgcgcggctag

SEQ ID NO: 323371 - DNA, 1128 bp, Pseudomonas aeruginosa
atgtctgaatccgcccccaccccacgccgcgagcgcgtgatcgtcggcatgtccggcggcgtcgactcgtccgtctccgccctgctcctgttgcagcagggctatcaggtcgaaggcctgttcatgaagaactgggacgaggacgacggcaccgaatactgtaccgcccgcgaggacctggccgacgcccaggccgtctgcgaccggatcggcatcaagctgcacacggcgaacttcgccgcggaatactgggataacgtgttcgagcacttccttgccgagtacaaggccggccgtacgccgaacccggacatcctctgcaaccgcgaaatcaagttcaaggcgttcctcgactacgcgctgatgctcggcgcggacctgatcgccaccggccactatgtgcggcgccgcgaccgcgacgggcgcaccgagctgctcaagggcctggacccgaacaaggaccagagctacttcctgcacgcggtgggcggcgagcagatcgcccgcagcctgttccccgtcggcgaactggagaagccggaagtccgcgccatcgccgagaagcatggcctcgccacggcgaagaagaaggactccacgggcatctgcttcattggcgagcgacgcttcaccgatttcctcaagcagtacctgccggcccagccgggcgacatcgagaccaccgaaggcaaggtcatcggtcgccacagcggcctgatgtaccacaccatcggccagcgccagggcctcggcatcggcggtctcaaggaagccggcgacgatccctggtacgtgctcggcaaggacctgcaacgcaacgtgctgctggtcggccagggcaacgaccacccgctgctgttctcccgcgccctgctggcctcgcgaatctactgggtcaacccggtcgaactggagcggccgcgccgcctgcgggccaaggtgcgctaccgccagagcgaccaggactgcgtcctggagaaaaccgccgaaggctaccgcgcggtgttcgacgaaccgcagcgcgcagtgaccccggggcaatcggtggtgttctacgacggcgacgtctgcctcggcggcggcgtgatcgaaacggcggaagcctgggatttcggaggacgcccgtga

SEQ ID NO: 323372 - DNA, 471 bp, Pseudomonas aeruginosa
atgagctggcatccccatgtcaccgtagcgaccatcgtcgaggaccagggccgcttcctgctggtcgaggaacaggccgacggccgcgaggtgctgaaccagcccgccgggcacctggagcccgccgaaagcctgctcgaggccgccctgcgcgaaaccctcgaggaaaccggctgggaggtcgagctgagcgccgtcaccggcatctacctgtacaccgccccgtccaacggtgtcacctatcagcgcgtatgcttcgccgcccgccccgtgcgccaccaccccgagcgcgccctcgacgacggcatcatcggcccgcgctggctgagccgcgacgaactggccgcccagccgcagcgctggcgcagccacctggtgctgcgctgcatcgacgactacctggccggcggccgctatcccctggcgctgatccgcgacacccacgtgtcgccctccctgccccaggcctga

SEQ ID NO: 323373 - DNA, 2226 bp, Pseudomonas aeruginosa
atgtccatccgctcgaagatcacctacaccttcaccgacgaagcacccgcgctcgccacctactcgctcctccccatcgtcaaggcctttgccgcttccgccggcatcgacgtcgagaccagcgacatctctcttgcaggacgcatcctggccaacttcgccgaccgcctcgaagccgaccagcgtatcgaagacgacctcgcccgcctggcggtcctggccacctcgcccgacgccaatatcatcaagctgcccaacatcagcgcctcggtgccccagctgaaaggcgcgatcgccgagctgcagggcctgggctacaaggttcccgacttcccggaagacccgcagaccgacgaagagaaagaggttcgcgcacgctacgcgaagatcctcggcagcgccgtgaacccggtcctgcgcgaaggcaattccgaccgtcgcgcgcctgccgcagtgaaggcctacgcccgcaagcacccgcactccatgggcaagtggagcatggcctcgcgctcccacgccgactacatgcgcggcggcgacttcttctccagcgaacagtccatcaccatggccaaggccggtgacgtgcgcatcgaattcgtcggcaaggacggcaaggtcgaggtcaagaagcaactgagcctgcaggaaggcgaagtgctcgacagcatgttcatgagctgcggcaagctgcgcgacttcttcgagaagaccctgcaggactgcaaggaaaccggcgtcatgtggtccctgcacgtcaaggcgaccatgatgaagatttcccacccgatcgtcttcggacatgcggtgagcgtctactacaaggacgtcttcgacaagtggggccaactcttcgaagagctcggcgtgaacccgaacaacggtatctccagcgtctacgacaagatcaagtcgctgcccgcctcccagcaggaagagatcctccacgacatccacgaggtgtacagccaccgcccggaaatggcgatggtcgactccgtgaaaggcatcaccaacctgcacattccgagcgacgtcatcgtcgacgcctcgatgccggcgatgatccgcaactccggccagatgtggggcaaggacggcaagcagaaagacaccaaggcggtaatgccggaaagcacctacgcccgcatctaccaggagatgatcaacttctgcaagaccaacggcgccttcgacccgaccaccatgggcagcgtgccgaacgtcggcctgatggcgcagaaggccgaggaatacggctcccacgacaagaccttcgaaatgaccgccgacggcaccatgcgcgtggtcctggccgacggcagcgtgctgatgcagcacgacgtggagaccggcgacatctggcgcgcctgccagaccaaggacgcaccgatccgcgactgggtcaagctggccgtcacccgcgcacgccagtccgataccccggcgatcttctggctggacccggagcgcgcccacgaccgcgaactgcgcaagaaggtcgagctgtacctcaaggaccacgacctgaccggtctcgacatcagcatcatgggctacaacgaggccattcgcgtcagcatggaacgcctgatccgcggcaaggacaccatctcggtgaccggcaatgtcctgcgcgactacctgaccgacctgttcccgatcatggaactgggcacctcggccaagatgctctccatcgttccgctgatggcgggcggcggcatgtacgaaaccggcgccggcggctcggcacccaagcacgtccagcaactggtggaagagaactacctgcgctgggactccctgggcgagttcctggccctggccgtgtccctggaggaaaccgggatcaagaccggcaacgccaaggccaagctgctcggcaaggcgctggacgaagccaccggcaagctgctggacaacaacaagtcgccgtcgcgcaaggtcggcgacatcgacaaccgcggcagccacttctacctggcgatgtactgggcccaggccctggccgcccaggacgaagacgccgaactgaaagcgcacttcgcaccgctggccaaggccctgaccgagcaggaagcgaccatcgtcgccgaactcaatgcggtccagggcaagccggccgagatcggcggctactatcgctccaacccggagctgaccagcaaggtgatgcgccccagcgccaccttcaacgcggcgatcgacagcctggcctga

SEQ ID NO: 323374 - DNA, 1257 bp, Pseudomonas aeruginosa
atgggataccaaaagatccaggtgccggcgaccggtgacaaaatcactgtgaatgccgacatgtccttgagcgtaccgaagaacccgatcatcccgttcatcgagggtgatggcatcggcgtcgatatcagcccggtcatgatcaaggttgtcgacgctgcagtggaaaaagcatacaagggcgagcgcaagatcgcctggatggaagtctacgccggcgagaaggccacccaggtgtatgaccaggacacctggctgccccaggaaaccctggacgccgtacgcgactacgtggtttccatcaagggcccgctgaccaccccggtcggtggcggcatccgctccctgaacgtggccctgcgccagcaactcgatctctacgtctgccagcgcccggtacgctggttcgaaggcgtgcccagcccggtgaagaagcccggcgacgtggacatggtgatcttccgcgagaactccgaggacatctatgccggcgtcgagtggaaggccggttcgccggaagcggagaaggtcatcaagttcctcaccgaggaaatgggtgtcaagaagatccgcttcaccgagaactgcggcatcggcatcaagccggtttcccaggaaggcaccaagcgcctggtgcgcaaggccctgcaatacgccgtcgacaacgaccgcagttcggtgaccctggtgcacaagggcaacatcatgaagttcaccgagggtgccttcaaggattggggctacgaagtcgcgcgcgatgaattcggcgccgagctgctggacggcggtccgtggatgcagttcaagaatccgaagaccggcaagaacgtcgtggtcaaggacgtgatcgccgacgccatgttgcagcagatcctgctgcgccccgccgagtacgacgtgatcgccaccctgaacctgaacggcgactatctctccgacgccctggcggccgaggtcggcggcatcggcatcgcgcccggcgccaacctgtccgattcggtggccatgttcgaggcgacccacggcaccgcgccgaagtacgccggccaggacaaggtcaacccgggttcgctgatcctctccgcggagatgatgctgcgccacatgggttggaccgaggcggccgacctgatcatcaagggcaccaacggggcgatcgccgccaagaccgtgacctatgacttcgaacgcctgatggacggcgcgaccctgctgtcctgctcggagttcggcgacgcgatgattgccaagatgtag

SEQ ID NO: 323375 - DNA, 1560 bp, Pseudomonas aeruginosa
atggcatattttctggcttcgaagcagggggaccggcgcgtcctgattggccgcatcgtcacgatggatggtgcaggcaccgtccatgagcgcggggcgctatgcatcacgggggacacgatagcggccatcgcacccgatgcggccagtatcccggcgagctttgccgatgtggtccccatcgacacccagggcagtctgtatccgggcctcatcgagctgcacaaccacctcagttacaacttcctgccgctgtggacggtgccgaaccgctacaccaaccgcaaccagtggcgcacccaggaacccgattacgacatcgccattgcgctgccggccaaggtgctgggcagcaacgtggatatcaactacgtacgcagcattgcccgcttcgtcgagtgccggtccctgctgggcggtacgaccaccacacaggggctgagcgccagcggcaatggcggtaaacagtggtatcgcggtctgacccgcaacgtggaggctccgttgaacccggcctttcccgcggccggcggacaaacgctggactacaagcccagtgaaatcgtggaaaagctcgtgccggcgttgcagaaggaccggccattcttctaccacctgagcgaaggcaccgataaagacgctcggcaacggtttctggaccttcagtacgagcccgacacttgggccatcgataaagacctcatcgccatccattgcaccgggctgaagcccgaacacttccagcagctcaaggctgcggcaggcatggtgtggtcgccgttatccaatctattgctgtatggcgaaaccgccgacgtcgcggcggccaaagccacgggcatgccgatagcgctggggtctgactggtcacccagcggcagcaagaacctgctgggcgagctcaagattgccagaatcgtcagccaacatctgggaggcttgttcagcgatcaggagttggtccgcatggtcacctcctcccctgcccggatgctcggctggcatccgtacgtgggcagtcttgaagtgggcaagcaggcggattttgtcatcatcgaggggacgccccctgacccgtacgcccagttagtgaacgcacgagaggaccaggtgcttgcggtggtcatcggcggccggccgcggcacggccgtatggggctgctcgatttcgacgtgagcaagcaggagcgcttcgtcatcggaggcaaagactatgtgctggacctgaccgaagccggtgacgacccgttggccggcctgtcgctcagcgccgccatcgccatgctgaccgacggcctggccaggctgcccgagttggcggccaaagcccccgagccggccaccatggcctttgggcttctcgaacgccaggcactgtccatcgacctggagttcgaggaagaccaggacttccgccagcttcaggaatccatccgggaggcggcccccaagctccggccgctgcccatggcgcccatcacggcggtcgacgacccggatttccataagctgctgaaggccaacatcaaccttccgggctatgtgaaagccgcgctctag

SEQ ID NO: 323376 - DNA, 1734 bp, Pseudomonas aeruginosa
gtgacaaggatttgcaaagtcgagattcagaatttcaggtccattcgctctctcacctggtttccatcgcccggtctgaactgtctcatcagtcctggcgatagcggcaagagcaccattctggatgcgatagacctgtgcttgggtgcgcggcgcaccgtgagctttggagacaccgatttcactggactggatgtgacccagccaatccagattacgttgaccctcggctcgctccccgacgccttgaaggatctggacacctacgggaactaccttcagggattcaatccgcaaaccggtgcgctggaggaagagccgcggcaagggctggaatctgtgctggtgctgcgtctgctggtgggcagtgaccttgagccagcgtggacgctcatctcgcagcgtgcccaagcgcttggccaggagcgcaacatcgcctggaaggaccgcctgctgctggcgccagcgcgactgggtgtctacgccaacagcaacttgtcatggacacgcggttccgtcctgaaccgactctccgaggagcgcccagacctgggggcggaactcgccaatgccgctcgcgacgcccgcgccagcttcggcaaccgcgcaggcgctcaactggccgagaccctccagaccgtcgcccagaaagccggcgaactgggtgtcccggtaggggccggggtgcaggcgctgttggatgctcactcggtctccatcggtgacggggccatcgccctgcacaatgagcaaggggtcccgctgcgctcgttgggtacggggtcttcccgcctgcttgtggcggggcttcagcgagtggccgcgcagcgtgcctccatcgcgctggtcgatgaagtggagtacgggctcgagccgcaccgcttggtcaggctgctcgactcccttggcgccaaggagaatccgcccgtattgcaatgtttcatcacgacccactcgcctgtagccgtgcgggaactgagcggcaaccaggtgttcgtggtgcgagcaggagaccaaggccagcacgaggtccgccaggtcggtgtcgccaacgacgtgcaaagcacgattcgaatggacccagaagccttccttgcgcgcagcgtcatcgtttgtgaaggagccagtgaggttggcttcattcgtggcctggaccagtactggaccaacgacgggaaccgttcgctcctggccgccggtacggcctacgtcaatgcggggggaggaacccccgacttgagcttcgaccgtggcctggccctggctaagctgggctatcgcgtcatggtcttgattgatgcggacaagccaccgacgcaggaaaaggtcgacgcctatctggctgcggggggagcgctcaccacgtggagggccgatcgagctttggaagatgagctattcctgagcctccctgacgttggggtggacgctctgctcgcacgtgcggtcgagttccttgatgaagagctggttgaggcacacatcaccacgcagtctcagggccgtataactctggctggtcttagagcattgcgtcagcagggacagccgtacacaccggacattcgggcgacgctcggcttggcctctcgcaatcggagaaacagctggttcaaatcgctgaccaagttcgaaatactggcacgcgagattgtaggtcctaacctccctacgactgaagcaggctttgtaggcttgataaatcaagtcttcggatgggcccatgccgcctga

SEQ ID NO: 323377 - DNA, 1422 bp, Pseudomonas aeruginosa
atgccgcctgagtacgatctcttcgcctacgtccggggctccattactgccccggcaggctgcggcaagacgcaaatcatcgccgacacgttgacgatgcataggggccccaagcccgttcttgtcctgacccacaccaatgcgggcgtgacggcgctgcgactacgcatgcagcgcgggaatgttccggcctcggcctaccgcatcgccacccttgatgggttcgccatgcggttggtggccatgtttcccatgaggagcgggttggctcccgaggtgctgcagcttcgaaatccagccacagactatgttgccattcgccaggcggctttgcggctagtgaccagcggcgacctccacgacagcttggcggccacctacgctttccttatcgtggatgagtatcaggactgcaacctggtgcagcatgccttcgtcactgcgctctctgccgtcttgcggacttgcgttctgggtgaccccatgcaagccatcttcgggttccgcggcaacgctctggtggactggaacggtcatgtccttcagcagttcccgcaaatcggggagctcaatcgcccttggcgatggattaacgctggcaccgaaggattcgggcaatggcttctggagtgccgcaggacgctacaggcaggaggcagcattgacctgcggcagataccgcctgaggtcacctggactcagttgcaagctgctaccgccactcaacagcgcttgaatgcagcgatgacacgagcgcctacacccacagggcaagtgctggtgattggagacagtaggaacttcagggggcgccaccaaatggccagtcagatgcccggcgcaagcaccgtcgagccggtggaccttcgggacttgaccaacttcggggccgcgttcgacctacaggcagaaatggcgttgacgcttctggtgaattttgcggccagcgtgatgacacaagttggcacgtccacactcctgcccaggcttgacgccctgcgaaggcgcacggcccggaccccaccctcgatagcggaaggcgctctcatggcctttgcagctgaccccagttaccccagggcagccaatgctctacgcaccttggcggaccagcaaggtgcgcgtgtgtatcggcacgatgtctactatggctgcatccgggcccttgagatggccggttacggcacctgcacatttgcagaagcgacggtccgcgaacgagagcgcaaccgccatgacagtcgccctttggcgcgacgctctattggcagcaccctgctactcaaggggcaggaagcagaagtggcagtaatacccaatcctgaatccatggacgccaagcatctctacgtcgcaatgacccgaggttcagcgcgtctcgtcatctgctcggagacgccggttctgattccgcggccataa

SEQ ID NO: 323378 - DNA, 1884 bp, Pseudomonas aeruginosa
atgttgaatttcaggtggttcagaaagaagcccaccccgctcgtttccgcgcccacgcaggaggcaccagcgggattcctgtgttcgcaatcggccgaaaacctgctggccgcgccgcggcgacagttgctgcttgagcacatctggcagcgcacctcgctatcgagacagcagttcgggcagctgtaccggttgccattggagcgctacgccacgctggtacagcagttgcccgcctcggaaagtcatcaccacgcctaccccggcgggatgctggatcatggattggagatagtcgcctacgcgctgaagctgcggcagtcacgcttgcttccggtaggcacgtcgccagaagaccaggcggcacaggctgaagtatggacggcagcgacggcctatgccgcccttctgcacgacttggggaaagtcgcggtggatgtggaggtcgagttggccgatgggcaccgctggcatccctggcacggaccgctgacccagccttatcggttccgctatcgcgaggggcgcacgtatcgactgcacggcgcggccacgggcttgctgtacggccaggtgctggatgccgggattctcgactggctctgccagcaccaggaggcctgggcgtcactgctttacgtgttggcgggccagtacgagcatgccggcgtgcttggtgaattggtggtgcaagctgaccaggcatcggtggcacaggcgctcggcggggacccgaccaaggcgctggctgcgccgaaacaggcggtacagcgcaaattgctggaaggcttgcgctatctgctgaaggaagagttcaagctgaaccagcctcaggcgtccgacggctggctgacacaggacacgctgtggcttgtgagcaagaccgtctcggacaagctgcgtgcacatctgctggcgcagggtatcgagggcattcccagcagcaacactgcgctgtttaccatcctgcaggaccatggcatcgcccaggccacgacagacgacaaggccatctggaaggccaccgtgaccggcgccaacggctggtcgcacacctttacgttcctcaggctggctccggcgctgatttgggatgacgtgacgcagcgccccgcgccgttcgcaggcactgtggtcgtcgatgcaaccggcgccgaaagcccagagacttcggtcgagagcaacacaccgaccccgccactgccgccgccgcgaccgcgcgcgaccgatgcgggagatgccatcgacgaactgctgaacttgttcgatgcaccgccggagccaccggtggtctcggccgcatcgccgcagccgcccgcgcccagcccgcgagtgccaccgctcaggcccatggaccagaccgacccaccggagccaaccgagccatatgcgggactgcccgcgcctcagccctcggcgccggagtcagcgaatcgagcaccgaccccgccccgctccaccgcagtcggaaccaggccttcaggcgaacatttcgtgaagtggctggtccacgccgtccaaagccacaagctggtcatcaacgatgccaaggcgctggtgcatacggtggccgataccgtctacctggtaagcccaggcatcttccagcgctacgctcaggaacatccgcaggtcgcggtcatcgccaaggaaaccaagctcaatgaatggcaatgggtgcagaagcagttcgagaagctgcaactccaccgcaagcacgccgacgggctgaacatctggacctgcaccgtcaccggtccgcgcaagtcacgccgcttacacggctatttgctcaacgacccagccccgctatttgcggatcagccgctcaacaacccttatctcacgctgggcgatgaatccggcgttggccacagcggctga

SEQ ID NO: 323379 - DNA, 5139 bp, Pseudomonas aeruginosa
atgcgcagtgcccctgatgcccaatcgtggcgtccccctcaacaacaaccgtggtcgtggtctgccggcaactggacctggtcgttcactctcggaacggcgatatggggactgttctgggcctgcaccgcgggtgctcaggactatgaccaggtcattcgctcggaccaatccagcacagtgctgctgagcaagcctggcaactcggtgctcgtcgactccggcgtgaccatcgcgccagcatctggctccggcatctatggtcgcctgggcgaccgttggcatgtcaccaactggggaacggtgctggccagcctcggcgagagcgctgtccgcttgcaagacatcacaagcggagtctccaatcatgggctgattcacggcagcggctccgggattgatgctcgcagcgggctggatcttttcaacgccccgcgcgcggaaatacgcggccataccggggtcatcgcctgcaatgcgttgcgcttgcgcaactcgggaatgattgaaggaaggacagcaggcatttcctacacgccggacttccagggccagccctgggaagtggttaacgacggcctgattcaggggggatacttcggcgtcaggtcatcagccagtaccgattccgttgccgagggctcggtccacaatctggccggcggacgcatcgaggccatcggtccagccggcgtcggtgtctcggtgctgcatgcattcaacaccgtccggaatgacgcgggcggggttatcgaaggcacgcgccacggcatctccggcggcgacctgttcaccaagcttcatgtcgtcaacgccggctccatctccagccgctctggcgccggcatttggagctacggtggcggccctatctcgaacctcgccggcggcagcattgccggtgccggcggcgttgcctatgtgcgtagtcgattcaacccgaacaatgtcctggtcaacgccgggaccatcactgggaacggcgaaaggttcgtcgccggcaatggcacggacgcaggctcgggtactggtctctacgtcggcgcggtccatggcggaaccggcacgctcatcaacaatgagcgcggcggcgccatcgggggctccttcttcggcatctacagcggccctgcggccttggcttcggactcgggttcggtcacggtcatcaacgccggcagcatcaccggtcggactggcatcgcaatcaacggcgccgctggcgcgttggtgaatcggggaagcatctccggcagcgatggcaatgctatcgctttcgacccacttgaacccttccagaatcggttgacgctggataccggttcggtgctcaacggcaatgtgctgggaggacctggccgcaacgaactgattctgcttgggaccaatagcgaagacgccggcaagttccacgacttccagacggtttccatgcagggtatcgactggacgcttacgggcgacggtgcttttgggactgcaacccacgtgaacaccgggacgctacgggtagacggcaggctgaatacgccgctgacgcatgtgcatgctgatacgatgctggcgggatctggaaccttgatgggcgacgttgtggttgagggcgcactcgcgcctggcggtgccagccatccaacgtccacgctgacgatcgatggccgattgacgctttccgccggttcagtccttgattaccagttgggtgcagccgaccacccgggcggccaactgaatgatctgaccgtagtgaccggcgacctgacgcttgggggcacgctcaacgtgcgggcacctgccggcggtgcgttcgggccaggtctctatcgcctgttcaactatggaggaatgctgaccgacaacggcatggcgcttgggcaaatgccagcggggagcgatagcgcgctgcttacgaccatcccaggccaggtcagcctggtgaaccgtgccggcatccagctgagcttctgggacggcgacagtggaccggcatacaacggtcaggtcgatggcggggatggcacttggcaggcttccggcggcaacctcaactggaccagcgctatcggcaccgtcaacgatgactatgccgccggcagctttgccacgtttaccggaaagccaggcaccgtgacggtcgatgaccgctacggtcacattctctcctccggcatgcagttcgcaacgggaggataccggctacagggcgactccattggactgacgctgggcaacaacgtctttcgcgtgggggacggcaccgcgcagggccaagcacttgtcgccaccattgacgcgcctctgcacggcactggaggcctcgaaaagaccgacctggggacgctcgtactgtcgggcgccaacagctatacgggcagcaccctggtgagcggcggccggctccaggccggtgctgctggcatcttcgccagcagcgcggaaacaatcgttcagcgcgccggtacgctggacttgaatggccatgaccaggtggccaatcggttgtccggcgacggctccattctgctcgccggtgccacgctgaccatgaacaacgccaccgacggcctgagcagccgcttcggcggctcctttgtcgggccgggcgcattgagcaaggttggcagtggttcgctcagcctggctggtgccggctccgaggtgggggcggtccatgtccgcgagggtacgctgcgcttcgaacagcgcggcgccttcactaccgcaggtgacttcaccacccatgccggcgcgcgcaccgaggttggcgcgcgggcctcgacgctgcaagtggggggcgttttctcccaggcgagcaacgcgcacttggacgtaacgctgggcgcggcgccagacatcaccgcccgctccgcccgcttgggcggcacgctctccatcagcggtttcgatgcgagtgggcaaccggtacgcgccagccagatgcagggtcggctgtacacgatgttgcagacgaccgagggaatcaccggcagcttcagcaacaacccgctgtcgggcatcggcccggactatctgcccgccaccggcggcctctccgacgacggcaagcgcttcgatctcggattccggctcgcctgggcgcagggaggtcaggctctgggcaccggaaccttcagtctggcggcgaacacggcgttcgaggtggatatggccctggttgaccagccgggttcattcaatagcggctgggatggcaggagcctgaccaaggatggcgaaggtctgctggtgctgtccaacccggacaacagctacagcggcgtcaccaccgtcgcccgtggcgtgctgcggaccagcgcgacggacgtgttcgcaaagagcagcgccgtcacggtcagcaagaccggcacgctggatctggctggacatgaccaggtcgccaaccgcctttccggggcgggaaccatccaactgggtggcgcgaccttgacggtcaacaacgctgcagcagctgacagctcgacgtttgagggggtcatcttcggcaacggcgggttggtcaaggtgggctcagggtcactgacgctgctcggtccgatgcactatcgcggcgctacccaggttcagggcggccaactggtgttcgatggcagcctggccggcgcccggttgcacacccatgtcagcggccagctcggaagcgcgctgagcttgcgcaacggcgcattgctcaccagggctatggagcgagttgatgtcgacctcgacgccgccagcgcctggagcatcaacggccactcccacatcggccgtctgagcaatgctggctccatcgggttcgtcgcgccttctgtgccgatgacggagggccggaccctgacggtcacgtcgttggacggcatcggaggcaccatcggcctgcacacagtgctgggcggcagcggctcggtcaccgaccgcatcgtgattgacggggggcgcgcccagggccactcggtgctggaagttctcaacgctggcgggctgggcgaccacaccaccggcgacggaattccccttgtgactgccgtcaacggcgccaccactgacgcccatgcctttaccttgggaagtcccgtgctggcggggccgtatcggtaccaccttcagcggggcggtgacggcgcggccgaagactggttcctggtcagcggccgcgaagacgcgggtgcgtcacggcgtgagtatcgcgccgagacctccctctacagcgctctcccatcgcgggcggtgcgctacggcgagactgtactgggctcctaccacgagcgccgcggggccggcgccgacatgatgcccagcggcgggccacgtgcatggacgcgcgccattgcccagcgcgaccgtggcacgggctccgagcggacggtgcgaggtgatgcgcatctctccgcatttcagttcggcgccgacgtgtatgacggccagttccaggcgggctccgtgcgtgcagggctgtatggcgcgctcggccaaagccatggctgggccgaccacaccgacgctgccgggagccgcacgcgcgccggccatgttgatttcaccggctacagcttcggcctctatggaacctggttgaacgggcgcggcggctatctcgatggtgtcctgcaggccacgcgttacgaggccaaaagccgctctggccaaggcatgaagctgtccacccacgggcacggcctcatcgcctcgctggaagcaggccgtcgcgttgaactgacgcccaactggcacctgcagccgcaggcccagctggtacttcaacatctggatctccgtgattcggaggactcggcgggtcaggtgaaatttgccgatctggacaccggcttgcttcggctgggaacgcgccttagtcacgagttcggcatgtccgaccacaccccagcctcggtctggctcagcgcagacgtgatgcggcggttcaacgacctgacccgcacgcgattcgccactccaacccagggggacgtcaacttcgacaaggagctacctgggacaagcctgcgcattcaagttggcatcgagggtcaggtcagcaaacgcatcgctgtcgatgcgcgcctgggcatggaccaaagcctcgacggggttggtttcgacagcttgagcgggcaaattggcttgaaggtctcgttctag

SEQ ID NO: 323380 - DNA, 1413 bp, Pseudomonas aeruginosa
ttgagcagcaagaagacggtggtatatgcccccgacacgaacttcttcattcaatgcaaagatgcagccgaaattgaatggtctcgcgtaagcaatgcagacaaggtcttgcttgtcgtcctcaatgaggttcatcgtgaacttgaccgtctgaagagcggtggcaataccaggcgagccagaagagccaaggccgtcagcagtcagcttcgtgaccttatcgtttcagaccaagaagaggtcgagttgaggccatctggtcctgcggtcacgctcagactagctcccaggctcgatccacaacgcgccaaacctgatggttatgacgccgcgtccgctgacgagagaatcgccgaagaagcaaaggcttgttcggaggagcatttcgacgggaacctgattcttctatcgcatgacggaatgccactgcgagcggcgaagctaatgggagtccagatatgtcccattccagaagcctggctgttgccgccagaacctagcgaccaggaccgcgtcattcaaaagctcagcgagcgtctcgccgcactcgaaaggcaatcgccggtcatagagctccgtctggaagacccagatgaaacccgcatttctggaaaactgaccttctaccctgcactcgaagctggcttcatcagtggtgtcatggaggcactcaagaagcaatttcctgcccagccacccagtagagcggaagccgtaactacgcttgatcatattctccgtggaatggaacccgtgtggtcacaagcggacattcgcaagtacgaggcaaaacatgaagagtggacacagaaagtggaggacctgattacccgactgcctgaaatttgcaacttcgcagaaaatcgggttgaaacccacctagttctagccaatagcggttcaacgccagcggaacatcttgttgtagacgttttcacttcgggggcaatccgaattcaagagccggtggatgaagaagacgagatcgaggtcccccgtattccagagccgcccaagccacatcgagcggggatgtttggagtgctggctgattacacgacagaaccgttgctcaatccgctaaggaactaccactttcctacaccgcgactgtcgcgagatcgccatgaattctactgggagtttgataagccggaaatgcactcgcaacattgccgcggagaatgcgaggacttcaggcacggcctccaagacgagcaaattcctctaattttgcgatgggaatcacctggcgaacattcaatatctggcgcaataaaggtggttgtatcggcaaggaatttgcccgttcgaattgaaaagacgattccagttcgcttggatgtggaggttggtgactccggtgacctcatcaggtcaatcatcctggaagaccttggtgtgtccatctag

SEQ ID NO: 323381 - DNA, 1710 bp, Pseudomonas aeruginosa
atggcactctccgataccgccatacggcaagcgaaggccactggtaaggcgtatacgattggtgacacagacggcctttccttggctgtctcacccgaaggcagcaagagttggcatttccgctattactggcggggactgcaaaagcgcctttcattcggcacttaccccgaaatctctctcaaagaagcccgcacccaacgcgaccatgctcgcgaattggttgcccgcggcatcaatccgcgtaagcaacgagcgcaggcacgccaagaagccctgcggtcggaggagtacacctttcagaaggtgttcgaccagtggtttgagttccgcaagctcagcctgaaacccgggcggcaaagcacgcaggagcagattcaacgcatcttcaataaggacctcttgcccgctctagggccgctgtccgtctatgagattaggcgctcggacttgctggaggtgctggaagacattgagcgccgtagtgcctttacaacagccgagaagtgtcggacttggctccaccagatgtttcggtatgccttggtcaaggtgccggggctggagcaaagcccggcttcggacctggatgtggtggcggcgccgaagccgccggtgcagcacaacccgttcctgcgcatgggagaactgcccgagctgctccagaagcttcgtggctacaagggcaagctgcagacccaacttgggttgaagttgctgctcctgaccggggtgcgcacaggggagttgcgcttggccacgcccgaccagttccgcttggatgaaggcctatgggtcatcccgccagaagtggtcaagcaattgcaactggagatgcgcaaggaccgcaagcttcctggcgatgttcctccttacatcgttccgctatcggagcaggcgaaagatatcgtccgccatctgctggatgagcgtagaccggctcagaagtacctcctggcgcacaggagcgagttgcagcagcgcatcagcgagaacacgctcaatttggccctgcagcggctgggctatgccaggttgctgaccggacacggcattcgagccacgatttccacggccttgcacgaaatcggttatccaaaggtatgggtggatgcccagctttcccataccgatccggacagggtgagtgcgtcctacaaccacgccgaatacgtggagcagcggcggtgcatgatgcaagactgggccgaccgccttgatctttgggagcgtggcttgacggaggcagcggccatgcacctgaccttccaattggatcgcatgccgccggcacccattatcagttccaacacggacgtgccgagatccacgcatggtgtcatgccgctgacgattgccgcgctgactgcatcgagcagtcccgcgcaggatcctggcgcgatcaggctgcctgccatatccatccagccaccggcgcctgtgcggccggagcttgagatgacctccatacagcgtgaccgcgttgcacggctcgaagcatacgaagcgcctcataacctgccagttgtcacctttgccaagttgtccggcaagtcgcgcgaccaggtcaacagggatatcaaggcgggacgcctgctgtcgtttaccttcgggaaccggggccaaaggatcccagactggcaactggaccctcgacaccaagagctcacgcacgctgtgatggcgcaggcgcgtggccttgacgggtga

SEQ ID NO: 323382 - DNA, 561 bp, Pseudomonas aeruginosa
atgaatatccccaatctgctcacgttactgcgcgtcctgctcattccgatcttcattctgctgttctatctgccgacgtcctggagctacctgaccgccagtgccgtgttcgccctggccgccgccaccgactggctggacggctacctcgcccggcgcctcggccagagcacgccgttcggcgccttcctcgacccggtcgcggacaagctgatggtggcggttgcgctggtcttgctggtggaagagcacgccaacctgtggctgaccctgccggcggtgatcatcatcggccgcgagatcgtggtttccgccttgcgtgagtggatggccgaactgggggcgagggcgcaggtcgcggtgtccaacctgggcaagtggaagaccgcggcgcagatgctggcgctggtcattctcctggcgaatccgccgctgatgaccttctgggtgattctcggctacgtgctgctgatcatctccgcggcgctgaccctgtggtccatggtgcactacctgctggccgcgtggccgcatctgtcgaccaccccgaaagagaaataa

SEQ ID NO: 323383 - DNA, 1761 bp, Pseudomonas aeruginosa
atgttcgatgcggacgccaagcttctctacgtgggcaaggcgaagagcctgaagaagcgcctggccagctatttccgcaagtccggcctggcgccgaagaccgctgcgctggtggcgcggatcgcccaggtggaaaccaccatcaccgccaatgaaaccgaggcgttgctgctggagcagacgctgatcaaggagtggcggccgccctacaacatcctgctgcgggacgacaagtcctatcccttcgtgttcctctccagcgaggacgagtatccgcggctgtccctgcaccgtggcgcgaagaagcgcaaggggcgttacttcggtccctatccgagcgcgggagcgatccgcgagagcctcaacctgctgcagaaggcgtttctcgtccgccagtgcgaggacagctatttccgcaaccgtacgcggccctgcctgcaataccagatcaagcgctgcaaggggccctgcgtggggctggtcagtcctgaggagtacgccgaggacgtgcgccactcggtgatgttcctcgaaggaaggagcaacgcgctggccgacgagctgaacgtcggcatggagcaggcggcgatgcgcctggacttcgagaaggcggcggagttgcgcgaccaggtggcgatcctgcggcgggtccaggaccagcagagcatggaaggtggcaacggcgacgtcgacatcgtcgccgccatcgtcactcctggcggcgcttgcgtacacctgatcagcgtacgcggcgggcgggtgctgggcagcaagaacttcttcccgcaggtcgcgatcgaggaggaggtgggcgaagtgctgctggcgttccttggccagtactatctcagccaccaggagcgcgacctgccggcggagttgatcgtcaacgtgacgcacgaggatttcccggtgctggtttcggcgatcgccgaagcgcgaggccgcgaactggagatcagctaccgggtgcgtggtacccgcgcccgctggcagcaactggcggtgaccaacgccgaacaggccctgggcgcacgcctggccaaccgccagcatgtggcggcacgcttcgaagcccttgccgaggcgctcgacctggcggagccgccgcaacgcctggagtgcttcgatatcagtcactccagcggcgaggccaccgtggcttcctgcgtggtgttcggcccggaagggccgctgaagtcggactatcgccgctacaacatcgaaggcgtcacggccggcgacgactacgcggcgatgcaccaggcgctgacccgccgcttcagtcgcctgaaggacggcgaggggaagatgcccgacattctcctggtggatggcggcaaggggcaattggccatggcccaggaggtgctccaggaactggcggtcgccggtctgatcctgctcggcgtggccaagggcgtgacccgcaagccggggctggaaaccctctacctgaacgatgcctcccacgagttcaccctgccggccgattcgccggcgctgcacctgatccagcagatacgtgacgaagcgcaccgtttcgccatcaccggccaccgtgcgcggcgcggcaaggcacggcggacgtcgacgctggaggacgtccctggcgtcggcccgaaacgtcggcgcgacttgctcaagcatttcggcgggttgcaggaattgtcgcgggcgagtatcgatgaactggccaaagcccccggtatcagtaaaaagcttgccgagcagatttatgccgtcctgcacagcgagtag

SEQ ID NO: 323384 - DNA, 645 bp, Pseudomonas aeruginosa
gtgattaaggtgctggtggtcgacgaccacgatctggtacgcaccggtattacccgcatgctggccgacatcgaaggcttgcaagtggtcggccaggccgactgcggtgaagactgtctgaaactggcccgcgaactgaagccggatgtcgtcctgatggacgtgaagatgcccggtatcggcggcctggaggcaacccgcaagctgctgcgcagccagcccgacatcaaggtcgtggtagtcaccgtctgcgaagaggatccgttccccacccgcctcatgcaggccggcgccgccggctacatgaccaagggcgcggggctggaggaaatggtccaggcgattcgccaggtcttcgccggccagcgctatatcagcccgcagatcgcccagcaactggcgctgaagtccttccagccgcagcagcacgattcccccttcgattcgctgtccgagcgcgagatccagatcgccctgatgatcgccaactgccacaaggtgcagagcatctccgacaagctgtgcctgtcgccgaagaccgtgaatacctatcgctaccgcatcttcgagaagctctcgatcaccagcgacgtggagctggcgctgctcgccgtccgccacggcatggtcgatgccgccagctag

SEQ ID NO: 323385 - DNA, 1149 bp, Pseudomonas aeruginosa
atgaccgttcttatccagggggccgggatcgccggcctggcgctggcgcgcgaattcaccaaggcaggcatcgactggctgctggtcgagcgggccagcgagatcaggcccatcggtaccggcatcaccctggcgagcaatgcgttgacggcgttgtccagcaccctggatctcgaccggctgttccgccgtggcatgccgttggccggcatcaacgtatacgcccacgacggttcgatgctgatgtcgatgccttccagtctgggtgggaattcccgcggcggcctggcgttacagcgccacgaactgcatgcggcgctactggaggggctggatgagtcgcgcattcgggtcggggtctccatcgtgcagatcctcgacggactcgaccacgaacgcgtgaccctgagcgacggcactgtccacgactgttcgctggtggtcggtgcggatggcattcgttcgagcgtgcgacgttatgtctggccggaggcgaccttgcgtcattccggcgaaacctgctggcgcctggtcgttccccatcggctggaggacgccgagctggcgggagaggtctgggggcacggcaagcgcctcggcttcatccagatcagcccgcgcgagatgtatgtctacgcgaccctgaaggtgcgccgggaggagcccgaggacgaggagggcttcgtaaccccgcaacggctggccgcccactacgcggacttcgacggcatcggcgcgagcatcgcccggctcataccgagcgccaccacgctggtgcacaacgacctcgaggagttggccggcgcctcctggtgccgcggacgggtagtgctgatcggtgacgccgcacacgccatgacgccgaacctggggcagggcgcggccatggccctggaggacgccttcctgctggcgcgcctgtggtgtctggcgccgcgcgccgagacgctgatcctgttccagcagcaacgcgaggcgcggatcgagttcatcaggaagcaatcctggatcgtcggccgccttggtcaatgggaatcgccctggagcgtctggctgaggaataccctcgttcgcctggtgccgaatgccagtcgcaggcgcctccaccagcgtcttttcaccggtgtcggtgagatggccgcgcagtag

SEQ ID NO: 323386 - DNA, 1029 bp, Pseudomonas aeruginosa
atgagcccgtccgaaaacatccagtacgatttcgagtggcgaccactcaacaactacctcgccgtgcaacgcatcacgcctccggacatgcgtcagggttcggctgccgagccgcgcctgcccagcgaagcgctctacgagtggatcgtgctgaacggacgctcccccctggaaggcctgagcctgggggagcactaccgcctttccgactacggcgtcgccgggctggcattgcagagtgccggcaccgtcggcgaagccttgcaactgatcaagaccaacatgctgctgttccgcaaggatatccgcgggatcgcggtgcgacgttccagttgcgacaccgtggatgtggatatcgacctgcaggacaagccggactggccgcagtcggcccggctgtatcacgccaacgtcctggcgtcggccgcctacgcggtgttccgcgacctgctgctgggcgagctggaactggtccgcctgcgcctcccggaaaggaacggcgacgtgcgggcatacgaggagtatttccgggtgccggtgtatttcgccggcgcaggcatcaccttcaccctccccgaggaattgctcgaggccgagatcgccactgccaactccgccgtgttccaggcctcgctggcgctcggcagcaaggccttcaacacccgcgtcacccgcgagatgggcggctaccgccaacgcatcgtggcactgctggaggtgctacaggaccgctacccgagcatcgcctgggtcgcccggcagttgaaggtcaccgagcggacgctgcgccgacggctcgccgacgagggcaccaactaccgggaagtgctcgacctggtccgccacgacagggcgcgccaactgctgcgggacgagcgactgcgcatcgaggaagtcgccgagaggctgggctacatggatacctccagttttcgccacgccttccgtcgctggacgggacagtgtgccaacgactatcgccaggcccgcctcgccggcaagaccgcgcggcgccagggcgaacgctag

SEQ ID NO: 323387 - DNA, 777 bp, Pseudomonas aeruginosa
gtgggcgggccgctgggcctgctggtcggccaccagagcctcgaagcgtggggctggcgcggcgctttcctggtctacggcgtgctcgaactgggcctggcgctgccgctgctggcctggctgttccgcgagccagcgccggatgctggcgtggccgccggcacggccgtagcggaaaccgcgctgagcggatcgacggcgccccaggcctggcgcagcgccagtttctggctggtgctgggcaaccaggtactggcggtgttcgtgatgtccgggatcatgacccatggcgtgccgatgctggtggagcgcggtttgtcccggggcgaggcgggcaccgcgctgtcggcgttgtgggtcggcatgatgctgtcgcagccgctgatgggctggcttctcgaccgcgtggcgacgcctcgggtggcgttgcccttcgccctggcggcggtgctcggcatggcctggttcctggtgggcgacacaccgagcggtctatggctggcggtgttcctggtcggcctgggtggaggaggggaaagcggcaccaccaagtacctgttgatgcgctacttcggcctgcgcagcttcggtgtgatctacggttcgatccagccgttcaccttcgccctgtcgatcagtctcggcgcttacctgctgggctggctgtacgaccgcgccgaaggctacgggacggccgaatgggtgctgctcgcggctttttccctggctgcgtgcagcctgttcgcctttcgcccctatccgcagaaattgccctga

SEQ ID NO: 323388 - DNA, 273 bp, Pseudomonas aeruginosa
atggaagagtctggaatagtggggttcaccgtcacaggtgctgtggagaaggtcacggacttccgcaccgcgccgttctgctcgcaggcggtcttcgcccaaatgctgggcttggaggacatcacggaagacgtggtgcggggctgggtggagaccaagacgatcccgactgccaagattggccgtcgccgcgtggtgaacctgcaccgtattcgccgtgacctcgaccggggcaaatcgatcttctgccagggtgattacgatgccgagtga

SEQ ID NO: 323389 - DNA, 672 bp, Pseudomonas aeruginosa
atgataaaggttaagtggcttcgattttccggtgggttaaactctaaagatgttgtaaaaggactgaagcgcttggaatattcctctgcgggggtggatggattccaaattgtaaggtttcgtgaggaatatgttgaaggtaaatatattgagcgtgttgagtatgaagaggtagtgaaggatccgtttggtggtgaacttgtttcgaatcgtgttatctataatcaagtggacttcactatttcactggactccagagtcttagagctactatctccacctcgaagcttagttaaatttgttacgaggctaggggaggcttgtgactttaacgtgtcagtggagccactgtttctagatctagggtcatttggtgataggcttgagtttataaagtttaatttttttgaaaagtcaatagtggtatctgatctacttcttgcggcaggggtcttggccagggttgttgcaagaggaaaggcaggggttggtgatgctttggctcaggtaattggagaccggccgtacaaagtaaactctatatcatattcctcaaataatcctgatattagggcgtcctttagtatttcttccgattgtgcgttaagagtgagtggtcgagattcagtaagggttgtttctgaaattaggacgtttcttcagagtgtttag

SEQ ID NO: 323390 - DNA, 1125 bp, Pseudomonas aeruginosa
atgaatgataaaaaaaatcctttgtatttttgcgctactgataaagaggtttatgatgttttaatgtcaggtaagcagcggttaacagatagcgttttgcttgatctcgcaaaagataggggaatattctactcccctaatgaaagccgggatgagctttctgagattatgtctctactcacctatgactattatgacttgcaggttttgcttagccgtcgtgagcaaaagtcgcgaggagagaagctccaaagtattgttttggacgggaagctaagtattgatgaggtaagaactgttgctatggagtttgagagcagtcctcccacagatgagaaagttaaggtgggttgtgagagagacaaaattaatgttcaggtggagtactcagagcttaagtatgaaaaaagtaggctaatgcaaagggtagttagagaagcaaatattgaatttgaggttggaactgactcaaccatacttcgttttcctgcaaatgcaaagggagagcagcttgcggagaaactaaaaggtcggattgaagagaaacggaaggagaagcttcctgttgttcgtattgatcttagtgatttggttgatcatgatgcgaaaacagagttctttacgcgtttaattagaggtgttcctggctttaggctgagtaatgttacaaatgtgagggttgaatctagtcagcaaaacggtggtgatgatgatgatgatgatccctctgaaataaccgatgaagctcgtcatgaaatgcttggtgtagttaggaatgtagcattaaaaggggagagtcttcttacgtctaagcagtatcaagacctgaaaagcggagggttttatatagcatcaattatctggcgctccgataagacttcgggagataaggagagagtggagttttttgcgggatttgaaaagccagagagaggcgagggtttctcattttctatacgtggtatttatactttaaatggtcttgactatatttctaatagtaagaagccgaaagaggaggataaaaaactttatgtgtcattgattgaaagcacagctttgagtgtgcttaaggaattgcgtcaagagcaagatagcaggttaaaatctagtgggggtagttaa

SEQ ID NO: 323391 - DNA, 978 bp, Pseudomonas aeruginosa
atggctgaaacagataatatagcaaaaatggcggagattttatctgatgaactattttctgagtttatgtggaatagggtggggccttttaatcggaattgggcttgcgaagaaagagagtcgcataaagtggatactcatccatccgatgttgttttctggtatgaggagccgtactcgatatatagaacttatgtgaactgtgatttaaagagttataaaaaagaaactattactactgagaaggtcaaggcggcggtagtaagcttggcgaatagcttgggatgtgctgagaaaagtatagactggcagtcggagtacactcatccccatgtgtctaagaaaatttgcggacttttatttatttataatcatgatggaaggtttgatgctgatttttctaaaagaataaatgtgataagtccagagagcttaagtatacctaaaggctcaaagttggttgttatggggcctgatgatatccgctggctgataaatgttaaagatgaaatagtcaggatgagggggctccaaaggctgccgcctagagaacagtgtgagttctattaccctcatttagtcagaaagaataatctgaagtttgataaagctccagctgctacattagaaatgcttacttcttcatggttcatacttagagcctcttttgaaaagggtgggttaaaaaataattacgtggtgttttataggaggaaaggctatgaggtggctgagtttttatatttgttggattgtttagctcactatcagatattagtggcgggaaatgttgttggtataaaaatattatctccccatgagtcggcagccgcaaaattccaattggcagttgatgagtatgctgaacgctgcggaggcggtgaaatggaaaaaatcttaaaagatataaagtttgaaaaaatgagcaaggtgactcaagagttctctgaggtagagataggtatgagagatgaatga

SEQ ID NO: 323392 - DNA, 306 bp, Pseudomonas aeruginosa
atggctaccaatggtatgcgccccatccatcctggggaaatattgcgcgatgagtttctgatggagttggatatctctccagctgctctagcacgcgctttgaaagtctccgctccgacagtgaacgatatcgttcgtgagcagcgtggtatctccgcagatatggcgattcgtctggggcgttactttgatacgtccgctcagttctggatgaatctccagagtgagtattcgttagcaactgcttatgcggcgaatggcaagcagatcgaacatgagattgagccgctgcttgctcacggatag

SEQ ID NO: 323393 - DNA, 2229 bp, Pseudomonas aeruginosa
atgccccgctccatccctttgcgcccggctcccctggcgctttccctgtccctcttcgcttcgttttccgctcctgcgctggctgccgatccggtggagcagcagatggtggtgatcggctcgcgcgcgccgaccagcatcagcgagttgcccggcacggtctgggtgatcgagcgcgagcaactggaccagcagacccaggccggcgtgccgctgaaggaggcgttgggacaattgatcccgggcctggatatcggctcccagggtcgtaccaacaacggccagaacctgcgcggacgcagcgtactggtgatgatcgacggggtgtcgctgaacagttcacggggcatcagccggcagttcgactccatcgacccattcaacatcgagcgcatcgaggtgatgtccggcgccagcgcggtgtacggcggcggcgccaccggcgggatcatcaacatcgtgaccaagaagggcgtcggcggcgacactcgcttcaacaccgagctgggcgcccgcagcggcttccagagccatgaggaccacgacctgcgcgcggcgcagtcgatcagcggcggcaacgacctgttcaacggccgcctggccatcgcctaccagaagaacggcgcggcctacgacggcagtggcgaccaggtactgacggacatcacccagaccgacctgcagtacaacaggtcggtggacctgatgggcagccttggcttcactttcgccaatggccacagcctcgatctcggcctgcagtactacgactccggctacgacggcgaccgcggcctcgatcttgggcgcaacttcgatgccctgcgcggacgggcaccctattcgatcaagggcggcgtcgacctcgaccgcgagccggagagcaagcgccatcagttcaacgccacctaccacgcgccggaagtgctgggtcacgacctctacctgcaggcctactaccgcaacgagaagatggccttcaatcccttccctaccatccgctacagcaataccggcgcgatcaactacggcacctcctactactcggcctcgcagcaggacaccgactactacgggatgaaactggccctggtgaagacctgggagcgcgccagcctgacctacggggtggacctggaccgggaaaaattcacgtccgaccagatgctcttcaacctgccgctcgccgccgccagcggcgggctggtagccagtgaacaggccaagctgggccgctacccggacatcgataccgacagccgcgccttcttcctccagggcagttggaaggccaccgacgacctgaccctgagcgccggcgtgcggcgccagtcgatgagcaccgacgtcagcaacttcgttgcggcgaaccagcagatcctcatcgccaacggcctcggcaagaccgccgacgcggttccgggcgggagcaaggactacgacgtcaacctggtcaacgtcggcgccatctacaagctgaacctgcaacaacaggtctgggccaactacagcgaaggcttcgagctgccggatccggccaagtactacggtttcggacgctacggcgcagccgacggcaatggccactacccgctgttgcagggggtcagcgtgaacgactcgccgctggacgggatcaagaccaagcaggtcgagctgggctggcggcacaccgacggtgccctggatacccaggtggcggcgttctattcctggtcggacaagagcatcaagtacgactcgaagaccctggcggtgctgcagcaggacaccaagaagcgcaactacggcctggagggccaggctacctactggctggacgatcactggcaggtcggcgtcaacggcctggccatccgctcccaggagaaggtcgacggccgctggctgaagcaggacgtgacctcggccagcccgtccaaggccggcgccttcgtcggctggaaggacgaccagcgcagcctgcgcctgcagggcgtgcgcaccttcaacctgaacgacgagccgggcaacaagatcgacggctacgcgctgttcgacctgctcggcacccaggcgctgccggtgggcaccctcaccgcgggcatccagaacctgctggacaaggactacaccacggtctggggacaacgcgcgcaggtctactacggcgggctcgcaccagcgggactgttcgactacaagggacgggggcggacctacagcctgacgtatagcgtggagttctga

SEQ ID NO: 323394 - DNA, 648 bp, Pseudomonas aeruginosa
atgagcgacttgcagcaactgttcgagaacaacgtccgctgggccgaagcgatcaagcaggaagacccggacttcttcgccaagctggcccgccagcagacccccgagtacctctggatcggctgctccgacgcgcgggtgccggccaacgaaatcgtcggcatgctgcccggcgacctgttcgtccatcgcaacgtcgccaacgtcgtgctgcacaccgacctcaactgcctgtcggtgatccagttcgccgtcgacgtgctcaaggtcaagcacatcctggtcaccggccactacggctgcggcggcgtgcgcgcctccctgcacaacgaccagctcggcctgatcgacggctggctgcgcagcattcgcgacctcgcctacgaataccgcgagcacctggagcagttgccgaccgaggaagagcgcgtcgatcgcctctgtgagctcaacgtgatccagcaggtggccaacgtcagccacaccagcatcgtccagaacgcctggcaccgcggccagtcgctgtccgtgcatggctgcatctacgggatcaaggatggcctgtggaagaacctcaacgtcaccgtcagcggcctcgaccagttgccgccgcagtatcgcttgagtccgctgggcggttgctgctga

SEQ ID NO: 323395 - DNA, 1239 bp, Pseudomonas aeruginosa
atgtgcgacaccctgatccttcgccaccagggccagacctggttcgccaagaacagcgaccgcgagcccgccgaaccgcagcgtctgctgcgcctgccggcggtgcgcaacgatccggaagcgcgcttgcgcaccacctacctcgacattccccaggccgcccagcgacatgcgctggtgatcagccagccgagctggatctggggcgcggaaatgggcgtcaatgagcacggcgtggccatcggcaacgaagcggtgttcaccaagctgacccgtcagcgcggcaccgcgctgctcggcatggacctgctgcgcctgggactggagcgcggcgccagcgcccgcgaggcgctagaggtgatcaccgggttgttgcagcgttacggccagggcggcccggccggctaccgcgacaagcgcatccgctacgacaacagcttcctcatcgccgaccccggcgaagcctgggtgctggaaaccgccggcaacctgtgggcggcgaagaaggtcgagcgctgggccatctccaacgccctgacccttggccacgaattcgacctgtgcagccgcgacctcgaggaccaggctcgccgccagggctgctgggatggtcgcggcgacttccacttcgcgcgggtcttcgacacccgcctgctaccctgggtcggcggcgcgcaccggcgctgtcggatcaaccagcgcttcctcgacagcctgcctggcgagccggactggcacgcgctgttcgccgcgctgcgccaccatggcccgcgcggggaccacttccgccgccacaacaaccgccaggtatgcatgcacgccggcagcttctggcggccttcgcagaccaccgccagtctggtcgcccgcttgcgcgacgacggcccgctgctggccgccaccggtacttcggcgccgtgcctgggactgttccagccgctgtccttcgatccggcctccggcgccgccgtgctcagccagccgcgcgaggcggtacaggagtccccctggtggcgcttcgaggcggtgcaccgccgcgcgcttaccgaccgcgccttccgccggctcctgcgcagcggccgtgattggctggaacgggaactcttcgccgacctcgaacagcccgactggccgcgcctggcagaggacgccgcagcctggcacgcctgttggcatgatcaggtcgccatgcagccgctggcgcagcagcgctggtggcgtagccacgccgcgctgtga

SEQ ID NO: 323396 - DNA, 453 bp, Pseudomonas aeruginosa
atgagcgatgcgatttccttccgcccgatgaccgaggcggacctcgatgccgtgctgaaaatcgaatatgccgccttcagccacccctggatccgtggcatcttcagcgaaggcctgaagaactaccattgctggctgatgttcgagggtagccagcaggtcggccatggcgtcatccagatcatcctcgacgaggcgcacctgctgaatatcacggtgaagcccgaaagccaggggcgtggcctcggtctgcgcctgctcgaacacctgatgcgcgaggcggccggccaccaggctcgcgaatgcttcctcgaagtgcgcgcttccaaccaggccgcctaccgcctctacgaacgctacggtttcaacgagatcggccgccgtcgcgactactaccccgccgtcggcgggcgcgaagacgccctggtcatggcctgtaccctgttcgactga

SEQ ID NO: 323397 - DNA, 798 bp, Pseudomonas aeruginosa
atgcagataaccagttggctgccccgccagccgttgccgttcgccgcaccctcgcggccggagttgctggagaccccgccccgggaagagccggcggtgcctgtgcgtgcgcgcgccgcgatcgatgcgccgcaggcccgcgtcccgcaagccgaggcgccggccagcgcgccgagcgtggctcccgccgcgcccgtggaaggccgggggatcccgatcagcctgccgaagccgggcgccccggcggcgaagaaagccgagccggtcgcgccggtcgaagaggccccggccgagccgccggcggtccaggccccgccgccgcgcttcgccttgcaactgctgcaggcgggctcctgcaccctgctggtcgaactgcccaccggcgaacccttcgccagccgcgatccgggttacctgctgctgcgcgacctgctgcgcgccgccggcctgccggacagcccgcggctgatcggcgaaccggtacgctggccgctgctggcgcgcggcaacctcgaccaggggccgcaggcggccctggagttcgtccagagcttcgtcgccgcgcgcatggaggagagcgagcgtagccgctgcctgtggttggtcggcctgccggcgatccgcttcgccggcgagggcgacgagggcagcctgttccgcgagctgcaggtggacggtctgggcgcaacctgggcagtgccgggcctggaagccctcatggaagaacccgccctcaagggcgagctgtggcgcgccatgcgccgtgtccgtcagcgctggtcgagcgagattcaatga

SEQ ID NO: 323398 - DNA, 537 bp, Pseudomonas aeruginosa
atggccaagcagactcatccactggcaggcggcatcggcatcctcgcggcgctggcgctgctgttcagcgcttcggccggggccgagttgcgctcgctgggcgatagcgatctggacgacgtggtcggccaggccgggatcagcatcagcgcctcgctcaatctccaggaaaatccttcgcagacgcgctgcgccggcggctgcggcgcgcgcctggcgatccagccggccggcagcggcaacaactacctggtgatcgacgatatcagcggcaagttcagcttcgacgaagtcaccctggacgtggtgaccatcaaggacggcttcggcggcgacggcgccgccttcaaccgcccggtgctgcgcgtcggcctgaaggacaccagcttccaggacctgagcttcaccatcgctggcgccaacaaggcgcgcggtaccgatcccgggctggtgcagaccaacctggtcagcgcacgcatcgacggcaccctcaagctgcagggcaacgtcaatatcttcaccgtcgccccgcgttga

SEQ ID NO: 323399 - DNA, 1020 bp, Pseudomonas aeruginosa
atgagtcgcgcctgcctgctcgcggccctgctggccgcccccttcgcccatgccgagatgacagcgctcgacgacgagcaactgtcggacgtgcagggtgccggcatcggcttcgtcctcgacagcgccatggtcgacggcaacaaggccaccatcgcgatcaatggcgtgaccaacaccgccaccgggcagaacgtgccgatcacggtaaaggagctgtacgtcgccgccactggcagcaacaagggcagcaccctggcgccggtgactctcggccgtctcaatttcccgttcaagctgaatctggccaagggttcggtgctgaccacccagctcgacgacgggcgggtggtcagcaccttgccggacaccgcggacgtgatcgagctggctttccccagcctggtgagcggcgccggcggccagccgtgcatcgctggttacgccggtgccggcagcaactgctcgagccgggccagcgaaaaggtcgacgccggcatccgcttcgacttcggcgtcacttccacgcgcaccgatgtgctcaacctggacttctccgaactggcgatggacggttcctacctgcgcttctggggcgccaacgcgcgcagccaactggttggcgagatgcgcctgaacctctacgccaagactttcgagatcatgtcctgcggtgctggctcgcccagttgcgtcagcgccgccgagcaggccgcgcgcaccgtctacctgaccaacgcctatgccagcgtcgcgcttggctacgggaagtcgcagccgttgctgttctcggtcaccgccgacggcaacttcactttcgaactgcccaagctgaccctggccaacgccgctgacttctacgccaatgcgccgcgcaccagcctggtgatcgagaacctcaacatcggcggtacccggccaggctacgggcaggtaccgaccggcggctacaacatgggccgcaacgagatatccgggctcagcttcaactacctgaaggtgacgtcgcacaacctctga

SEQ ID NO: 323400 - DNA, 1047 bp, Pseudomonas aeruginosa
atgtcccgtcgtctgcccttcctgctgcgttgcgcgctgttctgcggcgccggtctgctggctgccaccgcccaggcgaggatggagtcgctggacgacgaccagctttccgacgtggtcggccaggccttcatcaacctcaccaccgacgccgccaacggactgaacttcacccgcatcaacttcggcgccgacatcgagacccaactgaacatgaagaagctgcagttgggccagtacaaccgcagcggcgagcttgccggcagtgccgacatcgccatcgacaacttcgccctgggcacggtcaacgacaccaccggcgcgatcaacccgttcctcatcagcaatccctacatcgagttcgcctacgacggcagcaagatggtcggcatccgtatcggtttcggcgaagccaagggctacctctcgggcgatatcaagaccctcaccggcaacgtgccggtggacctgtacggcaccggcagccaactgggaggcagcatttcctgcggcctgctggccctcgactgcctggcggcgaagaccgccatcactctcaccggcagctctcagtacaccgcccaggcagagctggtgaacagctccggcaaccccgacccgatccgcgctgccatgatcggcctgaagaacggcacggccctggacatgcacgacagcaccatcatcggcagcctggtgaacgtcctgctgcccttcctgacctccaacgactgcaagctgatgggcgcccagacctgcttcaacctggcccagtaccagtcgttcccgatcggcaccgtggatccgaacaacgcgcagaacttcatcgactcgtcgaaaggcttcttcatctcgatgcagagccagaacgtccagtggcgcgaccagcaggatccctccaagctggtcgccgcgctggccggtgccttcctcaacatgtcgcgcaacgccgatggaacggcgccgatcaaggtcgacttcggtcaggccttcaatggcattccacggcaggacacctgcctgggcggcctgaacaagggctgctga

SEQ ID NO: 323401 - DNA, 603 bp, Pseudomonas aeruginosa
ttgaacgacgccgcctacgccgaggcccgctgggccgaactgcagaaccagggtgaccttgcctgggacctggatgccatcaccaaccgcagcgaggcgatcgccttcctcaaacgtttcgagaaccgcctgtgcatctactcggcctatgtcgagaagctctacagcaactacagcttcgtgattcccgagagcgaccatggcggcatcaccatcctgcccagcgagcaggcctggcacgacaccttccacgatatcccgctggccgcggtggagcccaccgggatccatatcctgccgggcgagaccatgggctatcgcgggctctacctgaagattcccggcgagcaccgcctggtggcgtcgaaggaattgccgttccaggaagggttgaaactgctgatccagcgttaccaggctcacgacgacgtgttcctgccgatcctggtcaagggcgacctgcgcgagtacgaagcgcgcatgccctcgctacacctgcaccggatcaaccccgcccgcctcagcgcacactccctgctcagcctcaacgccatcaagggcgccatcgccgaccatctgatcggcctgttccgccagcagtga

SEQ ID NO: 323402 - DNA, 1299 bp, Pseudomonas aeruginosa
atgatcgacccccgacgcgtactgcgtgcgcttgccgaacactgggccctgctcgagcctctctgcgagcgcttcgatgccggcaccctgagcctggcggaactgcgcagccagttgaacacccagttaccggaaagcaacccggcggaaatcaccgccctgctcgaccagtggatccgcctggatatcctggtcccggtggccaagagccccaaccgtttcgagctgaacgcgcagatccacgacttcctcgcctacctgcgccacgagcatcgccttggtctgtgcctggagatcgaggcctacctgcgccatctggagcgcctcgccgggtacatccaggacgccttcgagacccgcgacagccaggacctggcgcgccagctgcgactgctcgacatgcgcgtgcgcgatgtactgaagaagctcggcaatgacgagcaggcactgatcggcgtggccgagcgggccaagaccagcgaccggcagattcccctggcgcagcgctacgcggaggtcctggcgacctgggacgagtacgtcgagccgatgatccaactggtcagcgccgacggcgccttcgagcagggcgtgcggcgggtcgaacaggtcctgctgcgcctgctcggcgaacagcagcgcctcggccacctggtcgacgacgacctggtgctgcgcacccacgcgcgcatcctcgagatgcagaccaacgcccagctgaccttgcgccgcgcccgcgaattattgctgccgctgcgcgaggaagcgcgccggcacaacgcggtgacccgtggcgccgccctggcgctggcggcgatccggcgcaagggcctggatgccgtgccgcaggcggcgatgccgctgttcacccggccgcagagcaccttcctcggcaccgcctcgcaggtcgagagctacgtcttcgccctcgcccgcttcgagccgaagccggcgcagttccccaagtccagcggcacgcgcaagagcaacgggccggcgcgaccaccgcggaccgcgcgggaaatgatcgaacgctgccaggcggcgctgccgctgccggacctcatgcaatggctgctggcccaggaaccggacggcgccaccgacgagttgctctactggttctcccggctgtcgcgcgacgcgcgcttccagcgcgaacgcctgcaacgccgcgagtacgaaaccaccgaacattgcgtcagcctctgctccttcgccctgaaccccgccgccaaggacaagggccaggccagggacgcagacaccctttccgcgagcgaaacccatgcatcttga

SEQ ID NO: 323403 - DNA, 696 bp, Pseudomonas aeruginosa
atgcatcttgatctctccgaactgacccagctcgcgccaatcttccgcgagctgttcaagggctaccacatcagccaccgcgaccccgagctgtacacccagctgtcctcgcaccaggaccagtaccgcggcctgttccgcgccatgggcttcgagctggtctgcgacacccgcggcttctactacttcgtcccggagcaggtcggcgcccaggtgaacaagaccgcccaacgcctggcgctgttcaccttcatcctcgtcgaacacctcgccgaccagggccgcgacccgctgtccgtgctggacggcggcagcatcggccgcgaagagctgccgccgctgctggagaaataccgcgacctgttcctccaggccgaggtgcagacccaggaagaactggaagagaaggtcatgcgccgcctgacccagctcggcttcgcctccgaggacagcggcgtgtaccgcttcatgccgccgatgcaccgtttcctcgacgtctgcctgtcggtgcagcaggaccgcaacctgtccgccagcctgcacgccgacctgccgttgcagacgccggtgctggtcgatgacggcgagatcgaaccgctgatggccagcgacgaagaattgtccgaagagagcgaggaagacgctctcgcccgcgccatcgccgaagaacacgcgcaacaggaggctgacgcatga

SEQ ID NO: 323404 - DNA, 2847 bp, Pseudomonas aeruginosa
atgagccagacccgctacggcatccgccgcttcgccctgctcaataccgccggctacagcctgggtatcttcccgctggaaaacccgctgtcgatctacggcgccaacaacctgggcaagagcgcctcgatcaacgccctgcagttcccgatccttgcccgcctgtcggacatgagcttcggcaagtacagcatggagcagtcgcggcgcttctacttcgcctcggacaccagctacatcctcctcgaactgatgctgccccacggtccgcacgtgatcggcgtggccgggcgcggcccgggcggcggcttcggccaccagttcttcgcctacgccggcgagctgagcctggaccactaccagaagaacggtacctgcctgcgccagcgcgagctgttcgccaaccttgagcgcgaaggcatcaaggcctacgaggtgaagccggaagagctgcgccgcctgctggtcggcgggcacacgtcgatcccgctcgacctgaccatgatcccgctgcgctccaccagcgagcagagcctgaagaccttccgctcgctgttcatcaacctgctgcacatgcgcgagatcaccgcggccaagctcaagcagctgttcctcgacgccttcgagcacagcctgcgctcgggtaatgtcgactacatcgccgcctgcgaggaggccttccgcgacgtgcggcggatggagcaggactaccaggcgctggtcgccgccggcccgctggtggaagccctggccaacggcgtgacccagcgcgacgtactgcgcggcaagatgcaccgcctttcaccgctgctcgacagcctgctcggcacctggcacgactacgccggggcgcgccgcgaggaactgctgatccagcacgagcaataccgcgccgagcaggacggcctgcagaacgaacagcgtggcggcacccaggagctgatgcgcctggagcgcgagatcgccggcatccagcgctggctcggcgagctgtcggtgctcaagacccgcttcgccctggtcgacgacgccaaggtcctcgaacaacagctgctcgccgccaaggatgcccacgacgaactggccggcgccctggcccattcgcggcagttctccagcgaagacctggaagagcgcctgcgcgacctggaaaaacgcctgaagaacgtccgccagcagctcgaacacgccgacaacaacagctacgcacgcctgcgcgaggagttcagccagcaggacgtggaacgcctgatgcgtctgttcaacggcgcgctgttcagcctgccgctcggcgagaacggggtgaacctggatgacggcgacgtctgggtgaagagcgtcgaagccatcctcgaccacttcaagggcgagcatttcgaagcccctggcctgagcatcgacctgtcgcacatcgaaccgccggcgttgcaggccctggccgaccgcgccgccctgcgcgaccagaaggagcgcctggagaaggagctgaagcagctcaagacccagcagagcgtcgccgccgaccgcgccgcgagcaaggcccaggcagagaagctgtaccaggacgtgctggatgcgcagaaggccctggaagacttccgccgcacccagacgctgaccgccgaggagcccgagaagctcgccgaactggcccagctggaggcgtcccaggacgaactcaagcgctccagcgacgccttcgccgagcgcgtccagcaactctccgcgcgcctgcaactggtggcccggcaactgggcgacctggaggccaaggagcgcaccctggaagatgccctgcgccgccgccagctactgccggccgacctgcccttcggcacgccgttcatggagccggtggacgactcgctggacaacctgctgccgctgctcaacgactaccaagacacctggcaggcgctgcagcgcatcgacgggcagatcgaggcgctgtacgcccaggtgcgcctgaagggcgtcgccaagttcgatagcgaagacgacaccgagcgccgcctgaagctgttgatcaacgcctacgcgcatcgccaggacgaggccctgacgctggccaaggcgcgccgcgcggcggtcaccgacatcgcccggaccctgcgcaacatccgcagcgactacgacaacctggaacaccagttggccctgttcaaccgcgagatcaacaagcgccaggtttccaacctgcagagcttccgcatcgtcctcgcgccgaacaaggatgcgctcaagcacatcgaccagatcatccacagcgccggccagtacgaggaaggcgagaacctctcggtgttcgacctgacccagagcgccgagcaggacgcgaagaacgaggaggccaaggaatacctggcccgcctggtcgccgccaaccacaaccagttgggcctgaaggacctgttcgaactggccttcgagatcaccaaggtcaacggccagccgatcatgcacaccgacatcgacggcgccgcctccaacggcaccaccatgaccatcaaggcgctgaccaacatgtacctgttgctgcacctgatggaccgcgagcaggccgggcgcgtgcgcctgccctactacctggacgaggcggcggacatcgacgagcgcaaccaggccgcgctgctggagaccagcctgcaactgggcttcgtgccgatcctggcgagcgtgaagccgcaggtttccgcacacgtggcgatcgacctggaaggcggtagcggcccgaacggcatctatatcgacgaagcggactggaaatacatccgtcgccgggatgccgccgccagcggcgaaacccgcgcagccagcgagccggaggaagccggcgaaccggcgtga

SEQ ID NO: 323405 - DNA, 1008 bp, Pseudomonas aeruginosa
atgcctgttcgacttctcaaccgtttccgccacgccgccctggcgtgcctgctcggttcgctttccctcaatgcggcggccgatcccgtcacccttaccctctacaatggccagcacgccgccaccggtatcgccatcgccaaggccttccaggacaagaccggcatccaggtgaagatccgcaagggcggcgatggccaactcgccagccagatcaccgaggaaggcgcacgctcgccggccgacgtgctctacaccgaggaatcgccaccgttgatccgcctggccagcgccggcctgctggccaagctggagccagagaccctggccctggtcgagccggagcacgccggcggcaacggtgactggatcggcatcaccgcccgcacccgggtactggcctacaacccgaagaagatcgacgagaaggatctgccgaagagcctgatggatctttccgatccgtcctggtccggccgtttcggcttcgtgcccaccagtggcgccttcctcgaacaggtcgccgcagtgatcaagctcaagggccaggaggaagccgaggattggctgaccggcctgaaggccttcggctcgatctacaccaacaacgtcaccgccatgaaagccgtggagaacggcgaggtcgacatggcgctgatcaacaactactactggtacaccctgaagaaggaaaagggcgagttgaactcgcgcctgcactacttcggcaaccaggacccgggcgcgctggtcaccgtctccggcgccgcggtgctcaagtccagcaagcaccccagggaagcccagcagttcgtcgccttcatgctcagcgaggaaggccagaaggcgatcctcagccagtccgccgagtacccgatgcgcaaggggatgcaggccgatccggcgctgaagccgttcgccgaactggacccaccgaaactgaccccggccgatctgggtgaggccagcgaggccctcagcctcgaacgcgacgttggcctgaattga

SEQ ID NO: 323406 - DNA, 1563 bp, Pseudomonas aeruginosa
ttgatcggcgccgcctccacgcccgtgcgcctgcgcacgggctcgcgccggcgaacgccattctggctgctcctgccggtcctgctcctcgccctgctggccagcctgccgctgctctacgtcgcggccaaggcctgggacgccggctggcacagcgcctggcaactgctctggcgcccctacgtattccgcttgctgggcaacaccctgtggctgatgttcggcgtgaccctgctcagcgccctgctcggcctggccctggcctggtgcgtggagcgcagcgacctgccggcgcggcgcttctggaacgtggtgctgtgcctgccgttcgccatccccgccttcgtcagcagtttcacctgggtttcgctgagcccgatgtacgaaggcctcggcggcgccatcctggtcatgaccatgtccaagtatccgctggtctacctgccggtagcagcgaccctgcgcggcatcgatccttccctggaggagtcggcgcggatgctcggtctgtcgcggcgccaggtgttcctgcgggtcaccctgccgctgctgcgcccgaccctggccgccaccggactactggtggcgctgcacatgctggtggagttcggcgcgctgtcgatcctgcgctaccagaccttcaccacagccatctaccaggagttcgaactggagttcagcaacgccaccgcggcgatgctctcctcggtactcctggcactgtgcttcctgctgctctggctggagttgcgcatgcgcggccgcggccgcctggtacgcaccggccagggcagcgcgcggcgggccgaacgggtccgcctggggcttggcaagtggccgatccaggcgctgctggcgacgctggtgctggtcggtaccggtatccccctggtgatgctcggttattggctgtacgaaggctcctcggccagcttcccgctgatggaaatcgcctcgaccctgctttcctccctgtcgctggccttcggcggggccctgctcagttgcctgctggcgctgccggtaagcatcctggtggtgcgctaccccggcgccctggcgcgctggacccagcgcctgccgtacctgctgcaagcgttgccgggactggtgatcgcactctcgctggtgtacttctcgctgcactacctgccagccacctaccagaccaccggcttgctgctggtcgcctatgccctgctgttcatgccgctgacccaggcaccgatccgcgtggccctggaaaaggcctcgccgcagttggaggaagccgcccgcactctcggccagacgcccttgatggccttcctgcggatcaccctgccgatcatctcgccggccatcggcgccggcttcgtgctggtgttcctcgacaccatgaaggaactgaccgccaccctggtgctaggtcccaccgggctgtcgaccctggccacctcggtctgggtgcacaccgccaacctggagtacgctgccgccgcaccctacgccgcgctgctgatcctgatctccggcttgccggtgtacctgctgaccacccgggcgcatctcagcactcactga

SEQ ID NO: 323407 - DNA, 243 bp, Pseudomonas aeruginosa
gtggccagctacgactgggtgaagaccctgttcatcgccggcatcggcgccgaggacctcgaccacttcggcatccgccaatggcacatcggcctgatcgtgccggtcggcttcgccctggtgttcatccgtttcgccgagatcctcgtgcgcatcctgcgcaaccgccagaccggactgggactggccgacgaggctgccgacgcgctgaagctgaccgagcacgaggagcccaaggcatga

SEQ ID NO: 323408 - DNA, 1284 bp, Pseudomonas aeruginosa
atgaccattctgttcctcttcctgctgctcttcctgctgatgttcatcggcgtgccgatcgccgtctccctgggtctctccggcgcactgacgatcctcctgttcagcccggactcggtacgctcgctggcgatcaagctgttcgagacctccgagcactacaccctgctggcgatcccgttcttcctgctctccggcgcgttcatgaccaccggtggcgtggcgcggcgcctgatcgacttcgccaacgcctgcgtcggacacatccgtggcggcctggcgatcgccgcggtgctcgcctgcatgctcttcgccgcgctatccggctcgtctccggcaacggtggcggcagtgggttcgatcgccatcgccggcatggtccgctcgggttatccacaggcgttcggcgccgggatcgtctgcaacgccggcaccctcggcatcctcatcccgccatcgatcgtgatggtggtctacgccgccgccaccgagacctcggtgggcaagctgttcatcgccggcgtggttccggggctgctgctgggactgatcctgatggtggtgatctacatcgtcgcccgggtcaagaagctgcccgccatgccaagggtcagtctgcgcgaatggctggccagcgcgcgcaaggcgctgtgggggctgctgctgatggtgatcatcctcggcggcatctattccggcgccttcacccccaccgaggccgccgccgtcgccgcggtgtactcggccttcgtcgcactgttcgtctaccgcgacatgcgcctgagcgaatgcccgaaggtgctgctggagtccggcaagctgaccatcatgctgatgttcatcatcgccaacgccatgctcttcgcccacgtgctgaccaccgagcagataccgcagagcatcgccagctgggtcacggaactgggactttcgccatggatgttcctgctggtggtgaacatcgtgctgctgatcgccggcaacttcatggagccttcggcgatcatcctgatcctggcgccgatcttcttccccatcgccatggagctgggcatcgatccgatccacctcggcatcatcatggtggtgaacatggagatcggcctgatcacgccgccggtcgggctcaacctgttcgtcacctcggcggtcaccggcatgccgctgggcgcgaccatccgcgcagcgctgccgtggctcatgatcctgctggtgttcctgatcatcgtgacctacatcccggcggtatccctggcattgccgaactggctggggatgagctga

SEQ ID NO: 323409 - DNA, 1449 bp, Pseudomonas aeruginosa
atgtcccaagaatccagccaaaaactccgactaggagcgctaacggctctggttgtcggctcgatgatcggagggggcatcttctcccttccgcaaaacatggcagccagcgccgacgtcggcgccgtcctgatcggatgggcgatcaccgccgtcggcatgctcaccctcgctttcgtcttccagaccctcgccaaccgcaagcccgaactcgacggcggcgtgtacgcctacgccaaggccggcttcggcgactacatgggtttctcctcggcctggggctactggatcagcgcctggctgggcaacgtcggctacttcgtcctgttgttcagcaccctcggctacttcttcccgatcttcggcaagggcgacaccgtcgcggcgatcgtctgcgcctcggtcctgctctgggccctgcacttcctggtgctgcgcgggatcaaggaggcggcgttcatcaacaccgtcaccaccgtggccaaggtcgtgccgctgttcctgttcatcctgatctgcctgttcgccttcaagctggacatcttcaccgccgacatctggggcaagagcaacccggacctgggcagcgtgatgaaccaggtgcgcaacatgatgctggtcaccgtctgggtgttcatcggcatcgagggcgcgagcatcttctcctcccgcgcggaaaaacgttccgacgtcggcaaggccaccgtgatcggcttcatcaccgtcctgctcctgctggtgctggtcaacgtgctgtccatgggcgtgatgacccagccggaactggccaagctgcagaacccgtcgatggcgctggtactcgagcatgtggtcggccactggggcgccgtgctgatcagcgtcggcctgctgatctcgctgctgggcgcgctgctctcctgggtgctgctgtgcgccgagatcatgttcgccgccgccaaggaccacaccatgccggagttcctgcgccgcgagaacgccaaccaggtgccggccaacgccctgtggctgaccaacatctgcgtacaggtgttcctggtggtggtgttcttcacctcgggcgacccggacggcatggacccgtacaccaagatgctgctcctggccacctcgatgatcctgatcccgtacttctggtccgccgcctatggcctgctgctgaccctgaagggcgagacctacgagaacgatgcccgcgaacgcagcaaggacctggtcatcgccggcatcgccgtggcctacgcggtctggctgctctacgccgggggcctgaagtacctgctgctgtccgccctgctgtatgcgcccggcgcgatccttttcgccaaggccaagcacgaggtcggccagccgatcttcaccggaatcgaaaaactgatcttcgccgcagtcgtcattggcgccctggtggctgcctacggcctctacgacggtttcctcaccctctga

SEQ ID NO: 323410 - DNA, 1257 bp, Pseudomonas aeruginosa
atgagcacggaaaaaaccaaacttggcgtccactccgaagccggcaaactgcgcaaagtgatggtctgctcgcccggactcgcccaccagcgcctgaccccgagcaactgcgacgagttgctgttcgacgacgtgatctgggtgaaccaggccaagcgcgaccacttcgacttcgtcaccaagatgcgcgagcgcggcatcgacgtcctcgagatgcacaatctgctgaccgagaccatccagaacccggaagcgctgaagtggatcctcgatcgcaagatcaccgccgacagcgtcggcctgggcctgaccagcgagctgcgctcctggctggagagcctggagccgcgcaagctggccgagtacctgatcggcggcgtcgccgctgacgacctgcccgccagcgaaggcgccgacatcctcaagatgtaccgcgagtacctgggccattccagcttcctgctgccgccgttgccgaacacccagttcacccgtgacaccacgtgctggatctacggcggcgtgaccctgaacccgatgtactggccggcgcgacgacaggaaaccctgctgaccaccgccatctacaagttccatcccgagttcgccaacgccgaattcgagatctggtacggcgacccggacaaggaccacggctcctcgaccctggaaggcggcgacgtgatgccgatcggcaacggcgtggtcctgatcggcatgggcgagcgctcctcgcgccaggccatcggtcaggtcgcccagtcgctgttcgccaagggcgccgccgagcgggtgatcgtcgccggcctgccgaagtcccgcgccgcgatgcacctggacaccgtgttcagcttctgcgaccgcgacctggtcacggtcttcccggaagtggtcaaggaaatcgtgcccttcagcctgcgccccgatccgagcagcccctacggcatgaacatccgccgcgaggagaaaaccttcctcgaagtggtcgccgaatccctcggcctgaagaaactgcgcgtggtcgagaccggcggcaacagcttcgccgccgagcgcgagcaatgggacgacggtaacaacgtggtctgcctggagccgggcgtggtggtcggctatgaccgcaacacctacaccaacaccctgctgcgcaaggccggcgtcgaggtcatcaccatcagcgccagcgaactgggtcgcggtcgcggcggcggccactgcatgacctgcccgatcatccgcgacccgatcgactactga

SEQ ID NO: 323411 - DNA, 1011 bp, Pseudomonas aeruginosa
atggctttcaacatgcacaaccgtaacctgctcagcctgatgcaccacagcacccgcgagctgcgttacctgctcgacctgtcccgcgacctcaagcgcgccaagtacaccggcaccgagcagcagcacctgaagcgcaagaacatcgccctgatcttcgagaaaacctccactcgcacccgctgcgccttcgaggtggccgcctacgaccagggcgccaacgtcacctacatcgacccgaactcctcgcagatcggccacaaggagagcatgaaggacaccgcgcgggtcctcggccggatgtacgacgccatcgagtaccgcggcttcaagcaggaaatcgtcgaggaactcgcgaagttcgccggcgttccggtgttcaacggcctgaccgacgaataccacccgacccagatgctcgccgacgtgctgaccatgcgcgagcacagcgacaagccgctgcacgacatcagctacgcctacctgggcgacgcgcgcaacaacatgggtaactccctgctgctgatcggcgccaagctcggcatggacgtacgcatcgccgcgccgaaggcgctctggccgcacgacgagttcgtcgcccagtgcaagaagttcgccgaggaaagcggcgccaagctgaccctcaccgaggatccgaaggaagccgtgaagggcgtggacttcgtccacaccgacgtctgggtgtcgatgggcgagccggtggaagcctggggcgagcggatcaaggaactgctgccctaccaggtcaacatggagatcatgaaggccaccggcaacccgcgggccaagttcatgcactgcctgccggcgttccacaacagcgagaccaaggtcggcaagcagatcgccgagcagtatccgaacctggccaacggcatcgaggtgaccgaggacgtcttcgagtcgccctacaacatcgccttcgagcaggccgagaaccgcatgcataccatcaaggcgatcctcgtctcgaccctcgccgacatctga

SEQ ID NO: 323412 - DNA, 933 bp, Pseudomonas aeruginosa
atgcgtatcgtcgtcgcattgggcggtaatgccctgctacgccgtggcgaacccatgaccgcggacaaccagcgggaaaacgtgcggatcgccgccgaacagatcgccaaggtggcgcccggcaacgagctggtgatcgcccacggcaacggcccccaggtcggcctgctggccctccagggtgccgcctacgaccaggtctcgccctacccgctggacgtcctcggcgcggaaaccgagggcatgatcggctacatgatcgaacaggaaatgggcaacctgctgccgttcgaagtgccgttcgccaccatcctcacccaggtcgaggtggacggtaaggatccggcgttccagaacccgaccaagccgatcggcccggtctactccagggaagaagccgagcgcctggccgccgagaagggctggagcatcgccccggacggcgacaagttccgccgcgtggtgcccagcccgcggccgaagcggatcttcgagatccgcccggtgaagtggctgctggagaaaggcaccatcgtcatctgcgctggcggcggcggtatcccgaccatgtacgacgaggccgggaagaagctcagcggcgtcgaggcggtgatcgacaaggacctctgctcctcgctgctggcccaggagctggtggccgacatcctgatcatcgccaccgacgtcgacgcggcctacgtcgactggggcaagccgacccagaaggccatcgcccaggcccacccggacgaactggagcgcctcggcttcgccgccggctccatgggtccgaaggtccaggccgccatcgagttcgcccgcgccaccggcaaggacgcggtgatcggttcgctcgcggacatcgtcgcgatcaccgagggcaaggcgggaacacgggtcagcacacgcaaggcgggtatcgagtaccgctga

SEQ ID NO: 323413 - DNA, 1905 bp, Pseudomonas aeruginosa
atgtctcgactaccggtcattgttggtttcggtggctacaacgcagcaggccgtagttccttccaccacggcttccgccgcatggtcatcgaatcgatggacccgcaggcgcgccaggaaaccctagccggcctggcggtcatgatgaaactggtcaaggccgaaggcggccgctacctggccgaagacggcacgccgctgtccccggaggacatcgagcggcgctacgccgaacgcatcttcgcctctaccctggtgcgacgcatcgaaccgcagtacctcgacccggatgcagtccactggcacaaggtcctcgagctgtcccctgccgaaggccaggcgctgaccttcaaggcctcgcccaagcaactgcccgagccgctgccggccaactggtcgatcgctcccgcggaggacggcgaggtgctggtgagcatccacgagcgctgcgagttcaaggtggacagctaccgtgcgctgacggtgaagtccgccggccagttgcccaccggtttcgaaccgggcgagctgtacaactcgcgcttccacccgcgcggcctgcagatgtcggtggtcgccgcgaccgacgcgatccgctccaccggcatcgactggaagaccatcgtcgacaacgtccagcccgacgagatcgcggtattctccggcagcatcatgagccagctcgacgacaacggtttcggcggcctgatgcaatcccgcctgaagggccaccgggtctcggccaagcaactgccgctgggcttcaacagcatgcccaccgatttcatcaatgcctacgtgctcggcagcgtcggcatgaccggcagcatcacaggcgcctgcgccaccttcctctacaacctgcagaagggtatcgacgtcatcaccagcggccaggcccgggtggtcatcgtcggcaacagcgaggcgccgatcctgccggagtgcatcgagggctacagtgccatgggcgcactggccaccgaagaaggcctgcgcctgatcgaaggccgcgacgacgtggacttccgccgcgccagccggccgttcggcgagaactgcggcttcaccctggccgagtccagccaatacgtagtgctgatggacgacgaactggccctgcgcctgggcgcggatatccacggcgcggtaaccgacgtgttcatcaacgccgacggtttcaagaagtccatctccgcccccggcccgggcaactacctgacggtagccaaggcggtggccagcgcggtgcagatcgtcggcctggacaccgtgcgccacgccagcttcgtccacgcccacggctccagcacgccggccaaccgggtcaccgaatcggaaatcctcgaccgcgtggccagcgccttcggcatcgccggctggccggtcaccgcggtgaaggcctacgtcggccactccctggccaccgccagcgccgatcaactgatttccgccctgggcaccttcaagtacggcatcctccctgggatcaagaccatcgacaaggtcgccgacgacgtccaccagcagcgcctgagcatctccaatcgcgacatgcgccaggacaagccgctggaggtgtgcttcatcaactccaagggcttcggcggcaacaacgccagcggcgtggtgctgtcgccgcgaatcgccgagaagatgctgcgcaagcgccatggccaagcggccttcgccgcctacgtcgagaagcgcgagcagacccgcgccgccgcccgcgcctacgaccagcgcgcgctgcagggcgacctggagatcatctacaacttcggccaggacctgatcgacgaacacgccatcgaggtcagcgccgaacaggtgacggtgcccggcttcagccagccgctggtatacaagaaggacgcgcgtttcagcgacatgctcgactga

SEQ ID NO: 323414 - DNA, 822 bp, Pseudomonas aeruginosa
atgaggccggtgccctggggcgaattggtggcgctggtgcggcgcgccggcgaggcgatcctgccgcactggcgcgccgacgtggcggtgcgctcgaaggccgacgaatcgccggttaccgccgccgacctgtccgcgcaccatatattggaggcggggttgcgggcgctggcgccggacattccggtgctttccgaagaggattgcgagataccgctgagcgagcgcggccactggcggcgctggtggctggtggacccgctggacggcaccaaggagttcatctccggtagcgaggagttcaccgtcaacgtggccctggtcgaggatggccgggtgctgttcggcctggtcggcgtgccggtgagcggccgctgctactacggtggcgccggtctcggtgcctggcgcgaggaggccgatggccgcgcgcaaccgatcagtgtgcgcctggagcccgaggaggccttcaccgtggtggccagcaagcgccatggcagcccggcccaggagcgcctgctggatggcttgagcgagcgcttcggcgacctgcggcgagccagcatcggcagttcgctgaagttctgcctgctggccgagggcgctgccgactgctatccgcgcctgacgccaacctcgcaatgggacacggccgccgcccagggtgtgctggaaggcgccggcggcgaggtgctcgacctgcatggtgcgccattcacctacgagccgcgcgaggattacctcaacggctccttcctggccctgccgcgcgccgccgagtggcgcagcgagctgatccaactggcgcgcgcgctgcactga

SEQ ID NO: 323415 - DNA, 567 bp, Pseudomonas aeruginosa
atgcgtcagaaacccaccgtactcgccagcgagatcgtcgcgaagagccgactgttcgctgtcgaggagttgcaactgcgcttcagcaatggcgtcgagcgcacctacgagcgtctggtcggcaagggccagggctacggtgcggtgatggtggtggccatgctcgatgccgagcacgcggtgctggtggaggaatattgcgccggggtcgacgaataccagttgtcgctgcccaagggcctggtcgagccgggcgaggacatcctcgcggcggccaaccgcgagctcaaggaggaagcgggctacggtgcccggcaactggagcacatcaccgaactgtcgctgtcgccgggctacatgagccagcgcatccaggtggtgctggcgcgcgacctctacgaggagcgcctgccgggcgacgagccggagccgatgggcgtcgatcgcatcagcctgcgcgaactgtcgagcctggcccagcacgcccagttcagcgaaggccgcgccctggccgcgctgtacctggtgcgcgacctgctcacccagcgcggcgagtaccaggcatga

SEQ ID NO: 323416 - DNA, 666 bp, Pseudomonas aeruginosa
atgcccaccctgccctggtccgccatcgacaccgtgctgctcgacatggacggcaccctgctcgacctgcacttcgacaaccacttctggctggaacacctgccccagcgctatgccgaacgcaatggcctcagtcgcaccgaagccgacgccgtgctcgagccgctgttccgcgaacacgccggccagctcaactggtactgcctggatttctggagccgggaactggacctgtcgatccgcgaactcaagcacgaggtggcgcacctgatctcgctgcgtccgcacgccgataccttcctcgccgccctgcgccgggccggcaagcgcgtggcgctgatcaccaacgcgcaccgcgactcgctgtcgctgaagctggaacggatcgaactggcgccctatttcgaccgactgatcagctcccacgactacggctacccgaaggaggacgcgcgcttctggagcgccctgcaagccgatttcggcttcgacccgcagcgcagcctgttcatcgacgacagcctgccgatcctgcgcagcgcccgcgcctatggtgtcgcccacctgttggcggtacgccacccggacagccgtggccaggtccgggacaccgaggagttcgccgcccaggaggactaccggcggctgctcgaaggactgccgtag

SEQ ID NO: 323417 - DNA, 438 bp, Pseudomonas aeruginosa
atgggtattttcgcgttcgtgaaggaagccggtgaaaagctgtgggatacgctgacggggcatgaggcacaggcggccgagtcgctgaaggagcacgtcgccaaggtcggcctgggcaacccgaacatccaggtttcggtggaaggcgacaaggtcatcgcctcgggcgaggtggccagccaggaggagaaagagaagatcctgctggcgctgggcaacgtcgccggcgtctcctcggtggaagacaagatcaccgtggcccaggccgctccggaggcgcgcttcgtcaccgtgaagaaaggcgacaccctgagcgccatcgccaaggccgaatacggcaatgccaacgcctacatgaagatcttcgaggccaacaagccgatgctcagccatccggacaagatctaccccggccaggtcctgcgcattcccgagtga

SEQ ID NO: 323418 - DNA, 882 bp, Pseudomonas aeruginosa
atggacatcaagcaactgaaattcctctgcgccctcgacgaaacccgccacttcggccaggccgccgcgcgctgccacgtcacccagccgaccctgtccatgcgcctgcgcagcctggaggaagaactcggcctggaactggtgcgacgcagccagcgcttcgaaggcttcaccgaggccggcgagcgcgtactggcctgggcacgcagcctgctggcggcccaggaagggctgtacgcggaagccgccgcctgccgcgggcaactggtcgggaccctgcgcctgggcgtggtgccgctggccagcttcgacccgatgcgcctggtccagcacatggccgggcgccacccggagttgcgtttccagctctattccctgagttcggaacaggtactcgaaggcctggcgcgcaaccagttcgatctcggcgtctcttatctggaccgtctggaccgcagccatttcgagggcatcgaactggcggagacccgcatgggcctgctccatcaccccagccatttcccgctcgacgccgcgctgctgaactgggaagcgctggctggcctgccgctaggcctgctctcggcgggcatgcacttccgccaatccatcgaccacaacttccgcagccgcgggttgagccccatcgcgcgcctggaaaccgactcggtacagcaactgctgcaggcggtgcagcgcggcttgtgctgcgcgatcatgccgctgggcagcgaagtcgacggcgagttgcgcctgatccccatcgaggacgcccataccctggcagcgctcggtctgatcatccgcagcggacagccgcgctcggcgctggccgaagcctgtttcgaggaagcccggaactggttggcgccgcagtcttga

SEQ ID NO: 323419 - DNA, 840 bp, Pseudomonas aeruginosa
atgccttgccagcctgcatgcccggtatccgcggatacctgggcgccttccgccgttcccgacgattaccgctacgccgacctgcacctgccgcagcaggtcggccaggcctcccttgccgccgagtgtgccgtggcgatcagctacaacggactgaaccaggcggtgatgatggcctcgcccgaggacatcgaggatttcgtccgcggtttcagcctcagcagcggcttcgtggagtccatcgacgacatctatgaaatccgcgtcagcggccagggcgaatccctccacgccgaggtcgaaatcagcagccgcgcgttctggaacctcaagcgccaacgccggcaactggccggcacttccggatgcggcctgtgcggcgtcgaagccctggagcaggccctgccgcaactgccggaacggtcgccgcaggcgctgcctcccgccgcccatctcggcgccctgcgccagcgtatcgagcaggcccagcgactggcgcgccatagcggcgccctgcatgccgcgctgtatttcgacgggcatggcgagctgcgcctgtgtcgcgaggacatcggccgccacaacgccctcgacaagctgatcggcgccctgcaccgccaaggcctcgacgccgcgcgcggtttcgccgtggtcaccagccgctgcagcctggagcttatccacaaggccgtacgtgccgggatcggcaccctggtcagcctctccgcacccaccgccctgaccgtgcaatgggcgcgccgccaccaactgaacctgatccaccagccccatcacaacgccccgcgggtctacagcccggcgccggccgcaaccgagtga

SEQ ID NO: 323420 - DNA, 2322 bp, Pseudomonas aeruginosa
atgagcctgcaacctctccaaccccgctacaagccctatgccggcgccgccgccggctggggcgcgctgcgcagcgtggcgcacttctggctggacagcaaacagccgttcaagaacctccgcgccctgctcaagaccaaccagaacggcggtttcgactgccccggctgcgcctggggcgactcgccggaagacggccgggtgaagttctgcgagaacggtgccaaggcagtcaactgggaagccaccaagcgccgcgtcgacgcggcgttcttcgcccgctacagcgtcagcgccctgcgcgaacagagcgactactggctggaataccagggccgcctcaccggaccgatgcgctacgacccgctcagcgaccactaccagccgatcacctgggacgccgccttcgccctggtcgccgagcacctgcgacgcctggatagccccgaccaggcggagttctatacctccgggcgggccagcaacgaggcggcctacctctaccagttgttcgtccgcgcgttcggcacaaacaacttccccgactgctcgaacatgtgccacgaagccagcggcgtggcactgggccgcagcgtcggggtcggcaagggcagcgtgaccttcgacgacttcgaacacgccgacgcgatcttcatccttgggcagaaccccggcaccaaccacccgcgcatgctcgagccgctgcgcgaggcagtgaagcgcggtgcccaggtggtctgcttcaaccctctcaaggagcgcggcctggagcgcttccagcacccgcagaacgcgctggaaatgctgaccaacgggtcctcgccgctgaacaccgcgttcttccgtccggcactgggcggcgacatggcggcgatccgcgggatcgccaagttcctcctcgcctgggagcgcgaagcccaggccgagggtagcgagccggtattcgaccacgccttcatcgccgagcacaccgacggcctcgaggcctacctggccgaactggatgccaccccctgggaacacctggagcgccagtccgggctgggcctggcggaaatcgagcaggctgcgcggatgtaccggcgggcgaacagggtcatcgtctgctgggcgatgggcatcacccagcaccaccattcggtggcgatcatccaggaaatcgtcaacctgcaactcctgcgcggcaacctgggccgcccgggcgccggtctctgcccggtccgcggccacagcaacgttcagggtgaccgcaccatgggcatcaacgagcggccgccggcggcgctgctcgacgcactggaacggcgcttcggcttcgaagtgccacgccacaacgggcacaacgccgtcgaggcgatcgccgcgatgctcgccggcaagtcgaaggtcttcatcggcctgggcggcaatttcgcccaggccaccccggacagtccgcgcacccacgccgccctggcgtcatgcgacctgaccgtgcacatcagcaccaagctcaaccgcagccacctgaccaccggccgcgacgcactgatcctgccctgcctggggcgcaccgacatcgaccgccaggccgaaggcccgcaggcggtcacggtggaagactcgttcagcatgatccacgcatcctacgggcaactggagccgctctcgcagcagatgcgttcggagccggcgatcatcgccggcatcgccaaggcaaccctgggcaaccatccggtggactgggacgcgctgatcgccaactacgagcgcatccgcgagctgatcgccgacaccatccccggtttcgccgacttcaaccgccgcgtccgccatcccggtggcttctacctcggcaactccgccggcgaacgacgctggaacaccgccagcggcaaggccaacttcgtcgccaacccgctgccccgcgacctgttgccggcacaggtgcgcgacagcggcctcgaacccgacctgatcctgcagaccctgcgctcccatgaccagtacaacaccaccatctacggcctggacgatcgctatcgcggagtgaagggccagcgcaaagtggtattcgccaacgaggcggatatccgccgcctgggctaccagccgggcgacaaggtcgacctggtctcgctgtggagcgatggcatcgaacgccgggtacgccgcttcaccctgctcgccttcgacatcccggccggccaggcagccgcctactacccggaaaccaatcccctggtgccgctggagagcgtcggcgtcggcagccatacgccgacttcgaagttcatcgcggtacgcctggaaaaggccacgggcgacgggcgcattatctga

SEQ ID NO: 323421 - DNA, 516 bp, Pseudomonas aeruginosa
atgaagtattcctcgatactcctgttgtccctgagtctggtcggtagtaccgccttcgcaggcgacgacacccgcgcggccatcggcggcgccttgggcggggtgttgggttcggtcgtcggcgatgcggtcggcggcagcactggcgccgcgatcggtagtggcatcggtggcgctgcgggcggtgcagtcggcgccggacgcggcaacaagaccgaagcggcgatcggcggcggcctcggtgccgcaggcggcaacgtcatcggccggcagatcggtggcagcaccggtggcctgatcggcgcggccctcggcggcgccggcggcggcgcgctgggcaaccattatggcgacggcaaccgccgctacgacgacgatgacgactaccgcgaccgtcgctactaccgccgcgccggctatcgcgatggctattaccggcatgacaacggccatcactatggccagtacaagaagtggaagcgccacaagcatcatcgtcgctactacgacgactga

SEQ ID NO: 323422 - DNA, 408 bp, Pseudomonas aeruginosa
atgcgtaaatctctcctggtaatcgcgttcggcctgctgagcgcacaagccgcgctcgccggcgattccaccaagaccgcggtgggcggcggcgtaggcggtgccctgggcaacgtcgtgggcggcgccatcggcggtagcaccggtgccgccataggcgccggcctgggtggcgcggccggcggcgcgatgaccgccaaggacgggcgcaagaccgaagccgccctgggtggcgggctaggcgcggccggcggttcggtgatcggcaacaagctgggcggcagcaccggcgcgaccataggtgcaggcctcggcggcgcagcgggtggcgcggtcggtaacaacctgggcaaggacaacgacagcggtcaccgcggcaagaaacaccgcaagcacaagcatcgttga

SEQ ID NO: 323423 - DNA, 216 bp, Pseudomonas aeruginosa
atgggtttcctgatactctcccgccgagaaggcgaaggcatcaccctgtccctcaaggccgactacccggcggaggaactgattcggcagttgcgcgaaggcggcatccggatcctggtcaccgatatcatcggcaaccaggcccgggtcgggatcgaggcgccgcgtggcgtcctgatcgttcgcgacgagttgaaaacggcaccgaaaggctga

SEQ ID NO: 323424 - DNA, 558 bp, Pseudomonas aeruginosa
atgcgcccgtcgttcgccagttggggcctgcttgccctcctgctcctgcaaggcccgttgctccaggcccagccgctgtcaccggctctccagcaactgttgagcctgagcagccagcgtttgcaactagccgatcaggtagcccagagcaaggcccagtcgggcaaggcggtacaggacagcccgcgggaagaacaacagttgcagatgctcgccggacaagccgggagccacggggtcggcgccgagcaggtgcgcctgctgttcgccgcgcagatcgaggcgaacaagctggtccagtaccgcctgctcagccggccgctaccggacgctggccaggcggtcgacctggagcgcatccgcagccgcctcaatcagctcaacctggagctgctgcgcggctacgccccggcgctcgccgaactgcgcgtcgacgactgccggccgaggctcaaccaggcgctgcaacggcaggtacgcgacgatcgcctggacgagctgcacgccatcgccctgtcacgggcggcgggcgatctctgtcactgggccgcgctctga

SEQ ID NO: 323425 - DNA, 444 bp, Pseudomonas aeruginosa
atggcgaccgccctgcgaccgctgcgcgagcagtaccttcatttccagccgatcaccacgcgctggcacgacaacgacatctacggacacgtgaacaacgtgacctactatgcgttcttcgacacggcggtgaatacctacctgatcgagcgcggcggcctggatatccagggcggcgaagtgatcggcctggtggtcagttccagctgcgactatttcgcgccggtggccttcccccagcggatcgagatgggcctgcgggtggcgcgcctgggcaacagctcggtgcagtacgaactggccttgttcctcgaagggcagcgggaggcctgcgcggccgggcgtttcgtgcatgtcttcgtggagcgccgaagcagccgcccggtggccattccgcaggaactacgcgatgcgctggccgcgcttcagagcgcggcccagtga

SEQ ID NO: 323426 - DNA, 1089 bp, Pseudomonas aeruginosa
atgcaagctttcagtttcgccactaccgcgcagatcctctgcgaggccggctccgccatccgcctggcggaactctgccgcgagcgaagggcgcgccgcgtgttgatcgtgaccgatccggggatcacccggctcggcttgctggatgcgatcctgcccggcttcccgcgcctgggcctggccgtcgaggtgtacgaccaggtgctcgccgatccgcccgagtcggtggtcgaggccgcgctcgggcgggcgcggggcatggctgccgagctggtggtcggtttcggcggcggcagctccatggacgtagccaagctggtcgcgctgctcgcccacccagaagcagggcaggggctcggcgaggtcttcggggtcggcaacgcacgcgggccgcgcctgccgctgatccaggtgccgaccaccgccgggaccggctccgaggtgacgccgatcgccatcgtcaccaccggcgagaccaccaagatgggcgtggtctcgccccacttgctgcccgacctggcgctgctcgacgccgacctgaccctcggcttgccgccggcggtcaccgcggcgaccggtatcgacgcgatggtgcatgcgatcgagagctataccagcaaactgaagaagaacccgctgtccgacctgctggcgcgggaggcgttgcgcctgctggcggccaacctggaacgcgcggtaggcgacggcggcgaccgcgaggcgcgccaggccatgctgctgggcgcctgcctggccgggcaggccttcgccaatgcgccggtggcggcggtgcatgccctggcctatccgctgggagggcatttccacattccccacggcctgagcaatgcgctggtgctaccggaggtgatccgtttcaacgctcccgctgccgctggactctatgccgagctggcccagctcagtccgcgcaacggcctgccgagccgcttgcgcgacgccggggtggacgaggcgatgctgccgcgcctggccgccgacgcgatgctccagcagcgtctgctggtcaacaacccgcgcgaggtcggcgaggcggatgccctggcgatctatcgcgcggcatactga

SEQ ID NO: 323427 - DNA, 756 bp, Pseudomonas aeruginosa
atgctgctgacccagaagaccctggtcgaaggctgccgcatgctggcggcctgctgcgcacgccagctcgacctggaacacggccatccggatgctgacggccggcgcgcggcgacgcgccgtgcagcgctgctgatccccatcgtcaaggccttccttaccgatgtcggccaggaagtcgccagcctcggcgtacaggtctatggcggtcacggtttcatccgcgaatggggcatggagcaattgatgcgcgacagtcgcatcacccagatatacgaaggcaccaatggcatccaggcgctcgatctggtccgccgcaagctgctcggcgaccagggcggcgaactgctggcgctgcaaggcgaactggcggtggccagcgaggcgctgcaagggcgtgctgcgctggcgccactggctgagccggtgctgcaacgcctggaggagtggcggcagctcaccggccaggtactcgaggcctgcgcccgcgatccccaggagatcggcgccacttcggtggacttcctccagtacagcgcctacgtattgctcgcggccctctggttgcaagccgcggcacgagcccaggaagcgctggacggcggctccggcgagggcgatttctatcgggccaagctgcgcagcgccgatttctacctgcggcgtatcctgccgcgggcgagcatgcaccgcgaagccttgctcggtggcgccgactgcctgatggccctgcccgaggagcatttctcgttctga

SEQ ID NO: 323428 - DNA, 2379 bp, Pseudomonas aeruginosa
atgaacagcgccacgctaaccgagctcgatctgccggtcagcggcatgacttgcgcgtcctgcgccggccgtgtcgaacgagccctgaagaaagtgcccggggtcgcggccgcctcggtcaacctggccagcgagcaggcccgcgtacaggccccggcggacagcctgccggccctggtggcggcggtcgagcaggccggctaccaggttccggcgcgcagcctggaactgtccatcgagggcatgacctgcgccagttgcgtcggccgggtcgagcgggcgctgaagaaggtgcccggcgtacgcgaggtcagcgtcaacctggccagcgagcgcgcccacctcgagctgctcggcgccgtggacagccaggccttgctgcaggcggtggaacaggccggctacaaggcccgcctgctcgacgcggggcaaccacgccaggacgatgccgagcgccgcctgcgccgcgaacgctggtgggtgatcgccgcgctgttgctggcgttgccgctggtgctgccgatgctggtggaatgggccggcctgcactggatgctgccgccgtgggcgcagttcctcctggcgaccccggtgcagttcatcatcggcgcgcgcttctatgtctccgcctggcgcgcggtgaaggccggcgccggcaacatggacctgctggtcgccctcggcaccagcgccggctacggcctcagcgtctacctctggctgaccgccccgcccggccacatgccgcacctctacttcgaagcctccaccgtggtgatcgccctgatcctcctcggcaagtacctggaaagccgcgccaagcgccagaccgccagcgccatccgcgcccttgaggcgttgcgcccggagcgcgcggtgcgcctgcgcgacggtcgcgaggaagaggtggcgatcgccgagttgcgcctcggcgacgaggtggtggtgcgtcccggcgaacgcttcccggtggacggcgaggtgctcgacggcagtagccacgccgacgaggcgctgatcaccggcgagagcctgccggtacccaaggctcccggcgacaaggtcaccggcggcgcgatcaacggcgaaggccgcctgctcctgcgcaccactgcgctcggcggggaaacggtgctggcgaagatcatccgcctggtggaagacgcccaggccgccaaggcgccgatccagaagctggtggacaaggtcagccaggtcttcgtcccggtggtgatcctcatcgcgctggtcaccctcggcgcctggctggtcgccggggtcggcctggagcaggccctggttaacgccgtggcggtgctggtgatcgcctgcccctgcgccctcggcctggccaccccgaccgcgatcatggccggcaccggcgtggccgcgcgccacggcatcctgatcaaggacgcagagtccctggaagtcgcccatgcggtcaccagcgtggccttcgacaagaccggcaccctgacctccgggcgaccgcagatcatccacctcggcggcgacgaccaggagcaactgctcaggctcgccggcgccctgcaacgcggcagcgagcacccgctggccaaggccgtgctcgagcgctgcgccgagcgcgacctggaggttccgccggtgaacgccagccaggccctcagcggtcgcggcatccagggcgaggtcgagggtcgccggctggccctgggcaaccgccgcctgctcgacgagcaggaactcaagcccggcgcgctggcgagtgccgccgcggactgggaggccgagggccgcaccctgtcctggctgctggaactggctccggagaaacgcgtgctcggcctgttcgccttcggcgacagcctcaaggacggcgccgccgaagcggtggaggccctgcgcggacgggatatccacagccacctgatcaccggcgacaaccgcggcagcgcggcggtggtggccaaggccctgggcatcgacgacgtacacgcggaagtgctgccggcggacaaggccgccacggtcgccgagctgaaaggccggggccgggtggtggcgatggtcggcgacggcatcaacgacgccccggcgctggccgccgccgacgtcggcatcgccatgggtggcggcaccgacgtggccatgcacgccgccggcatcaccctgatgcgcggcgacccgcgcctggtgccggcggcgctggacatctcgcggcggacctacgcgaagatccgccagaacctgttctgggccttcatctacaacgtgatcggcatcccgctggcggccttcggcctgctcaacccgatggtggcgggcgcggcgatggccttctccagcgtcagcgtggtcggcaacgccctgctcctgcgacgctggaagccctga

SEQ ID NO: 323429 - DNA, 2889 bp, Pseudomonas aeruginosa
  misc_feature (2141)..(2150): n is a, c, g, or t
atgactgacttctcgcgcaccttctcgggcactccatccgccgtcctgccgacggccaaccgctttttccgccccccgctgccgtcggcccatgtggcgcgcccgcgtctttgccgtcgactgcgcgacggactggacggtcgcctgctgctgatcgccgcgcccgccggattcggcaagagttccctggccatcgagttctgcgaaagcctcgatccgcgctggcagagcctctggctgggactgagcagccgcgagagcgatcccggacgtttcctcgaacgcctgctcgatggcttgcgacagtaccacccgaccctgggcgaagaggccctcggcctgctgaagatgcgccagcgtcaccagccgttcgccttcgagacctggctcgacgacctgctcgacgaactcgccccctgcctggacccgcagcgtcccctgctactggtgctggacgattaccacctggcccagggcgcggtgctcgaccgttgcctgcaattcctcctcaatcacctgcccgagggcctggtgctgctggtcaccagccggcagcggccggactggcacctggcgcgcctgcgcctgtcgcggcaattgctcgaactcagcgaacaggacctgcgcctgaccgccgaggagagcggggcgctgatggccgccagcggcctcgaactcgacgaggacgcgctggacgcgctgctcgagcgcagcgaaggctgggtcgccgggctgcgcctctggctgctggcgcgcggcgatccagaggagcaggtcagccccggggtacacggcgccgacgaactgatccgcgactacctgctggaggaggtgatcgagcggcagccgcccgaggtccaggcgttcctcgcccagaccgcgcgcttcgagcgcttctgcgccgagctctgcgataccgtgcgcgaggccggcgacagcgcggcgatcctcgaccacctgcagcagcaccaggtcttcctcgtgccgctggacgaaaacggccagtggttccgctaccaccacctgttctccgacctgctgctggcgcgtcccttgcccgacttcggtccgtccgccggctccctgcacctgcgcgcctgcggctggttcagccgccatggcctgctcgaccaggcggtggagcaggcgctgcgcgccggccagccggacgtggcggcgagcctggtgcagaacctgtcggaagagcaactgctggcggagcagaacatcgccaccctgctgcgctggaagatggacctgccggacagcctcctggcgagcacgccgcgcctgatcctgctgtacggctgggcgctggcgctggcctgccagctggatgccgcggaagaactggccggccaactggcgcgtttcctgccggcgccggacgagtccgcgcagcgcgacctgctggcccagtggcaggccctgagcggggtgatcgcgcgcggccgcggcgatatcgacaaggccgaggcgcactgccgcgaggccttgcaggacctcgccggggagcgctatggcacccgcctgcaatgcctgtcgacgctgagcaacctggcggtgacccgtggcgacttctggcaggcgcgcaactacaaccgcgacgccctggagttcgcccagcgctacggcaacccgctgttcgaggcactggtccattacgaccgcgcccgcgtcctccaggcgcgcggcgaggtggcgcgcgccgaggaggaggtgcgccagggcctggaacgcctccagcacctgccggcgcaacgccgctacgcggtgcgcgggcggctcctgctgtaccgcggctacctgcgcagcctggcgctgcagccggacgaagcgcgcaagtggatcaagcagggaatcgaggaaacccgcagctgccgggatgtcagcctggtgatcggctattgcgtcctggccagcctggaagggcgcctgggcaactacgcggcggcgttcgcccggcttggcgacgtcgagcggttgatgcatgcctgggatatcccgccgatctactacctggcggcgatcaccctgatcaagtgcgaactctggctggcccagggccagaccgaactggccggcgtctggctacagcgcttgggcggcacctacggcgggcaggcggccacgccgccggnnnnnnnnnngcagtccgctgctgccgctgcatgtggagttgctccaggccggcctggagcgccgcgaaggacgcccggaggaagccgcccggcgcctggaccggctggcccgctcgacgcgggagaacggcgcgttgctgccggctcgcctggccctcggccaactggccgcgctgcacctggagcagggccgcgagcgcgaggcgctggcgaccctgcaacaggccatggagggcgcagtcggcggagccttgctgccgctccacgaattgctcgtgcagcagccggaatggttgcgcgaacagttgcagcgcttccctgcctgtcccggcgcccagcgcatgcgcgcgctgttgccggagccgcccgccgagcccgcgggcagtgcgggcgaggtgctcagcgggcgcgaactggcggtgctggagctgatcgcccaggggttgtccaaccaggagatcagcgagcggctgttcatctcgctgcatacggtgaagagccacgcccgccatatcaacgacaagctcggcgtcgagcgtcgcacccaggcggtggcgcgggccaagcacatggggttgttgcgctaggcgcgccaccccatgtgcctggcgtgctggctcagggcttccagcgtcgcaggagcagggcgttgccgaccacgctgacgctggagaaggccatcgccgcgcccgccaccatcgggttgagcaggccgaaggccgccagcgggatgccgatcacgttgtag

SEQ ID NO: 323430 - DNA, 1368 bp, Pseudomonas aeruginosa
atgaaaacaacgaagattcttctgcataccggtgtactggccctgagcctgctggccacccaggtgatggcggcggtatccgccgacgaagcggccaagctcggcaccagcctgactccgttgggggcggagaaggccggcaacgccgacggcagcatccccgcctgggacggcggcctggcgaccaacgccggcagcgtcgacagccgtggcttcctcgccaacccctatgccagcgagcaaccgctgttcaccatcaccgcgcagaacgtcgaccagtacaaggacaagctgactcccggccaactggccatgttcaagcgctacccggatacctacaagatcccggtatacaagacccaccgcagcgccaccgtcccggcggcggtgcaggaggcggccaagcgcaacgccaccaccaccaagctggtggaaggcggcaacggcctggagaacttcgataccgccagcccgttcccgatcccgcagaacggcctggaggtgatctggaaccacatcacccgctaccgcggcggcagcgtccggcgcctggtgacccaggccactccgcaggtcaacggctcctaccagctggtctacttccaggatgccttcaccttccgtaccaacctgaaggactacaacccgaacaagccgagcaacgtgctgttctacttcaagcagcgggtcaccgcgccctcgcgcctggccggtaacgtgctgctggtccacgagaccctcaaccaggtcaaggagccgcgcctggcgtggctctacaacgccggccagcgccgcgtgcggcgggctccgcaggtgtcctacgacggtcccggcaccgccgccgacggcctgcgcacctcggacaacttcgacatgtacaacggtgcgccggaccgctacgactggaagctggaaggcaagaaggaaatctacattccctacaacagctacaagctcgacgatccgaagatcaagtacagcgaaatcgtcaaggccggccacatcaaccaggacctgacccgctacgagctgcaccgcgtctggcatgtggtcgcgaccctgaagccgggcgagcggcacatctacgccaagcgtgacttctacatcgacgaggacacctggcaggccgccgagatcgaccattacgacggtcgcggcaccctgtggcgcgtggccgaggcgcatgccgagcagtactacgacaagcaggtgccctggtacgcggtggaaaccctctacgacctgctctccggccgctacctggcgcttggcatgaagaacgaggagaaacaggcctacgacttcaactacagcgcatcggaaagcgactacaccccggcggcgctgcgccaggaaggggtacgctga

SEQ ID NO: 323431 - DNA, 1926 bp, Pseudomonas aeruginosa
atgacaacccgtaatccgttctcgcgtcgggcccggttgccgttggccgtcagcctggcttcctcgctggcggctccggcctttggggtgaccttcaacatcggggaaatcgaaggttccttcgactcggcgttgtcggtcggggccagctggtcgaccgccaagccgaacaagaacctgatcggtgtgaacaacggcggcaagggactttcccagacctccgacgacagccacttgaacttcaagcgtggggaaacgttctcgaaggtcttcaagggcatccatgacctcgaactgaagtacggcgataccggtgtgttcctgcgcggcaagtactggtacgacttcgagctgaaggacgagcaccgcgagttcaaggacatcgacgacagcggccgcaagaccctggccaagtcctccggcgccgaactgctcgacgccttcatctaccacaactatgccatcggcgacctgccgggcagcgtgcgcctgggcaagcaggtggtgaactggggcgagagcaccttcatccagaacggcatcagcgccatcaacccgatcgacgtcaccgccttccgccggcccggctcggagatcaaggaaggcctgatcccggtgaacatgttctacctgtcgcagaacctcaccgacaacctgtccgccgaaggcttctaccagatcgagtgggaccagacggtggtcgacaactgtggcaccttcttctcccagccggacgtggtggccgatggctgcgaccagaacctggcggtgctgaccaacaacaaggcgtccatcaacctgctcaacaacgtgctcgccggggctggcctgagcgttaccccgtcgccctgggacgagggcatcctggtccgccgcgggccggaccgcgacgctcgcgacagcggccagtacggcttcgccctgcgctacttcgccgacgaactgaacaccgagttcggcgcctactacatgaactaccacagccgcctgccgatcttcagcggccagggcgcctcggccagcaccatggcggcgatcaacgacctcgccacccgcctcgccgcgatcaacccggcactggccgcccaggccgcggcggcggccaccgccggcaactccagctacttcatcgagtacccggaagatatccgcatgttcggcctgagcttctccaccacgttgcccaacggcaccgcgtggagcggcgaagtcagctaccggcccaacgcgccggtgcagttgaacaccaccgacatcctcttcgccggcctcgacccggtgagcatcggcggcaaccgcccctacgacaacgcctcggtgctgaacggccaggccgggcaggacctgcacggctatcggcgcaaggagatcacccaactgcagaccaccctgacgcacttcttcgaccaggtgatgggcgccgagcgcctgaccctggtgggcgagatcggctggacccacgtcggcggcctggaaagcacctccaaggcacgctacgggcgtgacccggtcttcggaccggggccgctgccggggaccatctccggcctggccagctgccaggcgctgaacgtcagcacgctgggcaccgccgaagcgaacaacgtcagccgctactgcgagaacgatggctataccacctcggatgcctggggttatcgcgcccgtgcgatctgggactacaacgacgtgttcatgggcgtgaacctcaagcccagcgtggcctggtcgcacgacgtcgatggctattcgcccggtcccggcgccaacttcgaggaaggccgcaaggcggtcagcctgggggtggacgcggagtaccagaacacctacaccgcgagcctctcctacaccaacttcttcgacggcaagtacaccaccgtggacgatcgcgacttcgtcgcgctcagcttcggcatgaacttctga

SEQ ID NO: 323432 - DNA, 1683 bp, Pseudomonas aeruginosa
atgctgaagacccgtctcatcccggccgccgccggcgcttatcagtatccgttgctgatcaagagcctgatgctttccggccgtcgttacgaaaagagtcatgaaatcgtctaccgcgaccaggtgcgctacagctacgccaccttcaacgagcgcgtcgcgcgcctggccaacgtactcagcgaggccggggtgaaggccggcgacacggtggcggtgatggactgggacagccatcgctacctggaatgcatgttcgccatcccgatgatcggggcggtgctgcataccatcaatatccgcctctccccggagcagatcctctacaccatgaaccacgccgaggatcgcttcgtgctggtgaacagcgagttcgtcccgctctaccaggcggtggcggggcagctggccacggtggagcggaccatcctgctcaccgacggcgcggagaagagcgccgaactgcccggcctggtcggcgaatacgagtcgctgctggccgcggccagcccgcgctacgacttccccgatttcgacgagaactccatcgccaccaccttctacaccaccggcaccaccggcaatccgaaaggtgtgtatttcagccaccggcaactggtcctgcacaccctggcgatggcttcgaccatcggcagcctggacagcatccgcctgctcggtaccagcgacgtgtacatgccgatcaccccgatgttccatgtccacgcctggggcactccgtacgtggcgaccatgctcggggtcaagcaggtctatcccgggcgttacgatccggaactgctggtcgaactgtggaagcgcgagaaggtcaccttctcccactgcgtgccgaccatcctgcagatggtgatgaacgccagggctgcccagggcgtggacttcaagggctggaaggtgatcatcggcgggagcgcgctgaaccgctcgctctacgaggcggccaaggcgcgcggcatccagctgaccgccgcctacggcatgtcggagacctgtccgctgatttcctgcgcctacctcaacgacgaactgctggccggaagcgaggacgagcgcaccacctaccggatcaaggccggcgtgccggtgccgctggtggatgcggcgatcatggacgaacagggccgcttcctcccggccgacggcgagtcccagggcgagctggtgttgcgctcgccatggctgacccaggggtatttccgcgaacccgagcgcggcgaggagttgtggcgcggcggctggatgcacaccggcgacgtggcgaccctggacggcatgggcttcatcgagatccgcgaccgcatcaaggacgtgatcaagaccggcggcgagtggctgtcctccctggagctggaagacctgatcagccgccatccggcggtacgcgaagtggcggtggtcggggtgcccgatccgcaatggggcgagcgcccgttcgccctgctggtggtgcgcgagggccagcaactggacgcccgtggcctgaaggagcacctcaagcctttcgtcgagcagggcaacatcaacaagtgggcgatcccctcgcagatcgcggttgttaccgatattcccaagaccagcgtcggcaagctggacaagaagcgcatccgtatcgagatcgcccagtggcaggaagccggcagcgccttcctgtcgaccgtctga

SEQ ID NO: 323433 - DNA, 1176 bp, Pseudomonas aeruginosa
atgtccgatatcgtcatcgtcgccggcgcccgtactcccatgggcggcttccagggcagcctggccggcgtttccgcggtcgacctgggtgccgtcgcgatccgcgaagcggtgcagcgcgccggcatcgccgccgaggacgtacaggaagtgatcatgggttgcgtcctgcccgccggcctgaagcagggcccggcccgccaggccgcgctggcggccggcctgcccgccgccaccggctgcaccaccatcaacaagctgtgcggctcggggatgaaggcggtgatgctggcccacgacctgctcaaggctggcaccaaccaggtgatggtcgccggtggcatggaaagcatgtccaacgcgccctatgtcctggagaaagcccgcagcggcctgcgcatgggccacggcgagatcaaggaccacatgttcctcgacggcctggaggacgcccgtaccggccgtttgatgggttcgttcgcccaggagaccgccgacaagtacggcgtgacccgcgaggagatggacgcctatgccatcgaatcgctcaagcgcgcccaggccgccatcgccgatggctcgctggcggcggaaatcgtcccggtcaccgtcaccagccgcaagggcgagagcgtggtgaaggacgacgagcaaccgctgaccgccaacctggagaagatcccgagcctcaggccggcgttccgcaaggacggtaccatcaccgccgccaatgccagctcgatctccgacggcgcctccgcgctggtcctgatgaccgccgaggaagcccagcgccgtggcctgaagccgctggcgcgaatcgtcggccatgccacccagagccaggacccgagcgagttcaccctggcgccgatcggcgcgatgaccaacctgttcgccaggaccggctggagcaaggacgacgtcgacctgttcgagatcaacgaagccttcgccatggtcaccatgctcgccatgcgcgaacacggcctcgatcatgccaaggtcaatgtctatggcggcgcctgcgcccagggccatccggtcggttccaccggctcgcggatcatcctcaccctgatcaacgccctgcgccagaaaggcggcaagcgcggcgtcgcctcgctgtgcatcggcggcggcgaagccaccgccgtggcgctcgaactgctctga

SEQ ID NO: 323434 - DNA, 1182 bp, Pseudomonas aeruginosa
atgaaccgacctcgaaccgttatccgcttcatcaacgccgcgcatgtcatcgaccacatgttcatgctgatcttccccgccgccgtgctcggcatggccggcagcttcgacctcgactacgccggtctgatcggcctgtcgctgggcggtttcatcgccttcggcgcctgttcgctgccggccggctggctgggcgatacctggagccggcggcggatgatgctgctgttcttcttcggtatcggcgccgccgcactgctcaccgggctggccggcagcgtaccgatgctggtgaccgggctgaccctgatcggggtattcgccgcgatctaccacccggtcggcaccgcgatgctggtggcacacgcggagaaccgcggccgcgagatcggcatcaacggcatgtggggtaacctcggggtcgccttcgccgcgctgcttaccggctttctcaccgcgcacttcggttggcgtgcggcgttcatcctgcccggcggggtggccatcctgctcggcatcggctttttcttctgcgtgcgcgaggagccatcgccgcacctgtcggccaaggccgcggcgcgtggcgaggacagcgagggcctgtcgatgcgccgggtgttcggcgtgctggcgctggtcaccgccaccggcggggtggtgttcaacgccagcaccgtgacctacccgaagctgttccaggagcgcctgagcgacttgctggcgtcgccgcagaccctcggcgtggtggtcagcctggcctatgccttcggcgcggtggcgcaactgatcatggggcgcctgatcgatcgcctgaacctgaagttgccgttcgtcttcctcaccttctgccaggtgccgctgctgctggccctggcctacggccacggcagcgcagtggtgctgttcggcgcgctgttcatgttcgcggtgttcggccaggtgacggtgaacgatgcgatggtcgcccacttcgtcgcgccgcagtggcaggcgcgggtcttcgccctgcgctatttcctgtcgttcggcgccagcgcggcggcgatcccgatgattgcctacctggaaccacggcaggggctgctggggttgtacctggtactggcgggcttcgccgcgctgaccttcgccgcggcgctggtgtttccgcgtccggcgcgcagcgccgcggtgggcacctga

SEQ ID NO: 323435 - DNA, 789 bp, Pseudomonas aeruginosa
atgctgatcgagcaccgcccggacggcctgctggccgccatctccctcgacttccccgacggccatcacctggggcggcatttccacccgcaggcgcagttcctctacgccgctcgcggcctgatgcgcctggccacccaccacggcgcctgggtgatcccgcctacccgcgcggtatggattccgccccgggtggagcacgagatattcatgtccggcgaggtgcacatgcgcaccctgttcatcgagcaacccgaaacaccgacaccgctaagcgactgttgcgtactggcggtgacgccgctgctgcgggaaatgatcctgcgcgccatccacctcgagagccagccgcgcctggacgacttccgccagcgcctgcaagggctgatcctcagcgagatcgccaacctcgaacggatgccgctgtacctgccgatgccccgcgaccgccgcttgcaggcgatctgccaggcattgctgaaacagccggaactggggctgaccctcgatgactggggcctgcgggtcggcgccagctcgcgcaccctggcgcggctgttcgcccaggaattgcagatgagcttccatgagtggcgccagcaattgcgcctgaccgaagccctgccgcgcctgctggccggcgacagcgtgcaggtggtcgcccgcgacctcggctacggcagtacgcgggccttcagcagcatgttccgccgcctgctcggcgaaaccccgcgcgactacctggggcgactggagcaactggcacggatcaggggccgcgaggactga

SEQ ID NO: 323436 - DNA, 171 bp, Pseudomonas aeruginosa
atggtccgtacgccgagtcatcccgaacgagatagcgcggccaagccagcgctctggcgacgcctggcctggctggcgggtatctggaccgccagcgtgctggccctgggcgtcgccgcctggctgatgcgcctgttcatgagcgcggcggggctgggcgtcccgcactga

SEQ ID NO: 323437 - DNA, 1008 bp, Pseudomonas aeruginosa
atgggtatcgatcttcccctcatctgggcggtcatcatcatattcggcatcatgatgtacgtggtgatggacggcttcgacctgggcatcggcatgctctatccgttcttcaaggacagcggcgaccgcgatgtgatgatgaacaccgtggcgccggtctgggacggcaacgagacctggctggtgctgggcggcgcggcgttgttcggggccttcccgctggcctacgcggtggtcctgtcggcgctctacctgccgttgatcttcatgctcgtcgggctgatcttccgcggcgtcgccttcgagttccgcttcaaggccaagccggccaagcagcacatctgggacaaggcgttcatcggcggttcgctggtggcgaccttcttccagggcgtggcgctgggcgccttcatcgaaggcatcccggtggagaaccgcagcttcgccggcggttcgctggactggatcgcgccgttcccgctgttctgcggcctggccctgatcgtcgcctacaccctgctcggctgcacctggctgatcatgaagaccgaaggccgcctgcaggagcgcatgcacgacctggcgcgcccgctggcgttggtgctgctggcgatcatcggggtggtcagcctgtggacgccgctggcccatgccgagatcgccgcacgctggttcagcctgccgaacctgttctggttcctgccggtgccgatcctggtcctggtgaccttctatgcgctgctgcgctcggtggccaacaacgaccacgtgaagccgttcgtgctcaccctggtgttgatcttcctcggatacagcggcctggggatcagcctgtggccgaacatcatcccgccggcggtgagcatctgggaggcctcggcgccgccgcagagccagggcttcatgctggtcggcgcgctgttcatcattcccttcatcctcggctacaccgcctggagctactacgtgttccgcggcaaggtgaagcacggcgatggctatcactga

SEQ ID NO: 323438 - DNA, 1467 bp, Pseudomonas aeruginosa
atgttcggattggaggctatcgaccttgcccgcatccagttcgcgttcaccgtgtccttccacatcatcttcccggcgatcaccatcgggttggccagctacctggccgtactggaaggcctctggctgaaaacgaacgaagaggtctaccgcgacctctatcatttctggtcgaagattttcgcggtcaacttcggcatgggcgtggtgtccgggctggtcatggcgtaccagttcggcaccaactggagccatttctccgacttcgccgggtccatcaccggtccgctgctgacctacgaggtgctcaccgcgttcttcctcgaggccggtttcctcggggtcatgctgttcggctggaaccgcgtgggaccgggcctgcatttcttcgccacggtgatggtggcgatcggcacgctgatctcgacgttctggatcctcgcttccaacagctggatgcagaccccgcagggtttcgagatcgtcgacggccgggtgatcccggtggactggctggcggtgatcttcaacccgtcgttcccctaccgcctgctgcacatgtcggtcgccgcgttcctcgccaccgccttcttcgtcggcgcctcggccgcctggcacctgctgcgcgggcgcgacaacccggcgatccgcaagatgctctcgatggccatgtggatggcgctgatcgtcgccccggtacaggcgctgatcggcgacgcccatggcctcaataccctggagcaccagccggcgaagatcgccgcgatggaaggccactgggacaacagcagcggcgagccgaccccgctgatcctgttcggctggccggacatgcagcgcgaggaaacccgcttcaaggtggagatcccggtgctcggcagcctgatcctcaagcacagcctgaccgagccgatcccggcgctgaaggacttcccgccggaagaccggccgaactccaccgtggtgttctggtcgttccggatcatggccggcctcggcatgctgatgatcctggtcggcgtctggagcctgtggctgcgctggcgcggccaggacaagctgttcaactcgaaggccttcctgcgcctgaccctgctgatgggaccgtccggcctgatcgcgatcctcgccggctggttcaccaccgagatgggccgccagccctgggtggtctacggactgatgcgcaccgccgacgcctcctcggcgcagagcgtgacgcagatgagcctgaccctgctgaccttcgtggtggtgtacttctcgctgttcggcgtcggtatcggctacatgatgcgcctggtgcgcaagggcccggtcacccatgagggacgcgagaccaacccgggaggcgccgggcagaagcggacgccggcacggccgttgtcggccgccggcgaaggtttcgacgaagagcacgacggccacgcgcaagcggccgaccgcgaccaggacaagaggaactga

SEQ ID NO: 323439 - DNA, 780 bp, Pseudomonas aeruginosa
atgaaaaaactgctcctgctgactgccctggcctccgtcatcagcgtttccgccaatgcagcggaaaagctcctcgtcgccgccacgccgatcccccacgcggaaatcctcgagctgatcaagccgaccctggcgaaggaaggcgtcgacctgcagatcaaggtgttcaccgactacgtgcagcccaacgtgcaggtcgccgagaagcgcctggacgccaactacttccagaccctgccgtacctggagaacttcaacaaaggcaagggcaccaacctggtcaccgtggtcggcgtacacgtcgagcccttcggtggttattcgaggaaatacaagtcgctggccgagttgcccgacggcgccaccgtcgccattcccaacgaaggcagcaacagcgggcgcgccctgctgctgttgcagaaggccggcctgctcaagttgaaggatccgaacaacgccctggccacgcccaaggacatcgccgagaacccgaagaacctgaaattcaaggaactcgaatcggccctgctgccgcgcgtgctggaccaggtcgacctggacctgatcaacaccaactacgcgctggaggccaagctcaacccggccaaggacgcgctggtcctggaagaccgcgactcgccctatgtgaactacctggtggcgcgtcctgacaacaaggatagcgacgccctgaagaagctttccgccgcgctgaccagcccggaagtgaaagccttcatcgagaagaaatatgccggcgcggtggtcccggccttctga

SEQ ID NO: 323440 - DNA, 975 bp, Pseudomonas aeruginosa
atgagcgagaaaccacgccccgcgccgctgaccttccccgacgccgaccgcagtccgctgagcatccgcgccaaggccctggtgttcttcgacccacgctcgcaccgggtccgcgaagaactcgagcgcctcgcgccacagggccagccggtgctgatcgaaggcgagaccggcaccggcaaggagctgctcgccaggcagatccaccgccacagcgaacgcgccggtctgttcgtcgcggtcagttgcagcgccctcagtcgcaaccatgccgaagccgagctgttcggctacgctcccggcgcccataacggcccggtcggcagccgcgccggctggttcggttcggccaatggcggcaccctgtacctggacgagatcgccgacctgccgctgacgctgcaggccaggctgctacagacgctggaggaacgcgaggtgctgcgggtcggcgcgcagcagccgattccccatgacgtgcgcctggtcaccgccaccagcgtcgacctggaccaggcggtgcgcgccggcaagttcctggccggcctgcaacaatacctgcacgacggccgcctgagcctgccgccattgcgcgaacgtccgggagacatcctgccgctggcggaatacttcatcggcgtctatgcccagcgcctggacctgccggtgccggccatcggcgtggaaacccagcgggtcctcgagagctatccctggccaggcaacatccgcgagctggaaaacgtcgtccacttcgccctgctggtcagcgacaaggaagaaatcctgccgcagcatctgaattttggcggggcaacgccagacccatcgctggccggtctgcggcgcctgctcggccaagccggagcgccgtcgctggagcaggtacaggccctgctcctgcaactggccaccgagcaggcaggcggcgacgaggaggcgggaaggcggcgcctgggactggcggcgaactga

SEQ ID NO: 323441 - DNA, 921 bp, Pseudomonas aeruginosa
atgcgtgcagccctgctacccaccttcggcgccctctccgccgcgctctgcctggaggcccacgccgacgccgtcgcgctgccgccgctggcgctcggcaacaccagcttcatggacggcgtcagccgtcccggcatgctcttcgaactgcccctgcaatacgttcgggcgaacaacgccagcgatgccggcgggcattcggttcccggacggcaacgggttcgtggcaccacgctgttgccgcacttcgcctacctcagccagaacaccctgctcggcgcccactacggcgccgaagtgctgctgccgctggtacgcctggacctcgatatcgacggcggcccggacggccggcgcacccgccagggcgacctgatcgtcagtccgctgatgctgcaatgggggcccgctacgctgttcggccgcccctactggcagcgcctgaacttcgtcttctccctgcccaccggcgactacgacaaggacgccgcgatcaacaccggcagcaacacctggatcttcaacccgcactacgccttcacctgggaactgggcgagcgcctggaactcagcggccgcctgcactacgcctggatcagccgcaacgacgacccctcgccgcgcctgggcgcaaacgacgtacagccgggccaggcgctgcacgcgaacttctcgatctcctacgcgctggacccgcactggcggatcggcctggccggctaccagttgaaacagatcagcgccgaccgcatcgacgaccaccggcaggccgactcgcgcgagcaggtcttcggcataggcccgggggtgatgtacagccagggcaggcaaacgctgttcgccaacctctacgccgaaagcggcgcgcgcaaccgcagcgaaggcaaccaactgaccctgcgctacctgctggcgttctga

SEQ ID NO: 323442 - DNA, 1419 bp, Pseudomonas aeruginosa
atgcctgattcctccatgaagcgcggggctacgctctgccttgcccttgccataggtccgggctcgaccctcgccgacgactccctgggccatcgcgacaacatcagcaccggcctgaaccagcggcagaaagccgaaatgaaggtgccgccgggcttcgtcgaaggctcgacgctgaacggtttcatccgcaactactatttcgcccgcgacaaccacgacaccccgtcccgccgcgaccagcgcgaatgggcccagggcctgatgctgtcgttccgctccggctataccgacacgccgataggcatcggcctggatgcgcacgccttctacggcctgcgcctggacggcggtggcggcagcggcggtgccggcgtgctgccgctggactccgccggtcgccccgccgacagcttctccgcggccggcgcggccctcaagctgcgcggcctggacagcctgctgaagatcggcgaccagttgctggagaacccggtgatcgccagcggcgtcagtcgcatggtgccgcagagctaccgtggcgtgaccctgaagaactaccatttccgcgcgctcgaactggacgccggcttcgtcgaagccacccgcctgcgcaaccagagcggccacagtcatctcaccagcggctacggcaacggcaccaagggcggtatcgccgccgatcgcgaaagcccgcacatcgcctggctgggcgccagctacagcgcccccggcggcagccaggcgacgctctacagcggccgcctggaggatatctggaaccagcactacctcggcctcagccagccgtggcggctttccagccaattgaccctgacgccctggctgcattactacaagacccgcgaccagggccgcagccagctcggccggatcgacaacgacctctacaacgccggcctgaccctggccggcggcggccagtcgctgagcctcagcctgcaaaaggtcgatggcgacaccccgttcgacttcatcgcgcagaacgaccggaccttcctctacgaaagcaacgccatgcagtacgccgacttcaacggccccggcgagcgctcgtggaagatccagtaccaggccagcctggccttcctcgccgccccggactggcaattcggcgccgcctacggccgtggccaggccgacctgacccgggtcgacccggacagcgcgggctatggctacctctacaaccccaatggcaagaacgcccagcactgggaacgcgacctgtcgctgcgctacgccttccccgccggcccggccaagggcctcagcgtgaccctgcgctgggccacccaccgccccggcgaaggctacaccgcccccggcaacacccgcggcaactccagctccgacgaataccgggtggtggtcgactacccgatcaggttgctctga

SEQ ID NO: 323443 - DNA, 681 bp, Pseudomonas aeruginosa
atgagcgctcccgccaacttcaacggccagaccccgaagatcgatccggccaacgccgccatgttgctgatcgaccaccagagcggcctgttccagacggtcaaggacatgccgatgaccgaactgcgcgccaacgccaccaccctggccaaggtcgccaccctggcgaagatcccggtgatcaccaccgcctcggtaccgcagggccccaacggcccgctgatcccggagatccacgaggccgcgccgcacgcccagtacgtcgcgcgcaagggtgagatcaatgcctgggacaacccggaattcgtcgccgcggtgaaggccaccggcaagaagcaactgatcatcgccggcaccatcaccagcgtgtgcatggccttccccagcatcgccgcggtacacgacggctaccaggtattcgcggtgatcgacgcctccggcacctactccaagatggcccaggaaatcaccctggcacgggtggtccaggccggcgtggtgccgatggacaccgccgcggtctgctcggaaatccagcgtacctggaaccgcgacgacgccgtgcagttcgccgaagcctacagcgcggtattcccgcactaccaactgctgatcgagagctacgccaaggcccaggccgtggtcaacaaccacgagcaactggattcgcagcgcaagtga

SEQ ID NO: 323444 - DNA, 657 bp, Pseudomonas aeruginosa
gtgaccatcgtctaccagggcgaggtcgagcaccacgactccaccggcgccggcggacgcatagggccgggggatgtgcagtggatgacggcggcctccgggatcctccacgaggagtaccactcggaacgcttccgtagcacaggtggaacgctggaaatggtccagctatgggtcaacctgccctccagcgacaagatgaacccgccgcgctaccagaccctgctggatgccgacattccccgcgtcggcctgcccgacagggccggcgaactgcgggtgatcgccggacgctacggccgccaccaggggccggcgctgacccactcgccgctggcggtctgggacgtgcagctgaaggccggcaagcacctcgccctcgacctgcccaagggacatacctgcgccgtggtggtcctgcgcggcaccctcgcggtcggcgacgagatcgttcgcgaagcccaggtcgccctgctcgaccgcgacgacccgcggctggaactggaagccaacaacgacgtgcagttgctggtgctcagcggcgagccgctggacgagccgatcatcggctatggccccttcgtgatgagcagccgcgaggaaatcgaccaggccatcgaggacttcgagaacgggcgcttcatccgcgcccactga

SEQ ID NO: 323445 - DNA, 939 bp, Pseudomonas aeruginosa
atgagtggtgagctggtgttcgatctgaacgcgcttttcatctatgccaaggtggtcgagcacggtggcttcgcccccgccgggcgggtgctgggaattcccaagtcgaccatcagccgcaaggtcgcgcagctcgaggcgcgcctgggcgtacgcctggtgcagcgctcgacgcggcaattccaggtgaccgagatcggccaggcctactaccgtcattgcgtggcgatgacggtggaagcggaggctgccgaggacgtcatcgaacagaaccgctcggagccgtgcggaatggtccgcctgacctgctcgacgccgctgctgcacttcgaactggcgccgatgctggcgcgcttcatggcgcagtatccgaacgtcgagctgtatgtgaagaccttcaatcgccgggtcgacgtgatcgccgaaggctacgacatctcgctgtcgctgcgtttcccgccgctggaggacagcgacctggtgatgaaggtgctggcacgcagcccgcaggtgctggtggccagcccggagctgctggcccgctaccgcccgccggagctgccggccgacctgtcggcgatgccctacgtcggctgggagcgttcgcgcctggacggcagcctgcggctggtcggcgcggatggcagcagcgcggccctcaacctgcgcccgcaactgctcagcgacgacctcggcaccttgcgccaggcggtgctggagggcgtcgggatcggcggcctgccgctctgcgtggtcagtcgcgacctggccgagcgccggctggtgcgggtgctgccggagtggacgccggtggaaggcatggtggtggcaatgttcccttcgcggcgcgggctgttgccttcggtccgcgcgctgatcgactttctcgccgcaggcttcgccgacgccgcgcagcgccagtacccggcgccgggctga

SEQ ID NO: 323446 - DNA, 1602 bp, Pseudomonas aeruginosa
atgcctgatcgaaccgctctgccccgcgccatgctcgcagcctgggtcctgctcctgctggcggcctgcagccagggcccggcgcctaccccgcccgcgtcctcgtcctggggttggcaggacgccagcggcgaacgcgcgatcgcccccgacgaagcctatcccgagctgttccaggcggtgcaggaaagccggctgttcagcgaccagaagcacttcgtcgatgcgctcccgctgcgcgagcctgcacggatccgcgccgactacctgcgcgagagggagcggcccggcttcgacctgcgcgccttcgtcggccgcaacttcgaggatctcgccagccacatcagcgacctgtggccggcgttgacccgccactacgagcaggtgccggcccacagcagcctgctgccgctgccgaaaccctacgtggtccccggcggacgcttccgcgaggtgtactactgggactcctacttcaccatgctcggccttgcggagagcgggcagcaccagcgggtgcgcgacatgctcgacaacttcgcctacctgatcgatacctacgggcacattcccaacggtaaccgcagctactacctgagccgttcgcagccgccgttcttcgcctacatggtggacctccaggcaagacgcgaaggcgacgccgcctaccggcgctacctgccgcagctacagaaggaatacgcctactggatggaaggctccgccgggctgcgccccaacgaggcgcgcctgcacgtggtgaaactggccgacggcagcctgctgaaccgctactgggacaaccgtgacacaccgcgccaggagtccttcctggaggaccgggcgaccgccgcgcgcgccccgcagcgccccgcgggcgaggtctatcgcgacctgcgggccggcgcggaaagcggctgggacttctcctcccgctggctggacgacggccgcgagctggccagcatccgcaccaccgccatcgtcccggtggacctcaacgccctgctctaccatctcgaacgaaccatcgccaaggcctgcgccagcagcgcgctgaaggcctgcgagcaaggctacggagcccgcgcggagaagcgacgacaggccatcgaagaccacctctggcacccggcgggctactacgccgactacgactggcaacgccggcggcccatcgagcggatcaacgccgccagcctcttcccgctattcaccgggctggcctccgccgaacgagccggtcataccgccgacagcgtcgccgcccaactgctgcgcccgggcggactggccaccaccacccgtgccagcggccagcaatgggacgagccgaacggctgggcacccttgcagtgggtcgccgtacagggcctgcgcgcctacggccgggacgccctggcggaagacatcggccggcgattcctcgcccaggtgcagcaggtctacgaccgcgaaggaaaactggtggagaaatacgacatcagcggcaaccagggcggcggcggcggtggcgagtacccgctgcaggacggcttcggctggtccaacggcgtgaccctgcaactgctccgactctacgacccgggcgccggtcgctga

SEQ ID NO: 323447 - DNA, 426 bp, Pseudomonas aeruginosa
atggccaccgcactacgcttcagaccgctggacgccttctacaacgtcctcaacccggttcccttcggtttcttagtcgccgccctggtcttcgacgccacctatttcgccacggcggaggtgatgtggggcaagagcgcggcctggctgatcagtctcggcctgctgttcgccatcctgccctgcgtcgtcgacctgtgccgcgtatggctgctgcggcgcgcggcagtcgtcgcggcggccagggtttcctccttgctgaagttcgccggcatcgtcctggccatcttcaatgccttcgtgcacagccgcgacgcctatgcggtgatgccggccgggctatggctgtcgatcgcgacggtgctgctgctggcgctgggagaggcgctcctggcggtatccgcggaggaggtggcgcatggctag

SEQ ID NO: 323448 - DNA, 1320 bp, Pseudomonas aeruginosa
atggctagcctccactcgctgcgccccgtcgcgcttgccctcggcctggtcctggccggctgcaaccaggggtcgcagaacgatccgcagcagcagaccggcgccaatccggcgcttccggaaccgaagcacttccttctgccgccgatgaaggtaccggaaggcgtgggctggtcgggagaggccaagccgacggtggcccagggcctgaagatcgagaagatcgccgatggcctgcaacaccctcgccagttgctggtcttgcccaacggcgatgtgctggtggtggaggccaactcgcccggcaccgcgccggtgaccacgccgaagcaactcatcgcggggatggtcaaggggaagtccggcaaggccggcaagggcggcaaccgcatcaccctgctgcgccgagccggcgccggaggccagtggcagaagtacgtgttcctggaagggctggactcgccgttcggcgtgcagcgggtgggggattacctgtatgtcgccaataccgggaacatcatgcgctaccgctacgtgccgggtgaaacccgggtcgccgacccggggatggagttcaccgacctgccggacaccatcaaccaccactggaccaaggcgctgctcgccagtcccgacgggcgcaagctctacgtgggcgtcggttcgaacagcaacatcaccgagaacggcgcggcgatcgaataccgtcgtgcggcgattctcgaggtggacgtcgccagccgcggcagccgcatctacgcctccggcctgcgcaacccgaccggcctgcagtgggaaccggtctccggcaagctgtggaccatcgtcaacgagcgcgacgagatcggcaacgacctggtcccggattacctgacctcggtacgggagggcggcttctacggctggccctacagctacttcggccagcacctggattcgcgggtgaagccgcagcgtcccgacctggtggcgaaggccatcgtccccgactacgcgctgggttcccacgtggccgcgctgggcctgttcttctacaccggcgacgagttgcccgagcgctatcgcaacggcgccttcgtcagcgagcacggcagttggaaccgctcgccggtcagcggcttccaggtggtccatgtgccgttcgccgacggcaagcccgccggtgcgccgcagccggtggtgaccgggttcgtctccgcggacgagaagcagttgttcggcgcgccggtggggttggcgcaggcggccgacggcgcgttgctgatcgccgacgacgtcggcaacgcgatctggcgggtgagcgccgcgggcgccgactag

SEQ ID NO: 323449 - DNA, 1410 bp, Pseudomonas aeruginosa
atgcacgtcgccaccagcgtcatcgaagaccagccgctccgcgccaccccggcggagggcgaaacgctctacgagttctcccagtcgcccttgctggaacggcaaagccgccaggagtccaacgcgcgcagctatccgcggcggattccgctggcgctgaagaaggccagggggctgctggtggaggacgtcgaggggcgtaccttcatcgattgcctggccggcgccggcaccctggcgctggggcacaaccatccggtggtgatcgaggcgatccgccaggttctggccgacgagctgccgctgcacaccctcgacctgaccaccccggtgaaggaccagttcgtccaggacctgttcggcctgctgccgccggcgctggccgccgaggcgaagatccagttctgcggcccgaccggcaccgacgcggtggaagccgcgctgaaactggtgcgcaccgccaccgggcgcagcaccatcctgtcgttccagggcggctaccacggcatgagccagggcgcgctggggctgatgggcaatctcggaccgaagaagccgttgggcgcggtgctcagcacgggcgtgcagttcctgccgtatccctacgattaccgttgcccgttcggtctcggcggcgaggcgggggtcaaggcgaacctgcactatctggagaacctgctgaacgatccggaaggcggcgtgcagttgccggcggcggtgatcgtcgaggtggtccagggcgagggcggcgtggttccggccgatctcgactggctgcgcggcttgcggcggatcaccgagcaggccggggtggcgctgatcgtcgacgagatccagagcggcttcgcccgtaccggcaggatgttcgccttcgagcacgccggcatcgtccccgacgtggtggtgctgtccaaggccatcggcggcagcctgccgctggcggtggtggtctaccgcgaatggctggacaaatggcagcccggcgcccacgccggcaccttccgcggcaaccagatggccatggccgccggttcggcggtgatgcgctacctgaaggaacacgacctggcggcccacgcggcggccatgggcgagcgcctggccgagcacctgcgcatcctccagcgcgactatccgcaactgggcgatatccgcggtcgggggctgatgctcggggtcgagatcgtcgacccgcagggcgaggcggatgccctcggtcatccgccgaccgacggcgccctggcctcgcgggtccagcgcgagtgcctgaggcgcggcctgatcctcgaactgggcggccgccacggcagcgtggtgcgcttcctgccgccgctgatcatcggcgccgaacagatcgacgaggtggcccggcgtttcgcccgcgccctcggcgcggcgctggccggctaa

SEQ ID NO: 323450 - DNA, 219 bp, Pseudomonas aeruginosa
atgacttcagtgttcgaccgtgacgacatccagttccaggtagtggtcaaccatgaggagcagtattccatctggccggaatacaaggagattccccagggctggcgggcggccggcaagagcggcctgaagaaggactgcctggcctacatcgaggaagtctggaccgacatgcgcccgctgagcctgcgccagcacatggacaaggcggccggctga

SEQ ID NO: 323451 - DNA, 765 bp, Pseudomonas aeruginosa
gtgggcggtacgcccgtacggctgttctgcctgccgtattccggcgccagcgccatgacctacagccgctggcggcgcaagctgccggcctggctggcggtgcgtccggtggagttgccggggcgcggggcgcggatggccgagccgttgcagaccgacctggcgagcctggcgcagcaactggcgcgcgagctgcacgacgaggtccgccagggcccctacgcgatgctcggccacagcctcggcgccttgctcgcctgcgaggtgctgtatgccttgcgcgaactgggttgcccgacgccgctggggttcttcgcctgcggcaccgcggcgccgtcgcgacgcgccgagtatgaccgcggtttcgccgaaccgaagagcgacgccgagctgatcgccgacctgcgcgacctgcaaggtacgccggaagaggtgctgggcaaccgcgagctgatgagcctgaccctgccgatcctgcgcgccgatttcctgctctgcggcagctatcgtcaccagcggcgcccgccgctggcctgtccgatccgaacgcttggcggcagggaggacaaggccagcgaggaacagttgctggcctgggccgaggaaacccgcagcggtttcggactggagctgttcgacggcgggcacttcttcatccatcagcgcgaggccgaggtgctggcggtcgtcgagcgccaggtcgaggcctggcgcgcggggcagggcgccgcggcgttggtggtggagtcggcggcgatctgctga

SEQ ID NO: 323452 - DNA, 909 bp, Pseudomonas aeruginosa
atgaacctgaaaccccattgcctcgccctggccctggcttgcgccggcccgctcccggccctcgccgcgacgtcggccgcggcccagtccgcgccagtcacggtactggccagcctgccggtcacccacgccctcgccgaacgcctgctgcgggacaccgaggtcaagctgcaacgggtcgccccggccaacctgccggccagccgccaggcctcgttcttcgccgggcgcggcgccggcggcctggccaaggccgccgggcaggccgacgcggtgatcgacctgcgctcgatctggagcgacgacccgctctacccgctggcccgccgtagcaatatccgtatcgtcgagatcgacgccgcgcgtccggtggacggcgccctgcccggcatcgccctgcgccccggcagcgacctgcatgcctacccctggctcaacccgaccaacctggggcgcatggccgatgtccttgccagcgacctggaacgcctggcgcccggcgccgcagcgaccatccaggccaacctggcgacgctgaagaagcaattgctggaagcgaccgccagcaacgagactcgcctggcgaaggccgacaacctcagcgtgatcagcctctccgaacgcctcggctacctgctcgccgggctcaacctggacccgctggacgtggagatccaggccgacgacggctggaccgagaccaatatccaggctttcgccgaggagctgaagagcgaggacatcgccctggtcctgcaccatcgccagccacccaagcccctcgccgatgccatcgccgccagcggcgcacgcctggtagtggtggacaccgaggcggcggacccggtggccggcctggaaagcgacatgaaagcgatagtcgaagggctgctggccggtaaaggctga

SEQ ID NO: 323453 - DNA, 906 bp, Pseudomonas aeruginosa
atgaacgacgcctacgaacaactgcgccaggccgtccaggcctgggccgccgccggctacctgccggagaccctggcctacggcttcgtcgtcaacgcgctcctcgccggcctgctgatcggcccggtgctcggcggcctcggcaccctggtggtggtcaagcgcttcgccttcttctccgaggcggtcggccacgccgcgctcaccggcgtggccatcggcatcctcctcggcgagccctacaccgggccctacggcagcctgttcggctactgcctgctgttcggcgtcctgctcaactacctgcgcaaccgtaccggcctggccccggacaccctgatcggggtgttcctctcggtgtccctggcgctcggcgccagcctgctgctggtgctggcgggcaagatcaacgtgcatatcctcgagaacgtgctgttcggctcggtgctgaccgtgaacggccatgacctcgcggtgctggcggcggtcgccgtgctggtgccgtgcctggccctgccgctgtacaaccgcatcatgctggccagcttcaacccgcaactggcggcggtgcgcggggtcgcggtgaagagcctggactacctgttcgtggccctggtgaccctggtcaccgtcgccgcggtgaaagtgatcggcgcgatcctggtcggagccctgctggtgatcccggcggcggcggcgcgcctggtcagccagtcgctgaaagggttcttctggctggcggtgctgatcgccaccgtcagcacgctggccggtatcctgttgccgatcatgttcgacctgccgattccctccggcgccgcgatcatcctggtcgccggcctggccttcggcctcgccgccatcgctcgcggctgcctgccgcacctgaaaggaacccccggatga

SEQ ID NO: 323454 - DNA, 756 bp, Pseudomonas aeruginosa
atgaccgtagccgaacggctttgcgccacgccttgcgggccggccatcgagttcgccgggatcgacctgagcctaggcggcagccgcatcctcgatggcgtgcgcctgcgcgtcgaggccggcagcgtgcacgcgctggtcgggccgaacggcggcggcaagagttcgctggtcaagaccctgctcgggcagatgccgcatcgcggcgagctgcgcctggagtggcccggcgcgcccggctgcatcggctacgtgccgcaggcgctggagttcgaccgcggcctgccgctcaccgtcgacgatttcatggctgccatgtgccagcgccgtccggccttcctcggcctgtcgcgcagccggcgcccggcgatcgacgcggccctggaacgggtcggcatgctggccaagcgcggtcggcgcatgggcgccctctccggcggcgagcgccagcgcgtgctgctggcgcagggcctggtaccgccgccgcaactgctggtgctggacgaaccgatgtcggccctcgacgagggcggcatccaggtcttcgagcggctgctgctggactggcgccaggccggcgtcaccgtgctctggatcgagcacgacctggaggccgtcggccgcctcgccgaccgggtcagcggtctcaaccgccacctgctgttcgacggtccggcggccagcagcctgaccccggaacgcctgctcacgctgttctccacccagccccggaagaacgcggaggccagccgatga

SEQ ID NO: 323455 - DNA, 954 bp, Pseudomonas aeruginosa
atgctgttctcccgtcgctcatcccgtccgcgcggcctcgccgccctcctcccgggccgtgccctgctggccgccctgctgctggccctgctcgccccgctggcccaggccgaagacggcaagcgcctgcgcatcggcatcaccctgcatccctactacagctacgtgagcaacatcgtcggcgacaaggccgaggtggtgccgctgatccccgccggtttcaacccgcatgcctacgagccgcgcgccgaggacatcaagcgcatcggcacgctcgacgtggtggtgctcaacggcgtcggccacgacgatttcgccgagcgcatgatcgcctccagcgaaaagcccggcatcccggtgatcgaggcgaacgccaaggtgccgctgctggccgccaccggcatggccgcgcgcggcgccggcaaggtggtcaacccgcacaccttcctgtccatcagcgcctcgatcacccaggtcaacaccatcgcccgcgaactgggcaagctcgacccggccaacgccaaggcctacacccgcaacgcccgggcctacgccaagcgcctgcgggccctgcgcgccgacgccctggcgcggctgaacaaggccccggccgccgacttccgcgtcgccaccatccacggcgcctacgactacctgctgcgcgaattcggcctggaagtcaccgccgtggtcgagccggcccacggcatcgagccgagtccgagccagttgaagaagaccatcgaccagctcaaggcgctggacgtgaaggtgatcttctccgagatcgacttcccctccacctacgtcgagaccatccagcgcgagtccggggtgaagctctattcgctgtcgcacatttcctatggcgactacagcgccggcaagtacgaggaagaaatggcgcgcaacctcgacaccgtggtccgcgccatccaggagtccggcgcatga

SEQ ID NO: 323456 - DNA, 561 bp, Pseudomonas aeruginosa
atgagcgtcgaaaccgtccgcccggccggcgccggccacgagaccctctacgtactgctcggcagcgtgctgatcctggccctcgccgccacggtggtcgggctgcgccagcagtcccatgaagcgcaagccctggacgcccaccaggtggacgcccggctcgacctgaatgccgccgaacagggcatctacgccgacctgcaggtcgccgccgaagacatccaggcgcgcctggacgacggcgaagccgcgccctccgtcgacgaactggccgccgagggcttcccgcccttcgtcgccgacgtcgccgcaagcagccgcggcgagcaccgctggagccacggcgaaaccgccgggcgtccgagctacctgggcgtcagcggcaagcccggggtggccggctcgttcctcctgctgctcggccccgccgaagtctggctgaagcccgccacggccgctgccggcgccgtaccgggcgacgcccgagccctggccgacgccggctggcgccaggtggtcagccgcttcgacgccggcgtgacccgtcagcaccgccattga

SEQ ID NO: 323457 - DNA, 330 bp, Pseudomonas aeruginosa
atgagcatccacacccgtccctggcgcctgcccctggccgccctgttgctcggcctgagcggcgcggccctggcgcacaacccgatctgcgaatgcgaggaagtgcaggccggcgagatccgctgcaagggcggcttctccgacggcagcggcgcccccggcgtaaccctcgacgtgatcggctacgacgagcagatcctggttcccggcaagctcggcgccgactcgaccctgaccttcaagcgtcccgacggcgagttctacgtgctgttcgacgccggccccggccacgtggtggaaatcgaccacgccgacatcgccgcgccatga

SEQ ID NO: 323458 - DNA, 540 bp, Pseudomonas aeruginosa
atgagcaaggccgccgttgcccagcccgtttcgccgctgcgccagttctggctgcgctggcgtttccacctgaacgttctgctgatcctgatcccgctcggtttcatgccacgttatttcgccgacatggcgttgttctctggcagcagcggactgggtgaacgcgagatcggcgaagtccaggtaggcccctggagtctcaagctcgccgaatggcgtatcgaaccgccgcacgacgaaggccccgccggcttcatgaaggacttcaatgccgccctctgccaggcctgcattccccaggtcaaggcgacctacctgcgcatcggcaagccgcgcagcctgcgtgccgccggggtgatcttcttcggcagcccctaccgcatgggcaccagcgtgccgatcccgccgcgcacccggcccgatgccgagctgtggatcaccatggaaggctgggacggctccatgcaccaggcttccattcccctggccgaggcatcccccgccaccgtggcctggctgaacaaacgaggtaagcaatga

SEQ ID NO: 323459 - DNA, 501 bp, Pseudomonas aeruginosa
atgcagggtcaacagcagcacatgccgctcctcgcccaggcggatcaggcggacccgcagcaacggcccctcgcacaggtcgaacggctgcaacgactcgcgctgcgcctcctcgcgcaggcgggcttcctgctcggcctcgggcaggccgctgcaatcctcgaaggcaacctccagcgggcgttgcaggggcgcctgcgccaggctgtcgtcggcgccgcgcgggaacaccgtacgcagggtttcatgacgctgcaccaggctggcgaaggcgcgctccagcgcctggcgatccagcggtccgttcaggcgcaccgcgctgggcaggttgtaggcgccactctgtggctccaggtgccagaggaaccacatgcgctgctgggcgtaggacaggcggtcgcgctcggccgaagacacgccggccggaatcgggaacagcgagaaatcgattccctcacctcgcagggtttcgaggaagacccgacgcttctcaacgggtag

SEQ ID NO: 323460 - DNA, 435 bp, Pseudomonas aeruginosa
atggagcgtgccgggcaatccgagcggggctcgatcaccgcgctctacaccgtgctggtggaaggcgacgacatgagcgagccggtggccgacgagacccgctcgattctcgacgggcacatcgtgctgtcgcgcaagctggccgccgccaaccactatccggccatcgacgtgctgcactcggtgagccgggtcatgaaccagatcgtcgacgacgatcagcgccatgcggccggacgcttgcgcgaatggctggcgaagtacgaggaagtcgagttgctgctgaagatcggcgaataccagaaaggccaggacagtgaagccgaccgggccatcgagaagatcgcggcgatccgccagtggctgcgccagggtacccacgaaaccagcgattacgcacaggcctgcgcgcagttgcggagcctctgcgcatga

SEQ ID NO: 323461 - DNA, 477 bp, Pseudomonas aeruginosa
atgagcctggcgctgctgttgcgcgtccgacgcctgcgcctggaccgggccgagcgcgcccagggccgccaattgctacgggttcgcgccgcggcgcaggaacacaccgagcgccaggcggcgcaacgggactaccgcgactggcgactggccgaagagcaacggctgtttctcgcctgccaggcggctatgctcgaccgccggcgcctggaagcctggcagcagcaggtagggctgctgcgggaaaaggaagccggcctggaacaggactgcgccgaggccgcgcagcgcctcgaaggggagcgcgagcgcctgcggcagtgccggcgagagctgctggaacgccagcggcaactggagaagttcgccgaactggagcgccacgtcgacgccgagcgccaggggctgcgcgaacgcagcgaggaaggcgaactggaagaattcacccgccacgagacctggccatgctcaagctga

SEQ ID NO: 323462 - DNA, 399 bp, Pseudomonas aeruginosa
atgcaaacccccggcgaccgcctgctggcacgcctgctggcatcgagcgggagccggccactgccgctggccgatctcgcgcgcctgctcgatgccgtgcaggcgcgcatccaggtcgccagcgcagccgaaagccatgcggcgcgcctgcaggtgcaactgccccagctcggcgccgtggaggtgcaggtcctgcatggccatggccagttgcagatcgagatcagtgccagccccggcagcctggcgttgctccagcaagcccgtggcgagctgctcgaacgcctgcaacggctgcatccggaacaaccggtgcaactcaccttcaatcagcagcaggacagcggtcagcgctcgcggcaacgtcgctacctgcatgaagagtggcaagccgaatga

SEQ ID NO: 323463 - DNA, 930 bp, Pseudomonas aeruginosa
atgaacggtgcggacctcgacctgccgctcgccagccgcgccgaactggatctccagcgacgtctcgcacgttgccgtcgccactatgtcggcaacgctttgcaagcgcgcctggacatcgcccaggccgcccccgacgtcgatctcgaactgagcctggcgtgggacggcctgcccctgcgctttctctgccaggctccggcgctcgcccactggctcgcgccgaacctgcaggaggcagccttcgccagcctgccggcggccctgcaactggccttgctggagcgcgaaggcaacgtctttcccggcctggtctggtacggcctgagcccggcgcaaccacgcgctgcgatgggcctgcgcctgagcctggaacgcgacgaccagcgcctggcgctctggctcgacggcgatcccgcgacgctgctggcacgcctgccgccgcgcccctcggcgcaacgcctggccataccgctgcgcctgtcgatgcaatggcccggcctgccgctggacgccggcgagctgcgcaccctggagcccggcgacctgttgctgctgcctgccggtcatcgccccgacgcagcgctgctgggggttctcgaaggacgcccctgggcgcgctgccaactccactccacgcaactggaactgctcgacatgcacgacacccactccctcgccgacggcgaggacctgcacgaactcgaccaactgccgatcccggtcagcttcgaggtcggccgccgcaccctggacctgcataccctctccaccctgcagccaggctcgctgctcgatctcgacagtgccctggacggcgaagtgcgcatcctcgccaaccagcgctgcctcggtatcggcgaactggtcaggctccaggatcggctcggggtgcgcgtaacccgcctgttcggacacgacgaagcatga

SEQ ID NO: 323464 - DNA, 654 bp, Pseudomonas aeruginosa
atgatccagttgcccgacgagctcggcctgatcctcggcctggccctgctcgcgctggtcccgttcatcgcggtgatggcgacctccttcatcaagatgaccgtggtcttctcgctgctgcgcaacgccctgggcgtccagcagattccgccgaacatggcgatgtacgggctggcgatcatcctcagcctgtacgtgatggcaccggtcggcttcgccacccgcgactacctgcgcaaccacgacgtcagcctgagcgactcggcatcggtggaacgctttctcgacgagggcatggcgccctaccggaacttcctcaagcggcagatccaggagcgcgaacacaccttcttcatggaaagcacccgccaggtctggcccagcgaatacgccgagcggctcgacccggacagcctgctgatcctgctgccggccttcaccgtcagcgaactgacccgtgccttcgagatcggcttcctgatctacctgcccttcatcgccatcgacctgatcatctccaacatcctcctggcgatgggcatgatgatggtgtcgccgatgaccatttccctgccgttcaagctgctcctgttcgtcctcctcgacggctgggcgcggctgacccacggcctggtcatcagctacggaggctga

SEQ ID NO: 323465 - DNA, 267 bp, Pseudomonas aeruginosa
atgagcagcgccgacatcctccacttcaccaaccagaccctgtggctggtgctggtcctgtcgctgccgccggtactggtcgcggccctgatcggcaccctggtatcgctggtccaggcgctcacccagatccaggagcagaccctcggcttcgtcgccaagctggtggccgtggtggtggtactgttcgccaccagcggctggctgggcggcgagctgtaccgtttcgccgaaatgaccctgctgaaggtgccgctggtgcgatga

SEQ ID NO: 323466 - DNA, 789 bp, Pseudomonas aeruginosa
atgagcgtccaggacctgcagcaactgctgctgacctacagcctgctgctgccgcggatcatcagttgcttcgtggtcctgccggtgctggccaagcagaccctgggcggcggcctggtgcgcaacggcgtggcctgttcgctggcgctgttcgcctacccgatcgtcgccggcagcctgccgccggccctcggcgcgctggacatcgccctgctgatcggcaaggaagtgctgctcggcctgctcatcggcttcgtcgccaccattcccttctgggccatggaagcgaccggcttcatcatcgacaaccagcgtggcgcggcactcgcctcgaccttcaaccccagcctgggcagccagaccagccccaccgggctgttgctgacgcagacgctgatcaccctgttcttctccggcggcgccttcctcgcgctggtcggctcgctgttcaggagctatgccagttggccggtgagcagtttcttcccgcagctcggcagccaatgggtggcattcttctacgcgcagttctcgcagatgctgatgctctgcgcgctgttcgccgcgccgctgctgatcgccatgttcctcgccgagttcggcctggcgctggtcagccgcttcgccccgtcgctgaacgtgttcatcctcgccatgccgatcaagagcttggtggccagcctgctgctggtgctctacctgggcatcctcatggagcacgcctacgatgccctgctgctcgccgtcgacccgctgcgcctgctgcgtcccgtgctggagacgccatga

SEQ ID NO: 323467 - DNA, 1050 bp, Pseudomonas aeruginosa
atgagcgccgagaagaccgagcagcccacggcgaagaagctgcgcgacgcccgccggcaaggccaggtggtgaagagcaaggaaattgtctccagcgcgttgatcctgtcgctggtggcgctgctgatgggcttttccgactactacctggagcatctcggcaagctgctcctgctgcccgccgagtacatcgacctgccgtttcgccaggcgctggagaccatcctggagaaccttctccaggagctcctctacctgctggcgccggtcctgctggtcgcggcgctggtggtggtgctcagccatgtcggccagtacggtttcctgctcagcctcgacagcgtcaaaccggacctgaagaagatcaacccggtggagggcgcgaagaagatcttctcgatccggagcctggtggagttcctcaagtcgaccctgaaggtcgccctgctctccctgctggtctggttgaccttgcagggcaacctggccagcctcctgcggattcccgcctgcgggctggactgcgtggcaccggtgagcgggctgatgctcaggcagctgatgctggtctgcgcggtcggcttcctggcgattgccgtcgccgactacgccttcgaacgccaccagcactacaagcagttgcgcatgagcaaggacgaagtgaagcgcgagtacaaggagatggagggcagtccggagatcaagagcaagcgccggcaattccatcaggaactgcaatcgagcaacctgcgcgcggatgtccggcgctcctcggtgatcgtcgccaacccgacccacgtcgccatcggcatacgctatcgacgcggcgaaacgcccctgccgctggtcaccctgaagcacaccgacgccctggccctgcgggtccggcgcatcgccgaggaagaaggaatcccggtgctgcaacgaattccgctggcacgggctctgctgcgcgacggcaatgtcgaccagtacataccggcggacctgatccaggccaccgccgaagtcctgcgctggctggaaagccagcagacggatacgccctga

SEQ ID NO: 323468 - DNA, 2103 bp, Pseudomonas aeruginosa
atggaccaaacggaagtccgaaccacccaatcgcccccacggctgttccagcccaccatccgcagccacctggcgttcaccgcgctcagcgcgctggtgctgctggtcatgttcagcctgctgcgcctggccttgctgatctacaaccgcgaactgatcggcgcgaccccggcgagcaccttcctcgaggcgttcggcaacggcgtgcgtttcgacctgcgggtcgtcgtctatgccgtggcgccgctggtgctgtcgttgttcgcggtacgcgcgatggccgctcgcggcctgttccgtacatggttgacgctgttcgccagcatcaccctgttcctcggcgtactcgaactggacttctaccgtgagttccaccagcgcctgaacagcctggtcttccagtacatgtcggaagacccgaagaccgtcatgagcatgctctggtacggcttcccggtggtccgctacctgctggcctgggccttcgccacctgggtgctgtaccgggtgttcaaggccatcgacctggcgacccgcccgagccagcgcaagccgcgcgaagacagcgtgatcgcccggccgagcgctgccgcgccctggtacgtgcgcggcgtggtgctgttcctctgcgtgctggtctgcgtcctcgccgcccgcggcaccctgcgccagggcccgccgctgcgctggggcgatgccttcaccaccgagtccatgttcgccaaccagttgggcctgaacggcaccctgaccctggtcaaggcggccaaggagcgcttctccgaagaccgcgcgaacatctggaaggccaccctggacgacaaggtcgccctggagaccacccggcagatgttgctgacccccaacgacaagctggtggacgccgatgaggccgcggtgcgccgcgagttcaccccgccggcggcgaataccctgccgatccgcaacgtggtggtggtcctgctggaaagcttcgccggccactatgtcggcgccctgggcgcgccgggcaacatcacgccgtatttcgacaagctgtcgaaggaaggcctgctgttcacccagttcttctccaacggcacccatacccaccagggcatgttcgccaccatggcctgcttccccaacctgccgggcttcgaatacctgatgcaaaccccggagggcggccacaagttctccggcctgccgcagttgctcagcgcccgccagtacgaggacgtctacgtctacaacggcgatttcgcctgggacaaccagtccggcttcttcagcaaccagggcatgaccaccttcatcggccgcaacgactatgtcgacccggtgttctccgatccgacctggggcgtctccgaccaggacatgttcgcccgtggcaacgaggaactggacaagctggcgagcaccggcaagccgttctatgcgctgttgcagagcctctccaaccacgtgccctatgcgttgccgaaggacctgccggtggagcgcgtgaccggctacggttcgctcgacgagcacctgaccgccatgcgctattccgactgggcgctgggccagttcttcgagaaggcgaagaagtcgccgtactacaaggacacccttttcgtggtggtcggcgaccatggcttcggcagccccgagcagctcaccgagatggacctgcaccgcttcaacgtgccgctgctgctgatcgcccccggcatccaggagaagttcggtacccacctgccgaccgtcggtacccaggtcgacatcgtgccgaccatcatgggcctgctcggcggcgagaccgtccaccagtgctggggccgcgacctgctgaacctgccggaaggcgacaagggcttcggcgtgatcaagccgtcgggcagcgagcagaacgtcgccatcgtctccggcaaccgcatcctggtgcggccgaaggacggtgacgtgcgcgtctacgattaccagctgggcggcgatgccaaggcggtgatcaccaaggaagtgccggaccaggccgagctgcagaagaagctggagtcgttcatccagaccgcgaccaagagcctgctggagaataccgcgggcgtggtacacgggatcccggacaaggactga

SEQ ID NO: 323469 - DNA, 870 bp, Pseudomonas aeruginosa
atgctgaccaaacgattgcgccagagcggcgtagtagtctcctgcctgctcggtagcgtcctcttcatcgccctggccttcctcggctggcagcgtttcgccccggcagccaccgtgtccggctggacctaccgggtggtgctcgaggacattccccacgtcagcgccctggcccgcgacccggacggcctgctctacgtgagccaggagttgcaggacggcaagggcctggtgttccgcatcgccgccgatggcagccgcgatacggtgctcgacgggctgtccaagcccgacggcatggccagcttccgcgacggcatcgcgatcagccaggagcagggcgcctcgccggtgttctggtggcattcccagcaggcccggccgctgttcgacggcatccaggtggagggcgtcgccagcgacggccgctacctgtacgccgccgaggatcgcgacctggacgggcggattctccgctacgacccggagaccggcggactgacgatactgcgcgagggattgcagcgctccgaaggggtggccgcctgcccggacggaagcgtcttctacacggaaaagaaacgtggccacgtcatgcgtctgcatgagggggccgaggacgaggtggtgctgaacggactgaatgcaccgagctttttgctgtgcgacagcgaaggcctgtggatcaccgaggactcgacgcataacgcgcgagccttgctgctgccgcccgacgggccgctgcaggtgatcgtacggcgcctgcgttccgcacagtccctactgcccatcgggtccggccgctacctgctggccgagcaggggcgggaccgcattctcgaaatcgaacgacagaagagcgaattgtaa

SEQ ID NO: 323470 - DNA, 861 bp, Pseudomonas aeruginosa
atgagcgattatcaggaaactttgtaccagggctacggccagcgcttcagcatcgacaacatgctgcatgaggtgcgcaccgagcaccagcacctggtgattttcgaaaacgcccggatgggccgggtgatggcgctcgatggagtgatccagaccaccgaggccgacgagttcatctaccacgagatgctcacccacgtgccgatcctcgcccacggcgcggcccggcgcgtgctgatcatcggcggcggcgacggtggcatgctgcgcgaggtggccaagcacaagagcgtcgagcggatcaccatggtcgagatcgacggcaccgtggtcgacatgtgcaaggcgttcctgcccaaccactcccagggcgccttcgacgacccgcggctgaacctggtgatcgacgacggcatgcgcttcgtggctaccacggaagaacgcttcgacgtgatcatctccgactccaccgacccgatcggccctggcgaggtgctgttctccgagaacttctaccaggcctgccggcgctgcctgaacgagggtggcatcctggtcacccagaacggcacgccgttcatgcaactggaggaagtgcgcaccaccgccgcacgtaccgacgggctgttcgccgactggcatttctaccaggcggcggtgccgacctatatcggcggcgccatgaccttcgcctggggttcgacccgcgaaggcctgcgtcgccttccgctggaaacgctgcgccagcgcttccgcgacagcggcatcgccacccgctactacaacgccgatatccacctgggcgcgtttgctctgccgcagtacgtgctgcaggccatcggcaagcaggacaacgactga

SEQ ID NO: 323471 - DNA, 894 bp, Pseudomonas aeruginosa
atgagccagcctacctctcccctcgtcctgcacctgccctaccagtcaccctgggaatggcgccagttccaccagcatttcgccctgcgcctgctcgccggtgtcgaaagcctgggtgacgaccactatgcccgcagcttccgggccaacggtcgcccggcctggttcgaggtgcgaccgctggcggaacgccaggtcctggcgctgagcctcagcccgtccgcccatgccctggccgccgaactcgaggcacgggtccgccggatgttcgacctggacagcgacccggccgccatcgcccggcatttcgccggggatcccctgctcggcccgctggtggccgccaatccgggactgcgcctgccggtggccttcgatcccttcgaacaggcggtgcgcgccatcgtcggccagcaggtcacggtgaaggccgcggtgaccatcaccgggcgcctgatccagcgcctcggcgagccgctggaagatctcggctacgacggcatcagccacctgttcccgacgcccgccgcgctggcgcaagccaacctcgacggcatcggcatgcccggcaagcgggtacagacgctgcaacgcttcgccgcggcgatcgcatcgggagagctgagcctggacctggcggacggccccgaggccctggtggagcgcctctgcgcgttgcccggcatcggcccctggaccgccgaatacatagccctgcgtgccatgggcgaagccgacgccttccccgccgccgacctcggcctgctgaaatccacggtctgggggccgcaaggcatcgatgcgcgcagcctgaaggcccgcgccgaggcctggcggccttggcgcgcctacgccgcgatccacctgtggaaccactacgccgcaggcggctag

SEQ ID NO: 323472 - DNA, 192 bp, Pseudomonas aeruginosa
atgggttccaccctcagcgggctgatcagcctggtcatcctggccctggatatctgggccatcgtcaacatcctgaaaagcgctgcggaaaccgggatgaagatcatctgggtcctggtgatcatcgtcctgccggtgctcggcctgatcatctgggccatcgccggcccgcgcggcaacgtcaggctgtag

SEQ ID NO: 323473 - DNA, 678 bp, Pseudomonas aeruginosa
atgaccatcaaagccattctcaccgacatcgaaggcaccaccagcgcggtcagcttcgttttcgacgtgctgtttccctatgccgcccggcacctgccggacttcgtccgcgaacacgccggagagaccgaggtagccgcacagttggcggcggtgcgtgccgagagcggtgaggcggacgccgatgtcgagcgggtgatcgcgatcctcctgcaatggatcgccgaggaccgcaaggcgacgccgctgaaggccctgcaaggcatggtctgggcccagggctaccgcgacggtcagttgaagggccacgtctacccggacgcggtgcaggcgctgcgcgagtggaaggcccgtgggctggacctgtacgtctattcctccggctcgatccaggcgcagaagctgatcttcggctgttccgaggccggcgacctgggctcgctgttttccggctacttcgacactaccagcgggccgaagcgggaaagcgcctcctatgcgcggatcgccggggccatcggcctgccggccgcggaaatccttttcctttccgacgtggtgcaggaactggatgccgcgcgcgacgcgggcatgcgcacgctcggcctggcccgcgaaggcggcagcctggacggccatccgacggtggccagcttcgccgacatcctcgtggagtga

SEQ ID NO: 323474 - DNA, 546 bp, Pseudomonas aeruginosa
atgagcagccttaccgtctatcacgagaaccagccggagcagccgctgaagctgctgacccatgccgaggacatcgcttcgaccctggccgaggtcggcgtccgtttcgaacgctgggaagccgccgcgccgatcgccgccggcgccagccaggacgaggtgatcgccgcctacgcccacgagatcgagcggctcaagcgcgagcgcggctacatcaccgtggacgtggtcagcctgaacagcgaccacccgcagaaggccgaattgcgcgccaagttcctcgacgagcaccgccatggcgaagacgaggtgcgcttcttcgtcgccgggcgcggcctgttcgtcctgcatatcgaggagcatgtctacgccgtgctctgcgagcgcaacgacctgatctcggtgccggccggcacccgccactggttcgacatgggcgagcacccgcatttcgtcgccgtgcgcctgttcaacaacccggagggctgggtcgcccagttcaccggcgacgacatcgccagccgcttccccctgctggaagactga

SEQ ID NO: 323475 - DNA, 618 bp, Pseudomonas aeruginosa
atgaacgacaaccgtgaacagctgacccagcagatcatcgacgccggccggttcctctacggccgcggctggtcgccggcaaccagcagcaactactccgcgcgcctggacgaacagcgcgcgctgctcaccgtctcgggcaagcacaagggccagttgggcttcgacgacgtgctggccaccgacctggccggcaacagcctggaaccgggcaagaaaccctcggcggagaccctcctgcacacccagctgtatgcctggaacccggcgatcggcgcggtgctgcatacccactcggtgaatgccaccgtgctttcccgcctggtccgcggcgaccgcctggtgctgcaggactacgaactgcagaaggccttcgccggggtcaccacccacgaaggccaggtcgaggtgccgatcttcgacaacgaccaggacatcgcccgcctggccagccgcgtgcagccctggctggaggcgcatccgcactgcccggggtatttgatccgcggccacgggctgtacacttggggcgcgcgcatgagcgatgccctgcgtcaggtggaagctttcgagtttctgttcgagtgtgaactgaaagtactgagtctgagccgatga

SEQ ID NO: 323476 - DNA, 1152 bp, Pseudomonas aeruginosa
gtgaccagcgcggttccctactggcgcctgtccagcttctatttcttctatttcagcctgctcggcgccacggcgccgttcctcgccctgtatttccatcacctgggcttccccagcccgcgcatcggcgagctggtggcgattcccatgctgatgcgttgcgtcgcgcccaacctgtggggctggctgggcgaccgcagcggccagcgcctggccatcgtgcgcttcggcgcggtatgcacggcgctgggcttctcgctgatcttcgtcagccacagctacgcctggctggccttggtgatggcgttgcacgcgttcttctggcacgccgtgctgccgcagttcgaggtcatcaccctggcccacctgcgcgagcgcagcgccagctacagccggattcgcctgtggggctcgatcggtttcatctgcaccgtggtcggtctcggcgcgctgtttgagcgcctgagcctggatgtctacccggcgacgctgctgggtatcatgctcggcatcgtgctgtgcagctggtgggtgcccaatgcccagccggcccatcgcgaaccgcgcgaaggcgagggcggcttcctcgcccagttgcgccagccgggcgtgctggcgttctacctgtgcgtgtgcctgatgcagctgtcccatgggccgtactacaccttcctgaccctgcacctggaatcgctgggctacagccgggcgctgatcggtctgctctgggcgctgggggtggtcgccgaggtcatgttgttcctcgccatgccacgcctgctgcaacgtttcagcctgcgccaggtgctggccgcgagcttcctgctggcgtcgctgcgctggctgcttctcggcaacctggccgacagcctggcgctgctggtctttgcccagacgctgcatgccgccaccttcggcagttttcatgcggctgccatccatttcgtgcaacgtagcttcggcccgcgccagcagggccagggccaggccctgtatgctgcgctggccggtaccggtggagccctgggcgcgctgtattccggctatagctggaacagcctgggccctgcctggaccttcgccatcgccagcctggcagccttgctggcagccgctatcatcagtacccgtttgcaagaggtgcgggcatga

SEQ ID NO: 323477 - DNA, 1092 bp, Pseudomonas aeruginosa
atgtccggcaacacctacggcaagctcttcaccgtcaccaccgcaggcgaaagccacggcccggcgctggtcgccatcgtcgatgggtgccccccggggctggaactgtccgcccgggacctgcaacgcgacctcgaccggcgcaagcccggcaccagccggcacaccacccagcgccaggaagccgacgaggtggagattctttccggggtgttcgagggcaagaccaccggcacgccgatcggcctgctgatccgcaataccgaccagaagtccaaggactactcggcgatcaaggacctgttccgcccggcccacgccgactacacctaccaccacaagtacggcgtgcgcgactaccgcggcggcggccgttcctcggcgcgcgagaccgccatgcgcgtggccgccggggctatcgccaagaaatacctggcgggcctgggcatccaggtgcgcggctacatgagccagctcgggccgatcgagattccgttcaggagctgggacagcgtcgagcagaatgccttcttcagccccgacccggacaaggtgccggagctggaggcctacatggaccaattgcgccgcgaccaggattcggtcggggcgaagatcaccgtggttgccgaaggcgtgccgccgggcctgggcgagccgatcttcgaccgcctggacgccgaactggcgcatgcgctgatgagcatcaacgcggtgaagggcgtggagatcggcgccggcttcgccagcatcgcccagcgcggcaccgagcaccgcgacgaactgaccccgcaaggcttcctgtcgaacaatgccggcggcatcctcggcgggatatcctccggccagccgatcgtcgcccacctggcgctgaagccgacctccagcatcaccactctcgggcgctcgatcgataccgccggcgagccggtggacatgatcaccaagggtcgtcacgacccgtgcgtcggcatccgcgccacgccgatcgccgaggcgatgatggccatcgtcctgctcgaccagttgctgcgccagcgtgggcagaacgccgacgtgcgcgtcgacacgccggtcctgccgcagctgtga

SEQ ID NO: 323478 - DNA, 984 bp, Pseudomonas aeruginosa
atgaagacctccatgccgcgcgccctcctcgccctgttctgcctgctcgccagcctggcccacgccgctcccaacagcatcctgcaccgcccctacgacctggacaccgggcacggcgtgctgcgtggctccttgctgctgccccgcagcgccgtgccgccgccggtggtcctgctggtcgccggctccggtcccaccgaccgcgacggcaacaaccccttcggcggcaacaaccgctacctgctgcgtctcgccgaggccctggccgaacgcggaatcgccagcgtgcgctacgacaagcgtggagtcgcccgcagcctggcggcggcgccgcgcgaggaagacctcagcgtcggcgtctatgtcgacgacgtggtcgcctggagcgagcggctggcccgcgacccgcgcttctcccggctgatcctggtcggccatagcgaaggcgcgctgatcgccagcctggcggcgcctcgcacgccggccgaggaattgatcgccatcgccggcagcggccaacccatcgaccgggtgttgcgcgagcaactgcgcggtcgcctgccgccggcgcaactgcgccaggccgactcggtgctggcttcgctgaaggccggcgagacccgcagcgatatcccgccggcgctctccagcctgctccgacccagcgtgcagccgtacctgatctcgctgttccgcgaagacccggcccgcgcgttcggccgcctgcgcatcccgaccctgatcgtccagggccgcaatgacatccaggtcggcgtcgccgacgccaaggcgctccagcgggccaagcccgactcgcaactggtgctcatcgacggcatgaaccacatcctgcggatcgccccgagcaccggtctgcagcagctttccgcctacaacgacccgaacctgccgctggcccggcaactggtcgaggcggtcagccgcttcatcctgcgcggcgcagacgcggaaaaaggccgctga

SEQ ID NO: 323479 - DNA, 780 bp, Pseudomonas aeruginosa
atgatcgatagcgatacccaaccggccgcagaagaagccgagaagaaaccgccgcacccctgggccgaactggcgccggagcatttccgcctgctccgcctggcgccgctgcccaccgaccgcgcgaccggcgcccgccccctgcgcttcgtccagctcggcagggtcgaacggcacagcgcggaccagagcctgctgcgcctgagcatccaggtgccaggcctgatgctgcgcaaggagcagaacctgctggaggtctgggccgatcatcgcaacaaggaagtgcgtttcggctcggacgccgggctcagccttgaacccttgaaccgcgggctgggccgtttcctgctggcccaggcgatcgcctgggcgcaacgacgctgggcccactacaaggtggaaggcggcgcactggcgctgaaggatggcctgaccgaagacgcacgcctgcgccgcgaccatttcatccgcgcccagggcttcgacgtcagctatgaggaccagcggttgctcaaggcccgctacagcgccggccgggtcagcgagctgcacagcgattggcacaaggacaaggtgcagatcgtgccgctgctggacgccgcggcgatgctggaacaggccgagcagaccctgcaggcccaggatgcggagatccgccaactggaacagcgcatcaaccactaccgccgcgacgacaccagcctgcgcttcaccatcgcctgcctgaccgccttcgcggtgttccaggccggcctgctgatctggatcgccactcactga

SEQ ID NO: 323480 - DNA, 915 bp, Pseudomonas aeruginosa
atgtccgagtcccgtctgctcaccctgcgcgactacatccgctgggctgtcagccgtttccacgccgccggcctgttcttcggtcacggcaccgacaatgcctgggacgaggcgcgccacctggttctgggctccctgcaccttccctgggaaatttctgacagctacctggattgccgcctggaagacgatgaacgcgccgagctggcggagatcctccggcggcgcatcgaggaacggattccggcggcctacctgctgggcgaagcctggttctgcgggattcccttcagcgtcgacgaacgcgtgctggtgccgcgctcgcctatcgccgaacttatcgaacagcgcttcgcgccctggctgccggccgagccggcgcgaatcctcgacctctgcaccggttccggctgcatcggcatcgcctgcgcctatgcgttcgagcaggcggaggtggtgctcgccgacctgtccttcgatgcgctggaggtggccaacgtcaatatcgagcgccacgacctcggcgagcgggtctacaccgtccagggcgacggtttcgccgggcttcccggccagcgcttcgacctgatcgtgtccaatccgccctacgtggatgccgaggatttcgccgacatgccggcggagttccatcatgagcctgaactcggcctggcctgcggcgacgacggcctggacctggtgcgacggatgctcgccgaggcggccgaccacctcagcgagaaaggcctgctgatcgtcgaggtgggcaacagcgaggtccatgtgcaggcgctgtatccggaagtggacttcacctggctggagttcgagcacggcggccacggggtgttcatgctgtccgccgcgcagtgccgcgagcaccgggaactgttccgttcgcgcttggaaaagtga

SEQ ID NO: 323481 - DNA, 597 bp, Pseudomonas aeruginosa
atgcctcatccgctcacccttttgcagatcagcggacgcggctacccgccagccccccttcggcagagcaccttgctgatcatcgatgcccaggaagagtaccgcagcggcgccctgcgcctgccaggcctcgacgccgccgccgcggagatcggcgtgctggtgcaggcggcccgcgccagcggtacgcccatcgtgcatgtgcgccacctgggtatccagggcggcctgttcgatccgcagggtccgcgcggccagttcctcccggaactgcaaccggaagccggggaaaaggtcgtggagaaacgcctgcccaatgccttctccggcaccgagctgcacgacctgctgcagaaccacggccgtctcgacctgatcgtctgcggtttcatgacccattccagcgtcagcaccaccgtgcgcgcggccaaggactacggctaccgctgcaccctcgccgatagcgcctgcgccacccgcgacatacccaccctgaacggcggggtcctgagcgccgcggacctgcaacgcgccgagatcgccgccctcggcgacaacttcgcggcgatcgtcgcccaggcccgggaactgctctga

SEQ ID NO: 323482 - DNA, 1134 bp, Pseudomonas aeruginosa
gtgttcttccgcctggaagacctgccggaatcctgccgggtccccggcgaggcgcgcgaccggctgttcatgcgggtgatcggcagtcccgacccctatgccgcgcacatcgacgggatgggcggcgccacctccagcaccagcaagtgcgtgatcctctcgaagagcagccagccgggccatgacgtcgactacctctacggccaggtctccatcgacaagcccttcgtcgactggagcggcaactgcggcaacctctccaccggggccggcgccttcgccctgcacgccgggctggtggatccggcgcggataccggaagacggcatctgcgaggtgcgcatctggcaggccaatatcggcaagaccatcatcgcccacgtgccggtgagcggcggccaagtccaggaaaccggcgacttcgagctggacggagtgaccttcccggcggccgagatcgtgctggagttcctcgacccgtccgacgacggcgaggacggcgaggacggcggcgccatgttccccaccggcaacctggtggacgatctggaggtgccgggggtcggtaccttcaaggcgaccatgatcaacgccgggattcccacggtgttcgtcaatgccgaggagatcggctaccgcggcaccgagctgcgcgaagagatcaacggcgacccgcagcaactggcgcgcttcgaacggatccgcgtcgccggcgccctgcgcatgggcctgatcaagacccccgaggaagccgcgacccgccagcacacgccgaagatcgccttcgtcgccccgccccgcgactaccgcaccgccagcggcaagctggtggcggccggcgatatcgacctgctggtccgcgcgctgtccatgggcaagctgcaccacgcgatgatgggtaccgctgcggtggccatcggcatcgccgcagccattcccggcaccctggtgaacctcgccgccggcggcggcgaacgcagcgcggtacgcttcggccatccctccggcaccctgcgagtgggcgccgaggccagccaggcgaacggcgaatggacggtgaccaaggcgatcatgagccgcagcgcgcgaatcctcatggaaggctgggtgcgcgtacccggcgacgccttctga

SEQ ID NO: 323483 - DNA, 1485 bp, Pseudomonas aeruginosa
atgagtgccaacgtcgatctcaaccaacgtcccgactacgacgccgtcctgcaggacatcgccgactacgtgctggactaccgcatcgattccacggaggccctggacaccgcccgcaactgcctgatggataccctcggctgcggcctgctggcgctgcgcttcccggaatgcaccaagcacctcggcccgctggtcgagggcaccctggtcccgcacggcgcgcgggtgccgggcacctccttccggctcgacccggtcaaggccgcctgggacatcggctgcatcgtccgctggctggactacaacgacacctggctggccgccgagtggggccatccctcggacaacctcggcggcatcctcgccgtcgccgaccacctctcgcagaaacgcctggccaacggcgaagcgccgctgagcatgcgccaggtactggaagcgatgatcatggcccacgagatccagggcgtgatcgccctggagaactcgttcaatcgcgtcggcctcgaccatgtgctgctggtcaaggtcgcgtccaccgccgtctgcgccaagctgatgggggccgaccgcgagcaactgctggccgccctctcccacgccttcgtcgacggccaggccctgcgcacctaccgtcacgcaccgaacgccggctcgcgcaagtcctgggccgctggcgacgcgacgagccgcggcgtgcgcctggcggacatcgccttgcgcggcgagatgggcatccccggcgtgctcagcgcgccgcaatggggtttctacgatgtcctgttcagccacaccagcaaggacctggcgaccaagcccgaggacaagcggcgcttcagcttcccccagggctacggcagctacgtgatggaaaacgtgctgttcaagatcagcttccccgccgaattccacgcgcagaccgccgccgaggccgccgtgcgcctgcatccgctggtgaaggaccgcctgcaacggatcagccgcatcgtcatcaccacccacgagtcggcgatccgcatcatttccaaggtcggcccgctggccaaccccgccgaccgcgaccattgcctgcagtacatgaccgccgtgccgctgatcttcggcgacctggtggccgagcactacgaggacgccttccacgccgcccacccgctgatcgatcgcttgcgcgagaaaatggagatcgtcgaggagccgcgctacagccgtgaatacctggaggcggacaagcgctccatcgccaacgccgtggaagtgttcttcgacgacggcagcagcaccggccaggtcgccgtggagtacccgctcggccatcgccgccggcgcgccgaaggcatcccgctgctgcaggagaagttcaaggccaacctggccacgcgcttcccgccgcagcgctgccagaggatcttcgacctgtgcagccaccaggcatcgctggaagccacgccggtgaaccgcttcatggacctcctggcgatctga

SEQ ID NO: 323484 - DNA, 789 bp, Pseudomonas aeruginosa
atgcgcaacgcttccatcgagcagtacgacgccacgccccgggccgtggtggccatgggtaccgactatcccgacggctacctgctgccgcgccatcggcatcgtcgcgcgcaattgctgtacggtgccagcggggtgatgcaggtacgtaccggcgacgccggctgggtggtgccgccacagcgcgcagtgtggattccgccgggcgtcgagcacgaggtgcgaatgctcggggtgagcacccgcagcctgtacatcgagcccggcagcgccatggcgatgccggcgcactgccaggtgctggcggtgtcgccgctgctgcggcaactgttgctggcggcggtggacatgcccctggaatacgacaccgaaggtcgcgacggcgcgttggcgacgctgttgctccatgagctggcggcggccgagacgctgccgctgcacgtgcccttgccgcccgagccgcgctggctggcgctctgcgaggcgttcctcgtcgagcccgacatccgcgccagcgccgaacgctgggccgggttgctgcataccagcctgcgcagtttcaaccgcaccttccgtcgctacaccggcctcagcttcggtgcctggaagcaacgcgcctgcgtggtgcaggcactggcgcggctggccggcggcgaaacggtcactgccatcgccctggactgcggctaccagagcccggcagccttctcgaccatgttccgccgggtcctcggccagccgcccagcgccttccaggcgggcgcgctcagatcgccaggaggtccatga

SEQ ID NO: 323485 - DNA, 816 bp, Pseudomonas aeruginosa
atgttctatctcctgctctttctctgcggctgcctcaccggggtcagcgccgtgttgttcggctttggcggcggcttcgtggtggtgccgctgctctatcacctgctgcaactcggtcgcgccgccgacgacccgctggcccaggcggccatgcaggtcgcggtggccacctcgacctgcgtgatgatcgtcaacgccgccctcgccacctatcgccaccggcgcgccggcagcctgctgcgcgcctatgtctggccgctgggcgcgtacatcggtgtcggcgcggtgcttggcgcggcgctggtcggcctggccagcggcgacttcattcgcctggccttcgtcgcctacctcgccatcaccatcctcgactgcctgttgcgtcgcggcttcctcagccgcgccgaggagcgccaggcgcggccgctgggcgtcggcgagacgcgcctgggcggaacgctgatcggtgcgatcgctaccttcctcggcgtcggaggcagcgtgatgaccgtaccactgctgcgccgctgcgggctgagcatgacccaggcgacctccatggccaacccgctgagcctgccggtggctcttggcggcacccttacctacctggtcctggccggctaccaggagcaaggcctgggccgaggcttcgtcggctacatcgacctgctggccttcgccaccctggccggcggcggctggctcggcatccgcctggcgaccccgctgatcgggcggattcccgatgcgctgcatgcacgggtgtacgtcggcctgctggcggcggtgatgctgagcatgctggcgggctga

SEQ ID NO: 323486 - DNA, 1416 bp, Pseudomonas aeruginosa
atgtcgtctgtcggcgaacagaaggttcaagacggctccctgaagcgcgagctcggtgagcgacacatccgcctgatggcgctcggcgcctgtatcggcgtcggcctgttcctgggctcggcgaaggccatccagatggccggcccggccatcatgatctcctacatcctcggcggcctggcgatcctggtgatcatgcgcgccctcggcgagatggcggtacacaatccggtggccggttccttcagccagtacgccaaggactacctgggcccgctggcgggcttcatcaccggctggaactactggttcctctggctggtgacctgtgtcgccgaaatcaccgccgtcgccgtctacatgggtatctggttccccgacgtgccgcgctggatctgggccctggcggccctggcgagcatgggcacgatcaacctcatcgcggtgcgtgccttcggcgagttcgagttctggttcgccctgatcaagatcgtcaccatcctggcgatggtggtggtcggcatcggcatgatcgccttcggcttcggcaacgacggcatcgccaccggcatctccaacctctgggcccacggcggcttcatgcccaatggcatccagggcgtgctgatgtcgctgcagatggtgatgttcgcctacctcggggtggaaatgatcggcctcaccgccggcgaagcgcgtaacccgaccaagaccattcccagcgcgatcaactcggtgttctggcgcatcctgctgttctatgtcggctcgctgttcgtgatcatgtcgctctatccgtggaacgagatcggcacccagggcagccccttcgtgatgaccttcgagcgcatgggcatcaagaccgccgccgggatcatcaacttcgtggtgatcaccgccgcgctgtcgtcctgcaatggcggcatcttcagtaccgggcgcatgctctacagcctggcccagcatcgccaggccccggccttcttcggcaaggcctcgcgcagcggcgtaccgcgccgggcgctgatcctgtcgatcctggcgctgctgctgggcgtgttgctgaactacctggtgccggagaaggtattcgtctgggtgacttccatcgccaccttcggcgcgatctggacctgggcgatgatcctgctggcccagttgcgcttccgcaagacgctcagcccggccgagtgcgacaagctgcaataccgcatgtggctgtacccggtcagttcctacctggcgctggcgttcctggtgatggtggtggtgctgatggccttcttcgaggacacccgcatcgccctctacatcggcccgccgttcatcctgctgctgaccgtcctgtactacgccttcaacctggcgccgaaggagcctgccggcaccggctcggtaagccgcgcggcgtcctga

SEQ ID NO: 323487 - DNA, 204 bp, Pseudomonas aeruginosa
atgcgcacactttttccccttctcgtcggtgtcgtcctggcgggtttctccggcctcgcggcgcaggccgcgccggcgcccttctacaaatggcagagcaagctcgacggccaggtcgcctgcatgcagacctcgccgggagacggctgggtcaggctcgacggcccctaccgcgatctccgctgccgcgaacccctgcgctga

SEQ ID NO: 323488 - DNA, 2994 bp, Pseudomonas aeruginosa
atgctgatcggcttcgccttgccgatcctcgccgcggtgggcatcgtggtacttcacgaagcgcacacctcgcggctgcaggcacgcgagctggcacgctatgccgcgaccctggactacgaggtgcgccagggtcccagcgaggccatcctgttcccggcggacggccccttcgaccgccgcctcggctaccagttgctgccttcgttcatgcagcgcctgtacgaccgcgactacgccatcacccgccaggcgcacttctccccggcactgatgcgctacgccgaacaccggctgttcccgccctacgcggaaaaggcccaggccgggctggacatcgccgattgccgcggcgtgccgatctacgacttccgctatccgcaacggcgctacgcgaacttcgccagcctgccgccgctggtggtgcagagcctgctgttcatcgagaaccgcgacctgctcgatcacgaacgcccctacctcaacccggcggtggactggggtcgcttcacccaggcggcgctgtcgcaggtcggcaagatgctcggcttcagcgcgcactcctccggcggcagcaccctggcgacccagatcgagaaataccgccactctgccgaagggcgcaccggcagcatcggcgacaagctgcggcagatgctctcggccagcgtacgcagctatcgcgaaggcccggccaacttcgccgcgcgccaggacatcgtgctcacctacctcaactcggtgccgctgtcggcggcgccgggctacggcgaggtcaccggcctggccgatggcctgtgggtctggtacggcgccgactaccggcaggtcggcgaggcactcgacggcaaggccggactcgccgcccagggcctggccctgcgccaggtgctggcgctgatgatcgcccaccgccggccttccttctatctggcgccgcgcggccgcgacgagctggaccggatgaccgacagccacctgcgggtcctgacccaggccggcgtcatcgaggcgccgttacgcgatgcggcgctggcgcagaagctggcgttccgcgacccacgcagccagccgacggtgcaaccgctgccgaccaacaagggcgtgaccctggctcgcacccgcctggccgggatgctcggcgtgccactgtacgacctcgaccgtctcgacctgcgggccaataccaccctccagcacgagttgcaggaaagcgtcaccgcctacttgcagaaactcgccgacccggactacgccgcccagctcgggctgatcggcgaacgcctgctgaccccgacctcgacccgctcggtacgctacagcttcaccctgttcgaacgtacgccgagcggcaaccaggtgcgggtgcagaccgacaacaccgaccagcccttcgacatcaacgaaggcagcaagctggagttgggctccaccgccaagctacgggtgctggccagctacctggagaccgtcgcgcagatccaccgcgactatggcggcatgagcgtcgccgagctgcgcaaggtggaagtggagccgctcgatttcatcctccgctggggcatcgactacctggtcgccagccgcgaccgcgatctttccgcgatgctccaggcggccatggaacggcgctattcggccagcccctacgagagcttcttcaccggcggcgggctgcacaccttcaacaacttccgcaaggaagacaacggccgccggccgatgctgctggaagccctgcgcgaatcgatcaacctgcccttcgtgcgcctgctgcgcgacctgatccgccacgatatctaccagaacgccgggagcaaggtgcagttgctggccgacgacaaggacccgcgccgcgccgactacctcgaccgtttcgtcgacaaggaaagccaggtctacctgcgccgcttctgggtcaagtaccgcgacaaggacgccaaccagcgcctggagaccttcctcgacggcctgcgtccctggccggtgcggctggccgcgatccaccgctacctgcagccacaggccgacctggcgagcttcagcgccttcctccgcgaacgcctgccccgcggcagcctgaccgacaagcgcgccgccgagctgtacgagcgctacggcccgggcaagttcaacctcaacgaccagggctacgtcgcccgcgtgcacccgctggagctatggctgctcggctatctgcagaagcagccgcaggcgaccttcggcgaggcggtggcggccagcggcgccgagcgcaaggaggtctacggctggctgttcaagtcgcggcacaagaacgcccgcgacaagcgcatccgcatcctgctggaggtggaggccttcctcgacctgcaccagcaatggaagaaactcggctatcccttcgatcacctggtgccctcctacgccaccgccctgggcagctccggcgaccgcccggcggcgctggccgaactgatggggatcatcgtcaacgatggcgtgcgcatgccgaccctgcgcctggagcacctcgacttcgccctgggtacgccctacgagacgcgcttcgccccggaagccaccctcggccagcgggtgatgacctcggaggtcgccacgaccctgcgcaacgcgctgtcccaggtggtcgacgccggcaccgcgcggcgcctgcaaggcaccttcagccgtccggacggcgcgccactggtgatgggcggcaagaccggcaccggcgacaaccgcctgcagaccttcagcgccggcggccacgtgcgcagttcgaaggcactgaaccgcaccgccactttcgtcttctacatcggcccgcggcacttcggtaccctcaccgcctacgtcgacggcagcgagtcgagccagttcaagttcacctcggccctgccagtgcaggtactcaagggcatggcaccgctcctcagggactacctcgacccacgcaccgccacccgctgccaggtaccgttgtcgccgcaacagatcggccgcctgtag

SEQ ID NO: 323489 - DNA, 1164 bp, Pseudomonas aeruginosa
atgctgaccaccctggcggtgtccaactaccgcaccctgcgcgacctggtgatgccgctgcggcgcctgaacctgatcaccggcgccaacggcgccggcaagtccaacgtctaccgggccttgcgcctgctggcggacagcgcgcgcggcgaagtgatcccgtcgctggcgcgcgagggcggcctgccatcgaccctgtgggcgggaccggaggacatcagccgggccatgcgcagtggcgcccagccgatcgaaggcagcgtgcgccggcagtcggtgaacctgcgcctgggcttcgccggggaggatttcggttattgcatcgacctcggcctgccggagccaagccagagcaagttcggtctcgacccggtgatcaagcgcgaatgcatctgggccggcccgttcctgcgcccggccaatgtcctcgtcgaccgtcgcgggccgttgttgcgcgcacgcggcggcggcggtcgctgggaagtggcggcgcagcacctcgccaccttcgacagcatgctgggcgcggcggtggacccgcgacaggtgccggaactgctcggcctgcgcgagcggatccgctcctggcgcttctacgaccatttccgcagcgacgccgaggcgccggcgcggcggccgcagatcggcacccatacaccggtgctgggcgccgacggcgccgacctggccgcggccctgcagaccatccgcgagatcggcgatgcggcggcgctggacgaggcggtggacgatgcctttcccggcagccgcctgcacatcgacaacccgggagggcgcttcgaagtgctgatcgagcagcccggcctgctgcggccgctgcgcaccgcggagctgtcggacggcaccctgcgctacctgctgtggatcgccgccctgttgtcgccgcggccgccggcgctgctggtgctcaacgaaccggaaaccagcctgcatcccgacctgctgccggccctcgggcgcctggtcggccaggccgcgcagcactcccaggtgctggtggtgtcgcacgccgcgcggcttgtcgcgacgctcgaagagcacccggaatgccattcgctggggctggagaaggacttcggcgagacccgcatccaggggctgcgcgagctggaccgaccggcctggtactggccggtgcgttga

SEQ ID NO: 323490 - DNA, 306 bp, Pseudomonas aeruginosa
atggcctggttccatctgctggtggcggcggccttcgaggtcgccttcgccatgggcatgaagttctccaacggcttcggcagactctggccgtcgttgctgacggtggtcgcggcgatcggcgggatctatttcctgaccctggcgctgcgcgagttgccggtcagcgtcgcctatccgatctggaccgcgatcggctcgctgggcacggtgttcctcggcgtcctgctgcttggcgagagcctgacggcggtgaagctggtttctgtcgggttgatcgtcgccggggtggccgggctcaagtaa

SEQ ID NO: 323491 - DNA, 918 bp, Pseudomonas aeruginosa
atgttcgcttccctgccgctgaccgcgttgcgcaccttcgaatcggcggcccgccagtcgagcttcaaggccgccgccgaggagcttgcggtaacgccaaccgcggtttcccaccagatccgttcgctggaagcctggctcggcgttccgctgttccagcgcctgccacggaaagtgcgcctgaccgactgcggcgaacggctgttccgcagcctgcacggggccctgctggaaatttcgcagagcgtcgacacgctgcgtccacagcgcagcgtaggcaacctgacggtctccaccaccccggccttcgccgccctctggctggtgccgcgtctcggccgcttctacgccgcgcacccgcagatcaacctgcgcctggacaccaactgcgaagtcctcgacctgcaccaggacgccagcatcgacctggtgatccgctacagcctcgacgaccatccgaacttctacggtctctgcctgttcgacgaatgcttcgcggtctacggctcgccggcccaggtcgccctggccgcagaacggcagccgaccctgatcagcgtgcgctggcacaactccaggctctacgcccacggctgggaggcctggtgcgcgcaggccggcgaagactggatggagggccagccggtgatccgccagtacgacgaggagcactatgccctgcaggcggccatcgccggccagggactggtgctggccagttcgatcctggtttcggaaagcgtcgccagcggcctgctgcaaccctacagagcggatatcagtgtcgacggcgccggctacagcgcgctatgcgtgcccggacgggaacgtcatccgccggtgaaggcattcttcgaatggctgaggctggaggcacgacagtcggggcacgcttgccggctggagcgggacgcctga

SEQ ID NO: 323492 - DNA, 1521 bp, Pseudomonas aeruginosa
atgagtgtcaatacgcccacgctgatcaccttcgtgatctacatcgcggccatggtcctgatcggcctggcggcatatcgctccaccaacaacttctccgactacatcctcggtggccgcagcctcggtagcttcgtcacggcgctgtccgccggcgcctccgacatgagcggctggctgctgatgggcctgcccggcgcggtgtacctgtccggcctgtccgaaagctggatcgccatcggcctgatcgtcggcgcctacctcaactggctgttcgtcgccggccgcctgcgggtgcagaccgagcacaacggcaacgcgctgaccctgcccgactacttcaccaaccgcttcgaggacaacagccgcctgctgcggatcttctcggccctggtgatcctggtgttcttcaccatctactgcgcttccggcatcgtcgccggtgcgcgcctgttcgagagcaccttcggcctctcctacgagaccgcgctgtgggccggcgccgcggcgaccatcgcctacaccttcatcggtggcttcctcgcggtgagctggaccgacaccgtgcaggcctcgctgatgatcttcgcgctgatcctcaccccggtgatcgtgatgctcgccaccggcggcgtcgagccgaccttcaccgccatcgagctgaaggacgcgaccagcttcgacatgctcaagggcgcctccttcatcggcgtgatctcgctgatggcctggggcctgggctacttcggccagccgcacatcctggcgcgcttcatggccgccgactcggtgaaatcgatcccggccgcgcgccgcatctccatgacctggatgatcctctgcctcggtggcgccgtggccgtgggcttcttcggcatcgcctacttccaggcgcatccggagcaggccggcgcggtcagcgagaaccccgagcgggtattcatcgagctggccaagatcctgttcaacccgtggatcgccggcgtgttgctgtccgccatcctcgccgcggtcatgagcaccctgagctgccagctgctggtctgctcctcggcgctcaccgaggacttctacaaggccttcctgcgcaagggcgccagccagctggaactggtctgggtcggtcgcgccatggtgctgctggtggcggtgatcgccatctggctggcctccaacccggaaaaccgcgtgctcggcctggtgtcctatgcctgggccggcttcggcgccgccttcggcccgctggtgctgttctccctgctgtggaagcggatgacccgcaacggcgcgctggccggcatgatcgtcggcgcggcgacggtgatcctgtggaagaacctgttgggctggaccggcctgtacgagatcatccccggcttcctcttcgccagcgtcgccatcgtcgtcttcagcctgctcggcaaggcgccttcgacgagcatgctcaagcgcttcgacgatgcggagcaggagtaccgcgaggcgcaccagggctccgccgctccggtaacccagcgctga

SEQ ID NO: 323493 - DNA, 1431 bp, Pseudomonas aeruginosa
gtgcgttgcccgtacgacctggagaggctggtcggcagcgtccagtacgcgtccgccgagcaggccggcaaggccctcgacgtgttgcaggcggcctggccgcgctggagcgccaccccggtggacgagcgtgccggcatcctcgagcgtctcgccgacctgctggaagcccagcgcggcgagctgatggcgctgtgcaccctggaagccggcaagtcgttgcaggacggtatcgacgagatccgcgaggcggtcgacttctgccgctactacgcccagcaggcccgccagcgcctggtccgcgaggaactgcgcggcccgaccggcgagcgcaacgaactgttctacgaaggccgcggcatcttcgcctgcgtcagcccgtggaacttcccgctggcgatcttcctcggccagatcagtgccgcgctggtggccggcaacaccgtgctggccaagccggccgagcagaccagcctgatcgccgcgcgcacagtcgaactgatgttcgaagccggcctgccgaaggacgttatcgccctgctgccgggcgacggcgccaccctcggcggcgtgttctgccgtgacgcgcgggtcgccggggtggccttcaccggctccaccgacaccgcccgcatcatcaaccgccaactggccgagaagcccggcgccatcgccaccctgatcgccgagaccggcgggcagaacgcgatgatcgtcgattccaccgctttgccggaacaggtgatcaaggatgcggtacaatccgcgttcaccagcgccggccagcgctgctccgcgctgcgcgtgatgtacgtgcagcaggacatcgccgagcgggtgatcgagttgctcaagggcgccatggccgagctgaaggtcggcccgaccgacgtgcgcgtcagcgacgtcggcccggtgatcgacgccgaggccaaggccggcctggagcagcacatcgccgcgctgaaggccgccggcaagctgatcgccgagaccaaggtgccgggcaacctgaacggtcacttcgtcgctcccgtcgcgttcgagatcagcggcatcgacgagctgaagaaagagaacttcggcccggtgctgcacgtggtgcgttatgccgcgcaggacctggaaaaggtcgtgcaggcgatcaacgccaccggtttcggcctgaccatgggggtccatagccgcaacgaggaaaccgcccgtcgcatcgaagagctggcgcgggtcggcaacctctacatcaaccgcaaccagatcggcgcggtggtgggcgtgcaaccgttcggcggccacgggctgtccggcaccggtcccaaggccggcgggccgaactacctgctgcgtttcgtcagcgagcgcaccacgtcggtgaacaccaccgcggtgggcggcaacgcgtcgctgctgtcgctggccgacgccgagtga

SEQ ID NO: 323494 - DNA, 1161 bp, Pseudomonas aeruginosa
atgatgggcgagttcgaagccatccgaccctacagtgacgccgaagtccccgcggtattgcaacgcctcctgagcgacgacgccttcctcggcgccctggtccgctaccgcttcccgcgcctggccggtcccctcggttggctactcaaacctcttatagcccatcgcctggcccgcgaggtcaccggcatccgcagcgtcgccacgctgcaggacaagttcgagccctacgtcgaccacaccatcgagaaggccaccgatggcgtcacctactccggggtcaatcgcctcaagccaggctgcgcctacctgttcatcgccaaccaccgcgatatcgtgatggacccggccttcgtcaactacgccgtgtaccacgccggcctgccgaccccgcgcatcgccatcggcgacaacctgctgcagaaatccttcgtcagcgacctgatgcgcctgaacaagagcttcatcgtgcaccgttcgctgagcggccggcgcgagaagctcgccgcctaccagacgctctccgcctacatcaaccactcgatccgcgaggaccgccagtcggtgtggatcgcccaggccgaagggcgggccaaggacggcgacgaccgtaccgactcggcgatactcaagatgttccacatgagccgcaaggacgaacccttcgccgaaatggtgcgcgccctgcatttcatcccggtgtcgatcagctacgaatacgacccctgcgacctggccaaggcccgcgagttgcacacccgcgccagcaccggcgagtaccgcaaggcgccgggcgaggacgatgccagcatcgccctgggcatcaccggctacaagggccgcgtgcacatcaacttcggtgccgagctggagggcgagttcagcgacgccaagcagctggccgccgaactggaccggcagatcctcggcaactaccgtctgttcccggtgcactacctggcctacgagatgagcgagaaccgcgacccgggcctcgccgtccccatggccgagagcctgttcggcagcgaggagctggagaaggcgcgcaaggaatggaaccgccgcctggagcaatgcccggccgagcagcgcccctggctggtgctgcaatacgccaacccggtgctcaaccaataccggatcaagcagcaatcctga

SEQ ID NO: 323495 - DNA, 183 bp, Pseudomonas aeruginosa
atgctcgaaagccaggcctatagctgcccttactgcggggaaccggccgaggcgctgctcgacctgagcgccggcgaccagcagtactacgaggactgcccggtgtgctgccggccgatcctgttcgacctgcgcaccgatgggcaggactggtcactgaacgtccgccgggaggatgactga

SEQ ID NO: 323496 - DNA, 264 bp, Pseudomonas aeruginosa
atgcagcgcgtatatgagccggccgacctgctggaggccgagatgctggtgggaatgctcgccagcgaagggatcgccgcccatgtcagcggccgccacctggtcggcgccatcggcgaactgccgcctggcggactgctggcgttgttggtggcggacgagcagacggagcgggcgcgagaactgatcctcgcctacaacgccgccgccccgttggccgaggagccgccggagccctgcggccccggcagcctgttgtgttga

SEQ ID NO: 323497 - DNA, 705 bp, Pseudomonas aeruginosa
atggattggaaagtatttctcctgcgtgtcgcggtcgcgctggtcctgggcgccctgatcggcgccgaacgccagctgcgccaacgcctcaccggcctgcgcaccaacgcgctggtcagcactggcgcctgcctgttcgtgctgatgacccagggcgtgcccggcctggccggcgacgcttcacggatcgccgcctatgtagtctccgggatcggcttcctcggcggcggcgtgatcatgcgcgacggcctcaacgtgcgcggcctgaacaccgcagccaccctctggtgcaccgccgccatcggcgtcctgtgcagcatgggcctgctgctggaggccacgctcggcagcctgatggtgctctgcgccaacatcctgttgcgcgacatcgcccaacgcctgaaccgccaggacgtgttgccggccagcgaggccgagcaacgctacgaagtgcagatcgtctgccgcgccgaggacgagatccaggttcgcagcctgatgctgcacagcctcggcagcagcgacctgcgcctgcaatcgctgcacagcgaggatctggacaacccggccaagctggaagtccgcgccgaactgctcggcacccccgaagctccggcgcagctggaacgcctggtcagccgggtcagcctggagaagggcgtcagctcggtgcgctggcaggtcttcgaactggcggccgactga

SEQ ID NO: 323498 - DNA, 615 bp, Pseudomonas aeruginosa
atgagtggtcgttacgccctgttccgctggaatccgtcgctggcggccctgccgggctttccggcggattggcgggcgcactggaacatttctccggcgaaccaggtgctgatggttcgcgaggacgccggtgcgcgccgcgccgacctggcgcgctgggggctgaccccggcctggctcaccgacctgtcgcgtacgcccagccacgcgcgggcggaaaccctcgccgagcaaccgatgttccgcgaggcgttccagcagcgccgctgcctgctgccggccaacggcttctatgaatggcgcggggtgcgtaagcgtccgtactgggtctccaccggcgagcgcctgttgttcttcgccggcatctgggaggcctatccggtgcatggacaaacctggctcagcgtggcccaggtatcccaggcggccgccgagttccgccggccgctgctgctcgacgaggccgagcaggatacctggctggctccggacacgccgctgccggcgctgataagcctgctcgccaagccccagccgaacctgcgcagcgtggccctggccggcttcgtcaacaagcctgaaaccgacgggccggagtgcctgaccccggcctga

SEQ ID NO: 323499 - DNA, 2139 bp, Pseudomonas aeruginosa
atgaagctcaagtcgatccagttttctgtcgccgccctcgccggcgccagcgttctaagcgtcgtcgtggtgctggtgctgtacgccctgttcgccggcgcgcgaacgcaggagctggtgcagcaacgcacccagggcctgctggagaaggtcatcaacgagcgcctggtggccctggcccgcgcccaggtcagccagatccagcgcgagctggagtatccgctgacggtggtccacggcctggccaacagcacccgcctgctcggcgagccgggcgccgacggcatgccgcagctgaacgccagccgcgacgaaatctccgcgctgctgcgcagcaccgtgcagaacaaccccaagctgctcgacaccttcatggcctgggaacccaatgccttcgataccgatgccgccttcgccgggcaacccggcaagggctacggcccggacggccgctacctgccctggtggtatcgcggcgccgacggcaagccgatcgtggaggccatggccgacagcatcgatagcgaaaagctgctgcccaccggggtgcgcgagaacgagttctatgcctgtccgaaagagaacaagcgtccctgcatcatcgacccggccccttacgaaatgggcggcaagaccgtgatgatgtcgtccttcaacgtgccgatcatggtcggtgaccagttccgcggcgcagtcggtgccgacctctcgctggccttcatccaggacctgctcaagcgcgccgaccagcagctctacgatggcgccggggaaatggcgctgatcgccagcaacggccgcctggtggcctacacccgcgacgacagcaagctcggcgagcccgccggcagcgtcctcgacggcaacgaagtggacaacctgaaaaacctcacggtcgaccagccgctctacgacatcgacgccgagcacggccacatcgagctgttcctgcctttcactatcgccgacagcggcgtgcgctggaccctcatgctgcagattccccaggcggcggtattcggcgaactgcagcaactccagggcgagctgagcgaccagcgccagcaggatatcctcggcatgagcctggccggcctggtggtagcggccctcggcctgctggtggtctggctggtcggctacggcatcgcccggccgctgcgccaattggtcggcatgctcgacgacatcgcccagggcgaaggcgacctcacccgccgcctgagcagcgagcgcgccgacgagctgggctccatcgccaagggcttcaataccttccttggcaaactgcagaacatgatcggccaggtggtgcaatcggtgcagaaggtcagcgactcctcggagcacaccgccgacatcgccatccgcaccaaccagggcgtgcagcagcaactggcggagatcgaactggtggccaccgcggtccacgagatgaccgccaccgcccaggacgtggcgcgcaacgccacccacgccgccgaggcagccaaccacgcggaccaggccgcgcaccagggcaagcagatcgtcgaaagcagctcggcggcgatccaggccctggccagcgagattggccgcgcggtcggagtggtgcagaacctggccaaggacagcgaaaacatcaacgcgatcctggtggcgatccgcggtatcgccgagcagaccaacctgctcgccctcaacgccgccatcgaggccgcccgcgccggcgagcagggtcgcggtttcgcggtggtggccgacgaggtacgcaacctggcgcagaagacccagcaggccaccgaagaaatccagagcatgatccagcagttgcagcagggcacccgcgacgtggtgaaggtcatgcaggacagccaggagcgcaccgacgacagcgtgcgccatgcgcgccaggcggccgaggcgctggagtcgatcacccaggcggtatcggtgatcaacgacatgaacacccagatcgccagcgccgccgaggagcagagcgcggtggccgaggacatcaaccgcaacgtcgccaacatcggccaggtcgccaaccaggtggccggcggcgccgacgaggcctcgcaggccagcgccgagctgacccgcctggccgagcagcagcggcgcctggtgaatcagttcagggtctag

SEQ ID NO: 323500 - DNA, 822 bp, Pseudomonas aeruginosa
atggctcatcccttccgattcgccaccctcgccggcgcgctgctgctcgccggttgccaggcagtgaacaccaccagtggcggcgccgtcggcgtcgaccgcaagcaatatatgttcagcatgttgtccagccaggaagtcgaccagatgtacgcccagtcgtaccagaagactctcggcgaggcgaaaagcgccggcgtgctcgataccagcagcgccgacgcgcggcgagtcaaggcgatcgcccagcggctgatcccgcagaccgccgccttccgcccggacgccaccggctggaactgggaagtcaatgtggtgaagagcgacgagctcaacgccaactgcggtcccggcggcaagatcattttctacaccgggctgatcgacaagctgaagctcaccgacgacgagatagccgcggtgatgggccacgagatcgcccacgccctgcgcgagcatgggcgcgaggccatgtccaaggcctacggcgtgcaggtggccagccagatcggcgccctggccggcctcggccaggaaagcctgcagctggccaataccggcgtcgactacctgatgaccctgcccaacagtcgtgccaacgagaacgaagccgacctgatcggtctcgagctggccgcccgcgccggctacaacccggaagcggcgatcaccctctggcagaagatgggcagggccagcggcggcgccagccagcccgagttcaccagcacccacccctccgacagttcgcggatggccaatctccaggccgcgattcccaaggtgatgccgctgtaccagcaggccaggcgcggcaagtga

SEQ ID NO: 323501 - DNA, 990 bp, Pseudomonas aeruginosa
gtgaaatacgccgtactcggagccaccggcctgctgggacatcacgccgcgcgcgccatcagggccgccggtcacgatctggtgctgatccaccgtccttcttcgcagatccagcgtctcgcctatctggagcccgagtgccgggtcgccgagatgctcgaccacgccggcctggaacgcgccctgcgcggcctcgacggggtgatcttcagcgccggctactatccttcgcggccgcgccgctggcaggaggaagtggccagcgcgctgggccagaccaacccgttctatgccgcctgcctgcaggccagggtgccgcgcatcctctatgtcggttcggcatatgccatgccccgccatccccagggactaccgggccacgaggggttgttctacgacagcctgccgagcggcaagagttcctacgtgctgtgcaaatgggcgctcgacgagcaggcccgggagcaggcgcgcaacggcctgccggtggtgatcgggattcccggcatggtactcggcgaactggacatcggcccgactaccgggcgcgtgatcaccgccatcggcaatggcgagatgacccactacgtcgccggccagcgtaacgtcatcgatgccgccgaagccgggcgcggactgctgatggcccttgagcgcgggcgtatcggcgagcgctacctgctcactgggcacaacctggaaatggccgacctgacccggcgcatcgccgagctgctcggccagcctgcgccgcagccgatgtcgatggccatggctcgcgcgctggccaccctgggccgcttgcgctaccgggtcagcggccagttgccgctgctcgacgaaaccgccatcgaggtgatggctggcgggcagttcctcgatggacgcaaggcccgcgaggaactcggcttcttctccaccaccgccctcgacgacaccctgctgcgcgccatcgactggttccgcgacaacggctatttcaatgcctag

SEQ ID NO: 323502 - DNA, 444 bp, Pseudomonas aeruginosa
atgccctcacacgacctgaaacgactcgcccgccatcacatcgagctgtcctggaacaagggccgcatggcgttggtggagcagttgcacagcaaggatttcctctacaaaagctcgttcatcggccgtcccctggataccgccggctatatccgcctgctgcaggacatccgcacggcgatgccggacctggaggtcgtggtcgaagactgcatcggcgaggaacgcaaggtgttcacctggagcacgctgatcggcaccatcgtccggccgaccctgggctatccggccagcgacaaggtgctgagcatttccgcgatgggcttctgggtgttcaacccgcagggccagttgcaggagctgtgcaccatgttcgacatggagagctttcgcgcccagctgggactgcagacccgacccttcgcggaaaaagcgctgccctag

SEQ ID NO: 323503 - DNA, 579 bp, Pseudomonas aeruginosa
atggaatcgctgttcgtccctaccctcatcgttgccctcgcggaaatcggcgacaagacccagttgctggcactcctgctcgcggcgcgtttccgcaagccgtggccgatcatcgccggcatcgtcgccgccaccctggccaaccatttcgctgccggcgcggtgggcgcctgggtcgccagcttcttctcggaagccaccctcagttggatcctcgccgcctccttcatcgccgtcgccctgtggacgctggtaccggacaagctcgacgacgaagagtccggactgaagaaatacggccccttcctcaccaccctgatcgcgttcttcctcgccgagatgggcgacaagacccaggtcgccacggtcatgctggccgcccagtatccgcatttctggctggtggtgatcggcaccaccctgggcatgctgatcgccaacgtaccggtggtactgatcggcaacctggccgccgacaagctgccgctgaccctgatccgccgcctggccgcggccgccttcgccgcacttggcctgtacgccgcctggcacgccgcgcaattgaccggctggctctga

SEQ ID NO: 323504 - DNA, 1464 bp, Pseudomonas aeruginosa
atgactgacctgaacgccagccagggccagcaattgcggcgggtgctcaagccgcgccacctgaacatgatcgccatcggcggctccatcggcaccgggctgttcgtcgcctccggggccaccgtggccaccgccgggcccggcggtgcgctgctttcctacgccctgatcgggctgatggtgtacttcctcatgaccagtctcggcgagatggcggcctacatgcccgtttccggctcgttctgcacctatggcagccggttcgtcgaagatggcttcggtttcgccctcggctggaactactggtacaactgggcggtgaccatcgccgcggaactggtggcggcgcaactggtgatgagtttctggttccccgaggtgccgggcatctactggagcgcgatcttcctgggcatcatgttcggcctcaacgtgatttccgcgcgcggcttcggcgagagcgaattctggttcgccctgatcaaggtagtcacggtggtgatcttcatcggcgtcggcctggcgaccatcttcggcatcatgcatggcgtggagtcgcccggcttcagcaacttcaccatgggcgacgcgcccttcgtcggcggcttccaggcgatggtcggggtggcgatgatcgccggcttctcgttccagggcaccgagttgatcggcatcgccgccggtgaatcggaaaatccgcggaagaacatcccgatcgccattcgccaggtgttctggcgcatcctgatgttctacatcctggcgatcttcgtgatcggcatgctgattccctacaccgacccgaacctgctgaagaacgatgccagcgacatcagcgtgtcgcccttcaccctgctcttcgagcgcgccggcttcgccgcggcggccggggtgatgaacgcggtgatcctctcggcgatcctctccgccggcaactccggcatgtacgcctcgacccggatgctctacaacctcgccctcgagggcaaggcaccgcgcctgttctcccgtgtctcgcgcagcggcgtgccacgcaatgcgctgtacgccactaccctggtcggcgccctgtgcttcctcacttcggccttcggcgacagcaccgtctacacatggctgctgaacacctcgggcatgtgcggcttcatcgcctggctgggcatcgccatctcccactatcgcttccgcaagggctacctggcccagggcggccgcctggaagacctgccctaccgggccaagctgttccccttcggcccgctgttcgccttcgccctgtgcatggtcatcaccctcgggcagaactaccaggcgctggtgggcgaacgcatcgactggatcggcctcctcgccacctatatcagcctgccgctgttcctggcgatctggctgggataccgctggaagaagcgcgcacgcttcgttcgctaccacgaaatggacgtcagcccgaccaatacctga

SEQ ID NO: 323505 - DNA, 999 bp, Pseudomonas aeruginosa
atggaccctcgcagtgaagtgctgctgcgccagcgccacctcttcgcgaccccgctgctgctggccggcctgcccgccgacgacctgctcgccgagctaccgcaggcccagggctggagctggcacgccggcgagcaggcgcagttggacgcccgcttccccggccgtagccgtttcgacacgcgcgcgccgactggcgcctggacttcggccgttctgttcctgcccaagtcccgcgaactgaccgactacctgctggccagcctggccgcccgcctgcccggcggcgaactcttcctggtcggcgaaaagcgcggcgggatcgagcgcgcgagcaagcagttggccgcctacggcaagccccgcaaactggatagcgcgcggcattgccagctctggcaggtgcgtatcgaacaggcgccggccgagcccgacctgcacgccctggcccagcgctacagcctgccgctggccgatggcgagctgcaggtggtgagcctgccgggggtgttcagccatggccgcctggatcgcggcagcgcgctgctgctggggcaactgcaagccctgcccggcggccatctgctggacttcggctgcggtgccggcgtactcggggcggtcctcaagcgtcgctaccccgccagtcgcctgactctgctcgacgtcgacgccttcgctgtcgagagcagccgactgaccctcgccgccaacggcctggacggcgaagtgatcgccgccgacggcatcgacggcgcgccgcgcgaactcgccgcgatcgtcagcaatccgcccttccaccagggcgtgcacaccgactaccaggcctccgagcgcctgctgcaacgcgccgccgagcacctggcgccgggcggcgaactgcgcctggtcgccaacagcttcctgaagtacccgccgttgatcgaacgccacctcggcccctgccggacactcgccgaaggcgacggtttccgcatctactccgcccgtcgctcctga

SEQ ID NO: 323506 - DNA, 972 bp, Pseudomonas aeruginosa
atgagccatgccctgcgcgccgttttcctcgaccatgcctccctcgacctcggcgacctggacatgcgccccctgctcgccgccttcgacgagctgcaactgcatgccgccagccaaccgcaggaagtcgccgcgcggctgcacgatgcgcgggtcgcgatcagcaacaaggtgccgatcgacgcgcaatgcatcgccgcctgcccagagctggaactgatcctggtcagcgctaccggcaccaacaacatcgatctcgctgccgctcgcgagcgcggtatcgtcgtcgccaactgccatggctacggcacgccctcggtagcccagcacaccctcgcgctgctactggccctggctacgcgcctgccggactaccagcaggcggtacgcagcggtcgctggcagcaatccagccagttctgcctgctggacttccccatcgtcgaactggaaggcaagaccctcggcctgctcggccatggcgaactgggcggggcggtggcgcggctggcggaggcgttcggcatgcgcgtgctgctcggtcagttgccaggacggcccgcccgggcggaccgcctgccgcttggcgaactcctgccacgggtcgacgccctgaccctgcactgcccgctgaccgaggacacccgcgggatgctcggcgccgccgaactggcgctgatgaagcctggcgccttcctggtcaataccgcccgtggcggcctggtcgacgaacaggcgctggccgacgccctgcgcggcggccacctgggcggcgccgccaccgacgtgctcagcgtcgagccgccgagaaacggcaatccgctgctggcccccgacatcccgcgcctgatcgtcaccccccataacgcctggggcagtcgcgaggcgcggcagcgcatcgtcggccaactggcggaaaacgcagaggcatggaaggccgggcgcgccctgcgggtagtcaacgccggctga

SEQ ID NO: 323507 - DNA, 630 bp, Pseudomonas aeruginosa
atgccgcgccgccttttcatcggtctttttctactgccgctgccgcttttcgccgcgcctcccaaggacgaactggcctatgccgtaggcgcccgcctgggcatgcgcctacagcaggaaatgcccggcctagagctatccgagctacttctcggactgcgccaggcctatcgcggcgaggcacttgaaatcccccccgaacgcatcgaacaacttctgctgcaacacgagaacgccacgacggaaacaccgcggaccacacccgccgaggcccgcttcctggccaacgaaaaagcccgcttcggcgtccgcgaattgaccggcggcgtcctcgtcagcgaattacgtcgtggccaaggtaacggcatcggcgcggcaacccaggtacacgtccgttaccgcggcctgcttgccgacggtcaagtgttcgaccagagcgaaagcgccgagtggttcgccctggacagtatgatagagggatggcgcacagcgttgcgagcgatgcctgtcggcgcgcgctggcgagtggtgattccttcggcgcaagcctatggccacgaaggcgctggcgacctgatcccgcccgacgctccgctggtcttcgagatcgacctgctgggcttccgctga

SEQ ID NO: 323508 - DNA, 483 bp, Pseudomonas aeruginosa
atgctcgaaagctgccgtaatgcccaagagcggtgggggggcgtgcaccaactgatcgatcgctggctgcatgagcgccagcaactggtgcaggccttcgatgccctgagcggtattcaggcaccggcgcccaacgccgaagaactccagcatttttgccaattgctgctggactacgtatctgccggacacttcgaggtctacgagcaattgacggcggaaggcaaggccttcggcgatcagcgcggcctggagctggccaagcagatcttcccccggctggaagccatcaccgaatccgcgctgaacttcaacgaccgctgcgacaacggcgattgccgtgaaggagcctgcctcattgcggagctgaaggtcttgcggcaacagttgcacgaacgcttcgagctggaggactgcctcatcgaagtcctgcacaacgctcacagccagagcggcgcagagggttcggcagtaccggtctga

SEQ ID NO: 323509 - DNA, 492 bp, Pseudomonas aeruginosa
atgcccctggccagcccccgtcagcttttccttctcgcgttcctggcctgcgtcgccatcatgggcggggcgctgtacctggaacatgtggttggcctggaggcctgcccgctgtgcgtcgtgcagcggatcttcttcatcctgatcggcctgacctgccttgctggcgcgatccaggggcccggcctgcgtgggcggcgtatctactccatgctggtgttcctgctcgctctcggcggcggggccacggccgcccgccaggtatggttgcagaccgttccgctggaccaactgccggcctgcctgcccagcctcgactacatgatgcaggcgcttcccttccaggaagtgatccgcctggtcctgcatggcaccgcggattgtgcccaggtgagctggacgctattcaccctgagcattccggaatggagcctgctggcgttcgttgcctatctcggcttctccatcgtgcagttcctccgacgtgcctga

SEQ ID NO: 323510 - DNA, 1239 bp, Pseudomonas aeruginosa
atgagacgcatctacctcctggttctggcggtggtgctggtcgccacgctggttgggctggcgatctccgagcaggccggctatgtgctgatcgcctacaagagcttccgttacgaatccagcctgtggtcgttcctcgccctgctggcggtggtctggctgctggtggtgctggtgcgcctggtcctgcgcctgctcggcagctcggggcgggtggtcaacccctggtcgcgctacaaccgccggcgtcgcgtgcagatggccgagcacagcggcctgcgcgatctcggcgaaggcaactggccgcaggcgctgcgtcatttgcggcgggctgcggagatgggcgagcggccgctgatgcattacctcggcgcggcgcgggccgccaacgaactcgagcgctacgacgaggccgacgacctgctgaaccgggctcgcgagcgcgagccggatgcccaattgctggtcggcctgacccgtgcgcaactgctgatcaatcgcggcgactacccgcaggcacgcaataccctcgaagagctgcacgggctccagccgcagcaccgcacggtattgcggctgatgcagcagctgtacgtcacccagcacgactggcaggccctttgcgtcctgctgccggagctgcgcaaggagcgtgtgctgaaggattccgaactgcgcgacctcgaacgccgtgcctgggtggcttccttgcaggaagccggcgagcgtggactgaacgagggcgagacggcgttgcagccgctgacccagcgctggcagaacgtgccttcggcgctgcgtgcagacccggcgatcgtcgcgggctatgccgcccaactgcttcgcctgggcgccgaggaagaggctgaagaagtcctccgccatgcgctcaagcaaggcttcgacgcgaccctggtgcaactctacgggcaagtgcgcgggcgcgatccgggcaagcaattgcaggccgcggaaggttggctcaaggaacacccgaacgatcccggcctgctgctgaccctggggcgcctgtgcctgatcaacaagctctggggcaaggcccgggaatacctggaggccagcctgagcttccagcgcagtgccgagacctgcgccgagctgggacgcctgctggcgcagctcggcgaggtcgagcgcagcaaccagttgttccaggagggcctggtcctgctcgatcggcgtactccggggctgcccgtggtggtggcgggcatttga

SEQ ID NO: 323511 - DNA, 1131 bp, Pseudomonas aeruginosa
gtgagcgaagcagtcactccccaagacgacgcaagaacttccacttccaccccttctcccgttgcacccgatgcatccaggcgttccggtaccgccaccggcctggcgttgctcgccctgctggttggcgtggcgggactcggcgcgggtggctggagcttctggcaggtccagcagttgcagggcaccgagcgtgaccagctggcgcagctggaagatgcccgtggcaagaccgaatccctggcccagcgtaaccagcaactggctgcccgcctggacgctttgcctaccgcggacgaactggaggcccggcgacgccttgtggtggagctgcagggcgaccagcagcatctcagcgagcaactgaagaaggtcctcggccagagccgccagcaatggcgactggccgaggccgaacacctgctgcgcctggccagcctgcgcctgtccgccttgcaggacgtgggtagcgccaccgagctggtgcagggcgccgatgacatcctgcgcgcgcagaacgatcccggcgcctatgccgcccgcgccaagctggcggccagcctcgaggccctgcgtgcgttgccggagccggaccgtaccgggctgttcgtgcaactggcggcgttgcgcgagcaggtcaaccagttgcaaccgctcacgccgaccttcaaggaaggcgaaagcggtgccagcaatgtcgcctggggcgacggcaacagcacctgggagctgtggtgggagaagatctcgcgctacatccgcatcgacttcaatgccggccaggacattcgtccgctgctggccggcgagcaattggcgcaggtgcgcctgaccatcggcctggccctggagcaagcccagtgggcggcgctgaatggcaagcagcaagtctacgagcaggcgctgaagcaggcccaggaagtgctggacggctatttcaacgtagagctggccgacagccgcgcgttgaagttgcgtatcgatgagttggcgaagcagccggtcaccgtgcaggtccctgacctcgcaccggccctgagcgccttgcagtcctacgtgtcgcgccgcgaggccgccggcaacctggtgcctgaggcgcaggcggctccggccacggagggccgtccatga

SEQ ID NO: 323512 - DNA, 756 bp, Pseudomonas aeruginosa
gtgagcggctggcggctcctgctgacgcgtcccgacgaggagtgcgcggccctggccgccagcctcggcgaggcgggcgtccatagcagcagcttgccgctgttggcgatcgatccgctggaagaaaccccggagcagcgtacgctgatgctcgacctggaccgctactgcgcggtggtggtggtcagcaagccggcggcgcgcctggggctggagcggctcgaccgctactggccgcagccgccgcagcagacctggtgcagcgtcggcgcggcgaccgcggcgatcctcgaggcctacggccttgacgtaacctaccctgaacagggcgacgacagcgaagcgttgctggtgctgccggcgttccaggattccctgcgcgtgcacgatccgaaagtgctgatcatgcgcggcgaaggtggccgagaattcctcgccgagcgcctgcgcggccaaggcgtgcaggtggactacctgccactctaccggcgccgggctccggactatccggccggagagctgctggcaagggtgcgggcggaacgcctgaacggcctggtggtcagcagtggacagggtttgcaaaatctgtatcagttggcggcagccgattggcccgagataggccggttgccgctgttcgtacccagcccgcgggtcgccaagatggcgcgcgaactgggtgcgcaacgggtgattgattgccggggcgcgagcgcgccggccttgctggcggccctgacgagcgccgcctag

SEQ ID NO: 323513 - DNA, 942 bp, Pseudomonas aeruginosa
atgtcgtcccgcgaaatccgcatcgccactcgccagagcgccctcgccttgtggcaggccgaatacgtcaaggcgcgcctggagcaggctcatcctggcctgaccgtcaccctgctgccgatgaccagtcgcggcgacaagctgctcgacgcgccgctggcgaagatcggcggcaagggcctgttcgtcaaggaactggaaaccgccctgctcgaaggcgccgccgacatcgcggtgcattcgatgaaggacgtgccgatggactttcccgaggggctcggcctctacaccatctgcgagcgcgaagacccgcgtgacgctttcgtctcgaacacctacgccagcctcgagcaactgcccgccggcagcgtggtcggcacctccagcctgcgccgccaggcgcagctgctggcgcgccggccggacctgcagatccgtttcctgcggggcaacgtcaatacccgcctggccaagctggatgccggcgaatacgacgcgatcatcctcgccgccgccggcctgatccgcctcggcttcgagtcgcgcatccgctcctcgatcaatgtcgacgacagcctgcccgccggcggacaaggcgccgtcggcatcgaatgccgtacggccgacagcgacctgcatgccttgctggaacccttgcaccataccgatacggctctgcgggtcactgccgagcgcgcgctgaacaagcgactcaacggcggttgccaggtgccgatcgcctgctacgccatccgcgagggcgaccagctgtggctgcgcggcctggtcggccagcctgatggcacccagttgctgcgcgccgaggggcgggcgccactggcggaagccgaggcgctgggcgtgcgggtggccgaggacctgctggaacagggcgccgaagcgattctcgaagccgtctacggcgaggccggacatccgtga

SEQ ID NO: 323514 - DNA, 747 bp, Pseudomonas aeruginosa
atgaatgtcctgattgtcgatgacgaacctctggcgcgagagcgcctggcccgattggtagggcagctggacggctatcgcgtcctcgagccctcggccagcaatggcgaagaagcgctgacgctgatcgacagcctcaagcccgatatcgtcctgctggatatccgcatgcccggtctggacggcctccaggtcgcggccagactctgcgagcgggaagcgccgccggctgtgatcttctgcacggcccatgacgaattcgccctggaagccttccaggtcagcgccgtgggctacctggtcaagccggtgcgcagcgaagacctggccgaggcgttgaagaaagcctcgcgaccgaaccgcgtgcaactggccgcgctgaccaagcccccggcctccggcggcagcggtccgcgcagccacatcagtgcacggacccgcaaggggatcgagctgatcccgctggaagaggtgatcttcttcattgccgaccacaagtacgtgaccttgcgccatgcgcagggcgaggtgctgctggacgagccgttgaaggcgctggaagacgagttcggcgagcgcttcgtgcgcatccaccgcaacgcgctggtcgcccgcgaacggatcgaacgcctgcagcgtacgccgctggggcatttccagctctacctgaaaggcctcgacggcgatgcgctgaccgtcagccggcggcacgtggccggggtcaggcgtctgatgcatcagctctga

SEQ ID NO: 323515 - DNA, 1077 bp, Pseudomonas aeruginosa
atgcctatccgattcaagcccggccgctcgacccggccggccgtccaagacgacttcttcattcccgagctctgcgaagccgaagccctgttcaccctggtgctgctggcggagctgctggtgctcgtgctggtgctggcggagccgatgacgccgagcttcaactgggtgcgcctggccctggcgtcgctgttcgtgcagtggatcgtactgctctcggcggcgctgttctgccgcctgcggccattgctcgcacgcctgccggtggcgctggcggggagtgcctgctgcctgttggtggtggccctcaccctgggctgcacggcggtcgccgagcactatcagctgggcggagaactgacgcgtgccggcgaggtcaatctgtatctgcggcacgcgctgatcgcgctgatcatgtccgccctggtgctgcgctacttttacctgcagagccagtggcgccggcagcagcaggccgagttgcaggcgcgcctggaatcgctgcaggcgcggattcgcccgcacttcctgttcaacagcctgaacagcatcgccagcctgatcgagctggacccgctgaaggccgagcatgcggtgctggacctgtccgacctgttccgggccagcctggcgaagcccggcactttagtttcctgggaggaggaactggcgctggcaaggcgctatctttccattgagcagtatcgtcttggcgatcgcctgcaactggactggcaggtgcacggggtgccggccaacctgccgatcccccaactgaccttgcagccgctgctggaaaatgcgcttatctatggcatccagccgcgggtcgaaggtggcctggtgcaggtcgaggcggtttatcgtgaaggagtgttccagctatgtgtgagcaacccctacgacgaggcgctcgagtcgcccccgtcgaaaggcacgcgacaggcgttacacaatatcgatgcacgacttggggcacttttcgggcctaaagcgagtctcagcgtcgagcgccgtgacggacggcactacacctgtctacgctatccatgtgcgcgactcatgcaggaagcctga

SEQ ID NO: 323516 - DNA, 1395 bp, Pseudomonas aeruginosa
atgagcgtagagaagaccaaccagtcctggggcggccgcttcagcgagcccgtcgacgccttcgtcgcccgtttcaccgcctccgtcgacttcgacaagcgtctctaccgccacgacatcatgggttccatcgcccacgccacgatgctggccaaggtcggcgtgctgagcgacgccgagcgcgatgcgatcgtcgacggcctgcaacagatccaggcggaaatcgaagccggcagcttcgactggcgcgtcgacctggaagacgtgcacatgaacatcgaggcgcgcctgaccgaccgcatcggcgtcaccggcaagaagctccacaccggccgctcgcgcaacgaccaggtggccaccgacatccgcctctggctacgcgacgagatcgacaccatcctcgccgagatcacccgcctgcaggagggcctgctgggcctggccgaagcggaagccgacaccatcatgcccggtttcacccacctgcagaccgcccagccggtgaccttcggccaccacctgctggcctggttcgagatgctcggccgcgactacgagcgcctggtcgactgccgcaagcgggtcaaccgcatgccgctcggctcggcggccctggccggcaccacctacccgatccagcgcgagatcacctgccagttgctgggcttcgacgcggttggcggcaactccctggacggcgtctccgaccgcgacttcgccatcgaattctgcgccgccgccagcctggcgatgatgcacctgtcgcgcttctcggaagagctggtgctgtggaccagcgcgcagttccagttcatcgacctgcccgaccgcttctgcaccggctcctcgatcatgccgcagaagaagaaccccgacgtgccggagctggtacgcggcaagtccggccgggtgttcggcgccctcaccggcttgctgaccctgatgaagggccagccgctggcctacaacaaggacaaccaggaagacaaggaaccgctgttcgacgccgccgacaccctgcgcgatagcctgcgcgccttcgccgacatggtcccggcgatccggccccggcgcgagatcatgcgcgaggcggcacgccgcggtttctccaccgccaccgacctggcggactacctggtgcgcaagggcctgccgttccgcgactgccacgagatcgtcggccacgcagtgaagtacggcgtagacagcggcaaggacctcgccgagatgagcctcgacgaactgcgccgcttcagcgagcagatcgacgccgacgtcttcgacgtgctgaccctggaaggctcggtcaacgcccgcgaccatatcggcggcaccgcgccgaaccaggtccgtgccgccgtcgcccgcggcagaaaactgctggcacagcgctga

SEQ ID NO: 323517 - DNA, 624 bp, Pseudomonas aeruginosa
atgggtgcagtcggcttcagcgccatcctttggctctacagcaaagtcttcaagcaagatggcagtgaattcaatcgcctggacggcatgctccgcttcaagcgtcgcttccgccgcctgttcgtcgctcccttcgacgagttcgatccggtgctgcaattgctgcccagtggctacggcagccacgactatgcgctctggttgcatcaccgctataccgacaacaaggtctgtctggccacccgcgtccactccctcggtctcgacaaggtcaatgccctggccttctgggactgcctgcaacgctacatggacgtgacccagccgttgcccgacctgccggtcctggagccgagccgccccttagatccggtcaccgccgagcatgatcggcataccggacgcgatccccattactggcgccagcgcacctaccagggctggccagccaaggagcgcaaggagctggaccgacgcctgcatgagtatccctggcaacagcagccctgcatcgtcagggcgcgcatcgatcccgggctaagcatcgaagcctattatcggcgccaggaagccaagggcatttttgccacgccgagggccgatgatttcaatgatgagcactga

SEQ ID NO: 323518 - DNA, 3270 bp, Pseudomonas aeruginosa
atgagcggattccaggaccagagtatcgacgaaggcgtgcgcaagcgcaccgcctaccagaacgatcggcgtgcacgactggcattgaacgtcgagcgacaggacggcggtatcctgcagattccggtggccagcgatatgctcggccatgaggagcacgagcgtatccagcagaacaccttcctggctgtgatgccgctggtccgcctgccaacgctgggcaaggccggttatggcgaccagctgcccgccggcgcgctaccgcgggcgggacggatctacctgttccaggacggcaagttgtggcgcgaactggaatgtgatggcaagggcaacctgttcgaagtcgatctcctgcaggggcgcagccagcgtgcggacaagcgtccggccgtaggcaagacacaagcgctgatcctggtgccggtgctggtcaaggggcagttcgtgatcccacgctacaccatggcctatagcgaaactccctggccttggtcgtacatcgactggctggaggaggacccgcagcgggtcaaccggcgctgccagcagatggcgtccgcttggaacgcctcggtggccaaccagcactggaaagcctccatccatcaacccgcgctggtcattgatcatcacgcccagggtttgcgacctcgcgacttcaacgtcgagagcgcgctggaagacccggcggaattcacacctgcgttcgccgcctttcgcgaagagtcgctggtgtgccagttgcagcgacgccagcaggaattggcgcccctgctgaagcaggctccgccctctgcgctacctactctggaagccggagaggacgtactggaaaccctcaagctgcgcggccatcccaacctcatcgggctgatgctcgacgactcgctgttcgccttgcgccacgctgcggcgcaggcgcgccactgcgccgcctacttgcgcagcctcaatgcactgctgccgcaccgtcccaacggacgctatgcacaggtgctgagcaacatgctcgacggcccgctcgccaagctcaggggcgaggtcgatcaggccgaactggacgaggcgatcttcgccgaggagcgacagtcttgccgaatccacctgacgcagcaggtcgagcatctggttgccctgctggaaggccccttgcacccggtgttgcaggactggacccaccagtgcgacgaagccctgctggagccctacagcctgatgagcgaggcactggctgcgctgaaccagcttcccgaccgctgcgacgcactgtacagcggtaccgcctaccgggcgctggcggcacatgtcgagcgggtggtcagcacggttctgcaggcaagccacccgcttggcgccatgctcctggccaaggacgaaggacaacttcccgagccggttcggcgcctgcaggcgctgcgcgatagcccggggacgccggaccccgacgcaatgggcctcagcacgctgatgctgggagccagtctgctgggcgaggtcgaccagcccagcgccggcaagagcctcgcctacttcctcggcgacctgctggacgtgttcggcgccagcgtagtcgagcaactcggccggctgtcccagggtgccacccagatccagctcgaccgcttgttcgcaccgaccttcaatactctgagcgccctctcggtgaagatgaaaggtatccgcctgctgcccgacagtcaggtgccgctcgacatggttgtcgtcggcgtgcgcggagccggcctgcgcaacggtctgaccgaggtcgagcgccaggagctgaggcgcaagagctatcggcgcgccatcgttcaggacggtgccggcaatcccctggccggcaccagtccccgcgacaccggcatgagtcgcgccaacctgcgcaacgtcatggtggtggcggtacccaaggatcacccggacctgcttgcctacacgaaattccgtacgcagttaggcacgttgacccaggtgatggagaacactcgcatcgtgccgacgatgatgctggggtttgcgatttataacttgaatgtgcaggtgcaggcatacagtggctttgtagacagtggagaaaagcacagagggacgatcggggctatcggtgcagtaatcgatttaacagccgctggaggaagccatgcaaagctgcttttcggaccatctactgcaaagtatctagaaaccccacgtatatcggtagcccaaatatcccctcgatgggccaggaatctagaagttcaaacaggcagccctaagttagggttgctacgtgggcttggtggcgcagccacactattcggtgcaggcatcagtgtatgggatggctaccgagctttgaggcagggagatagcgatgcggctgcggcctacggtgtggccgcagtgggtgggggcctgtggggtgcctacgtcctaggatggatagtaaacccttatgctttgctggctggtgcggttttggcgatcggaggcactgtggtcgctaatctactgactgacagcgatgcggaaaccatcgtcaagaaaggccccttcggccggcaattcgccgaggctggcctgctcgattcgctgatgggccaggaccagcgcttcgcccatctgaaagacccgcaaacggcctatcgccaattgctgggagtcctcggccatccgcgggtctttgtccatcgcctggaagactggcgcaaattggcgccggcggcgcatcgatctgtcttgcaggaagcggaacggggtcgccaagcggtcagccgcactgcgctatcctgcatcgaccccaagttgcaggcgctggaggcaaacgattgggccgtggtgctgagttccccgctcctggccatgttcgagaatggccagaaggcgttccgcctggtggcccaggagtttctcagcagcttgccgatcgatccgggcaccctgttcggcgtcaagcgctaccatcgggtccccgcgggccccgccaagctcgaagccttgccgttggatgctgccagcgtgctctacgtgctgccggccagcctgccgattccgcagttgtctcctcgggcccgctatagcatgcgcatgacccagggtttgaagatcagcgcacagttcgaactcaatgccgaccagcctgagcagcggcttgtcctgcctcaacccagcccgaagagttggagtgcattcacatccgccaatcggtaccttcccccggacgacttggacccccatgctgcgccaccttattggttgatagagaacagtgagttcaacgtatga

SEQ ID NO: 323519 - DNA, 498 bp, Pseudomonas aeruginosa
gtgcaggcgaacagctacagcgagttcaaggccgaggaacaccgcaccacccacgccgagcgcaaggtggaggtccgagccagcgaccacctcaccgtagccaacgaccagcacctgaagatcgccagcggccagttcgtcgaggccggccaggagatccacctgagcagcggtctgaaggtggtgctggaggccggcgccgaactgaccctcaagggcggcggcagcttcctcaagctcgacgccagcggcgtgaccctctccggggccaacgtccgggtcaactccggcggcagcccgggcaacggcagcggcgcggcgccgctgttgccggggccgccgctcgacgcggatgcggcgacagcgggccaggtactggacaacccggcgcgtagccgtcccgagcggaaggggccggaacaattgatcgtcgatgtctggggagacccggcgcaaggaagccaggtcgtactgttgccaccggagagcgaggcatga

SEQ ID NO: 323520 - DNA, 180 bp, Pseudomonas aeruginosa
ttgcagaagaccctgcgctcccagggctacaacgcctacatccgcagcttcgacgggatgaaccgggtcttcgtcgggccggtgatccagcgcgccgaggcggatcgcctgcgcgaccagttgagcaagcagcagaagctcaacggcttcgtcgtgcgcttccagccggaacgcggttga

SEQ ID NO: 323521 - DNA, 516 bp, Pseudomonas aeruginosa
atggtcgccatcatcgtcgtttccagcctgatcagtctgagtcgcggcttcgtcaaggaagccttgtccctgcttacctggatagtcgccggcgcggtggcctggatgttcggcggggcgctggcgcagcacctgggcgagtacatccagaccccctcggcccgcatcatcgcagcctgcgcgctgctgttcatcgcgaccctgctgctcggggcgctggtcaactacctcatcggcgaactgatccgggtcaccggcctctccggcaccgaccgcttcctcggcatggtcttcggcggtgcgcgcggcgtactgctggtcgtgctgctggtcggcctgctcagcctggccccggtacagcaggacccttggtggcagcagtcggtgctgatgccgcatttcctgatggttgccgactggtcgaagaacttcattctcggtttcgccggccagtggttgccggccgcgccgataacgccgccgagcggcatcggcgggctgcttcccagccagtga

SEQ ID NO: 323522 - DNA, 1506 bp, Pseudomonas aeruginosa
atgtgtggcatcgtcggtatcgtgggcaagtcgaacgtcaatcaggcgctgtatgacgcgctcaccgtcctccaacatcgcggccaggacgctgccggtatcgtcacctgccatgacgataagctgtacctgcgcaaggacaacggcctggtccgcgacgtcttccagcagcgccacatgcagcgcctgatcggcagcgtcggcatcggccatgtgcgttacccgaccgccggcagctccagctcggcggaagcgcagccgttctacgtcaactcgccctacggcatcaccctggcgcacaacggcaacctgaccaatgtcgagcagttggccaaggaaatctacgaatccgacctgcgccacgtgaacaccaactccgattcggaagtgctgctcaacgtgttcgcccacgagctggcggtgcgcaacaagctgcagcccaccgaggaggacatcttcgccgcggtttcctgcgtgcacgaccgttgcgtcggcggctacgcggtggtggcgatgatcaccggccatggcatcgtcggtttccgcgaccccaatgcgatccgtccgatcgtcttcggccagcggcataccgagaatggcgtcgaatacatgatcgcctccgagagcgtggccctggacgtactcggcttcaccctgatccgcgacctggcgccgggcgaggcggtgtacatcaccgaggaaggcaagctctatacccgccagtgcgcgaaggcgccgaagtacgcgccgtgcatcttcgagcacgtctacctggcgcgtccggattcgatcatggacggcatctcggtgtacaaggcgcgcctgcgcatgggcgagaagcttgccgacaagatcctccgcgagcgtcccgaccacgacatcgacgtggtcatcccgatcccggacaccagccgcaccgcggcgctggaactggccaaccggctcggcgtgaagttccgcgagggcttcgtcaagaaccgctacatcggccgcaccttcatcatgcccggccaggcggcgcggaagaaatccgtgcggcagaagctcaacgccatcgagctggagttccgcggcaagaacgtgatgctggtggatgactccattgtccgcggcaccacctgcaagcagatcatccagatggcccgcgaggccggggcgaagaacgtctacttctgctccgccgcgccggccgtgcgctaccccaacgtctacggcatcgacatgccgagtgcgcacgagctgatcgcgcacaatcgcagcaccgaggacgtcagcaagctgatcggcgccgactggctggtctaccaggacctgcccgacctgatcgacgcggtcggcggcggcaagatcaagatcgatcacttcgactgcgccgtgttcgacggcgagtacgtgaccggcgacgtcaacgaggcttacctgaaccggatcgaacaggcgcgcaacgatgcgaccaaggccaagagccaggcggtcagcgcgatcatcgatctgtacaacgactga

SEQ ID NO: 323523 - DNA, 1212 bp, Pseudomonas aeruginosa
atgactcaggactgggatgccgggcgtctcgacagcgacctggaaggcgcggccttcgacaccctggcggttcgcgccgggcaacggcggacgccggagggcgagcacggcgaggcgctgttcaccacttccagctacgtcttccgcaccgccgccgacgcggccgcgcggttcgccggcgaagtgccgggcaacgtctattcgcgctacaccaaccccacggtacgcaccttcgaggagcgcatcgccgccctcgaaggagccgagcaggcggtggccacggcgtcgggcatgtcggcgatcctcgccctggtgatgagcctgtgcagctccggcgaccacgtgctggtctcgcgcagcgtgttcggctcgaccatcagcctgttcgacaagtacttcaagcgcttcggtatccaggtcgactatccgccgttgagcgatctcgcggcctgggaggcggcgtgcaagccgaataccaagctgttcttcgtcgagtcgccatccaacccgctggccgagctggtggatatcgccgcgctggccgagatcgcccacgccaagggtgcgctgctggcggtggacaactgcttctgcacgccggccctgcaacagccgctgaagctcggtgcggacgtggtgatccactccgcgaccaagtacatcgacggccagggccggggcatgggcggggtggtcgccggtcgcggcgagcagatgaaggaagtggtcggcttcctccgcaccgccggaccgaccctcagcccgttcaatgcctggctgttcctcaagggcctggaaaccctgcgtatccgcatgcaggcgcacagcgccagtgccctggccctggccgaatggctggagcgccagccgggcatcgagcgggtctactacgcgggcctgccgagccatcctcagcatgagttggcccggcgccagcagagcggcttcggcgcggtcgtcagcttcgacgtgaagggcgggcgcgatgccgcctggcgcttcatcgacgctacccggatggtctcgatcaccaccaacctgggcgacaccaagaccaccatcgcccacccggcgaccacctcccacggtcgactgtcccccgaggaccgcgcgcgcgccgggatcggcgacagcctgatccgggtcgcggtcggcctggaagacctcgacgacctcaaggccgacatggctcgggggctggccgcgctgtga

SEQ ID NO: 323524 - DNA, 768 bp, Pseudomonas aeruginosa
gtgatcgaacccaacctgcgaggcaacggcaaggtcgccctggtcaccggggcggcccggggcattggcctgggcatcagtgcctggctgatcgccgagggctggcaggtagtgcttgccgacaacgaccgtgaacgcggggccagggtggccgaggcgctgggcgagcacgcctggttcgtggccatggacgtggcccaggagggccaggtggcgatgagcgtggccgaggtgctcggtcagttcggccgcctcgacggcctggtctgcaacgccgccatcgccaatccgcgcaatacgccgctggaggcgctgagtctcggcgagtggacccggaccctggcggtcaacctgaccggtccgatgctgctggccaagtactgcacgccttatctgcgcgcgcacaatggcgccatcgtcaacatcgcctcgactcgtgcccaccagtcggagcctgactccgaggcctacgccgcgagcaagggcgggttgctggcgctgacccatgccctggccgccagcctgggcccggagatccgtgtcaatgcgctcagccccggctggatcgatacccgcgaggccgccgagcgcgaggctgcgccgctgaccgagctggaccacgaccagcacctggtcggccgggtcggaacggtggaggatgtcgcgtcgctggtggcttggctgctctccgaggacgccggtttcgtcaccggccaggaattcctggtcgatggcggcatgacccggaaaatgatctacctcgactga

SEQ ID NO: 323525 - DNA, 1977 bp, Pseudomonas aeruginosa
atgtcccagcctttgctccacgccctgtttgccccttccagtcgttcgtacgttcccgccgtccttctcagcctggccctcggcatccaggcggcgcacgccgaaaacagcggcgggaacgccttcgtcccagccggcaaccagcaggaggcgcactggacgatcaacctcaaggatgccgacatccgcgaattcatcgaccagatttccgaaatcaccggcgagaccttcgtcgtcgacccgcgggtcaagggccaggtcagcgtggtctccaaggcccagctctcgttgagcgaggtctaccagttgttcctctcggtgatgagcacccacggcttcaccgtggttgcccagggcgaccaggcgcgcatcgtgcccaacgccgaggccaagaccgaggccggcggcggccagagcgcgccggatcgcctggagacgcgggtgatccaggtgcagcagagcccggtatcggaactcatcccgctgatccgtccgctggtcccacaatatggccacctcgccgcggtgccctcggccaacgcgctgatcatcagcgaccgcagcgccaatatcgcgcgaatcgaagacgtgatccgccagctcgaccagaagggcagccacgactacagcgtgatcaacctgcgctacggctgggtgatggacgccgccgaggtgctcaacaacgccatgagccgcggccaggccaagggcgcggcgggcgcccaggtgatcgccgacgcgcgcaccaaccgcctgatcatcctcggcccgccgcaggcgcgcgccaagctggtgcaactggcgcaatcgctggacaccccgaccgcgcgctcagccaacacccgggtgatccgcctgcgccacaacgacgccaagaccctcgcggaaaccctcggccagatttccgaaggcatgaagaacaatggcggccagggcggcgaacagaccggcggcggccgaccgagcaacatcctcatccgtgccgacgaaagcaccaacgccctggtcctgctggccgacccggacacggtcaacgctctcgaagacatcgttcgccagctcgacgtgccgcgtgcccaggtattggtggaagcggccatcgtcgagatctccggcgacatccaggatgccgtcggcgtgcaatgggcgatcaacaagggcggcatgggcggaaccaagaccaacttcgccaataccggactgtccatcggcaccctgctgcaatcgctcgagagcaacaaggcaccggaatccatccccgacggcgctatcgtcggcatcggcagcagcagcttcggcgcgctggtcaccgcgctctcggccaacaccaagagcaacctgctgtcgaccccgagcctgttgaccctggacaaccagaaagcggagattctggtcggccagaacgtaccgttccagaccggctcctacaccaccaacagcgaaggttcgagcaacccgttcaccaccgtggagcgcaaggatatcggcgtcagcctcaaggtcactccgcacatcaacgacggcgcggccctgcgcctggagatcgagcaggagatctcggccctgctgcccaacgcccagcagcgcaacaataccgacctgatcaccagcaagcgctcgatcaagagcaccatcctcgccgagaacggccaggtgatcgtgatcggcggcctgatccaggacgacgtttcccaagccgagtcgaaggttcccctgctcggggacatcccattgctcggtcgcctgttccgttccaccaaggacacccacaccaagcgcaacctgatggtcttcctgcgtcctacggtggtccgcgacagcgccggtctcgccgcgctctcgggcaagaaatacagcgacatccgggtcatcgacggcactcgcggcccggagggacgacccagcatcctgccgaccaacgccaaccagttgttcgatggacaggccgtcgatctgcgcgaactgaagacggaataa

SEQ ID NO: 323526 - DNA, 657 bp, Pseudomonas aeruginosa
ttgcctttctccggcgcctcttcccgctggctgcagcggtacgccccggcccttctggctgttgccctgatcatcgccatgagcatcagcctcgcctggcaggcggccggctggttgcgcctgcaacgcagcccggtagccgtcgccgcctcgccggtcagccacgagtcgatccgcagcgatccgacccgcctggcgcgcctcttcggcaccagcgcccaggaccccaacgccccgccaccggccaccaacctcgacctggtgctcaagggcagcttcgtccagagcgatcccaagctgtccagcgcgatcatccagcgccagggcgacaagccgcaccgctacgcggtcggcggcgagatcagcgacggcgtgaagctgcacgcggtctaccgcgaccgcgtcgaactgcagcgcggcgggcgcctggaaagcctgcccttcccgcaccgttccgggggactgctggccagcgcggacgacattacaagcgagaacgactcgatcgaacaactgcaaagcctgcaggatgagaacgctgcagcattgcgcgagcgcctggacgccttgcgccagcagatggaagccacgcccatcgcagaacccgccgaagaagactcgagcgagcccacgaccacgcctacggaaagcgactga

SEQ ID NO: 323527 - DNA, 1509 bp, Pseudomonas aeruginosa
atgatgacagccccattacccgacatcgccgcgccggccgcaccgccacggcgtctgccgttcagcttcgccaagcgccagggcctgttgttcctgtgcctggaggagcagtactggctggcctgccggccgcaggtggagctggcggcgatcgccgaggcgcagcgcttcgccggccgccgcctgccgctcaaggcgctcggcgaggacgccttcaaccaggccctggcggcctcctaccagcacgactcctcggcggccatgcagctcgccgaggacctcggcggcagcctggacctcgccgcgctggccgaccaggtcccggaaaccgaggacctgatggagcaggaggacgacgcgccgatcattcgcctgatcaacgcgatcctcggcgaggcgatccgcgagaacgcctcggacatccacctggaaaccttcgagaaacgcctggtggtgcgcttccgcgtcgacggcgtgctgcgcgaggtgctggagcccaagcgcgagctggcggccctgctggtatcgcggatcaaggtcatggcacggctggacatcgccgagaagcgtattccccaggatgggcggatttccctgcgggtcggcgggcgcgaggtggacatccgcgtctcgaccctgccctcggccaacggtgaacgggtggtgctgcgtctgctcgacaagcaggccgggcgcctgaacctgcaacacttgggcatgagcgagcgcgaccgcaagctgatggacgaaacggtgcgcaagccgcacggcatcctgctggtcaccggccccaccggctcgggcaagaccaccaccctgtacgccagcctgaccacgctcaacgaccgcacgcggaacatcctcaccgtcgaggatccgatcgaatatcacctggagggcatcggccagacccaggtcaacgccaaggtcgacatgaccttcgcccgcggcctgcgggcgatcctccggcaggacccggacgtggtgatggtcggcgagatccgcgaccgggagaccgccgagatcgcggtgcaggcttcgctgaccggccacctggtgctctcgaccctgcacaccaacagcgccatcggcgcgatcacccgcctggtggacatgggcatcgagccgttcctgctgtcctcctccatgcttggcgtgctggcccagcgcctggtgcgggtgctctgcccggcgtgcaaggagccctaccgcgccgacgaggccgagtgcgcgctgctcggcgtcgatcccgccgcgccgccgaccctgcatcgcgcccgcggctgcggcgagtgccaccagcatggctatcgcgggcgtaccggtatctatgaactggtggtgttcgacgaccacatgcgctcgctgatccacaacgaatcctccgagcaggaaatgacccggcatgcccgcaccagcggaccaagcatccgcgacgacggtcggcgcaaggtgctggaaggcgtcactacggtcgaggaagtcctgcgcgtgacccgggaagaataa

SEQ ID NO: 323528 - DNA, 1218 bp, Pseudomonas aeruginosa
atggccgccttcgaatacctcgccctcgaccccagcggtcgccagcagaagggcgtgctggaggcggacagcgcgcgccaggtccgccagttgctgcgcgagcgccaattggcgccgctcgatgtgaagcccacccgtacccgcgagcagagcgggcagggcgggcgcctgacgttcgcccgcggactgtccgcgcgcgacctggcattggtgacccggcaactggcgaccctggtccaggccgcgttgccgatcgaggaggcgctgcgcgccgccgcggcgcagtccacatcgcagcgcatccagtcgatgcttctcgcggtgcgcgccaaggtcctcgaaggccatagcctggccggcagcctgcgcgagtttcccaccgcctttcccgagctgtaccgggcgactgtggctgccggcgagcatgccgggcacctcggcccggtgctggagcaacttgccgactacaccgagcagcgccagcagtcgcggcagaagatccagctggcgctgctctatccggtgatcctgatggtcgcttcgctggccatcgtcggcttcctgctgggctacgtggtgcccgacgtggtccgggtgttcatcgacagcgggcagaccctgccgctgttgacccgcgtgctgatcggcgtcagcgactgggtcaaggcctggggcgcgctggccttcgtcgcggcgatcggcggggtgatcggcttccgctacgcgctgcgcaaggatgcctttcgcgagcgctggcatggcttcctgctgcgcgtgccgctggtcggtcggctggtgcgttccaccgacaccgcgcgcttcgcctcgaccctggcgatcctcacccgcagcggcgtgccgctggtggaggcgctggcgatcgccgccgaggtgatcgccaaccggatcatccgcaacgaagtggtcaaggccgcgcagaaggtccgcgagggcgccagcctgacccgctcgctggaagccaccggacagttcccgccgatgatgctgcacatgatcgccagcggcgagcgctccggcgagctggaccagatgctggcgcgcaccgcgcgcaaccaggagaacgacctggcggcgcagatcggcctgatggtcggcctgttcgaaccgttcatgctgatattcatgggcgcggtggtgctggtcatcgtccttgccattcttcttccgatcctttctctcaaccaactcgtggggtaa

SEQ ID NO: 323529 - DNA, 429 bp, Pseudomonas aeruginosa
ttgcagcgtcgccaacagtcgggcttcaccctgatcgaaatcatggtcgtggtggtcatcctcggcatcctcgccgccctggtggtgccgcaggtgatgagccgtcccgaccaggccaaggtcaccgtggccaagggcgacatcaaggccatcgctgccgcgctggacatgtacaagctggacaacttcgcctatccgagcacccagcagggcctcgaggcgctggtgaagaagcccaccggcaatccgcagccgaagaactggaacaaggacggctacctgaagaagctgccggtcgatccgtggggcaatccctaccagtatctggcgccgggcaccaagggcccgttcgacctgtattcgctgggcgccgacggcaaggaaggcggcagcgacaacgacgccgacatcggtaactgggacaactga

SEQ ID NO: 323530 - DNA, 519 bp, Pseudomonas aeruginosa
atgcgggcttcgcgcggcttcaccctcatcgagctgatggtggtgatggtcatcatcagcgtgctgatcggcctggcggtgctcagcaccggcttcgccagcacctcgcgggagctggacagcgaggccgagcggctcgccgggctgatcggcgtgctgaccgacgaggccgtgctggacaaccgcgagtacggcctgcgcctggagcgcgatgcctaccaggtactgcgctacgacgaagcgaaggcgcgctggttgccggtggcgcgcgacagccaccgcctgccggagtgggcggagctgaccttcgagctggacggccagccgctggtgctggccggcagcaagggcgagaaggagcagaagaaaggcaccgaccagccgcaattgctgatcctctccagtggcgaactcagtccgttccgcctgcgcctggccgagcgcggacccgaggggcgggcgttgtcgctgagcagcgacggtttccgcctgccacgggtcgaggtggcgcggcgatga

SEQ ID NO: 323531 - DNA, 390 bp, Pseudomonas aeruginosa
atgaagcgcgcgcgtggtttcaccctgctggaagtgctggtggccctggcgattttcgccatggtcgcggccagcgtgctcagtgccagcgcgcgcagcctgcagaacgcctcgcggctggaagacaagaccctggcgatgtggatcgccgacaaccgtctcaacgaattgcaactggaacagacgccgccctccagcggccgcaaccagggcgagctggagttcgccgggcgtcgctgggagtggcgcacccaggtcgacagcaccgccgagcaggatatgcggcgggtgatcgtctgggtcgcggcgaagcccctcggccgcgagcgtggcagcatcgaggaacgcgccgcggcgcgcctcgtcggtttcctcgggagccagccatga

SEQ ID NO: 323532 - DNA, 714 bp, Pseudomonas aeruginosa
atgaggctacagcggggcttcaccctgctcgagctgctgatcgccatcgccatcttcgccctgctggccctggccacctaccgcatgttcgacagcgtgatgcagaccgaccaggcgactcgcgtgcaggagcagcgcatgcgcgagctggtgcgggcgatgggcgccctggagcgcgacctgacccaggcggtcgaacgtccggtacgcgacgaactgggcgataaccgtggcgccttcctcagcgagggtgagaacgaccagatcgtcgaattcacccgtggcggctggcgcaacccgctcggccaggcgcgctcgcgcctgcagcgggtgcgctggtcgctgtccggggagaccctcgaacgccgctactggctggttctggaccgcgcccaggacagcaagccacgggtgcagcaggtgctggacggggttaccgcgctgagctggcgcttcctcgacaaggagcacaactggcagggccactggccgaccgacgaaggcagcgaggaggaacgcctggaaagcctgccgctggcggtggagatgaccctggagcaccgccactacggcaagctggcgcgcgtctggcgtctgctcgatccgccgctcaagcaggaccagccgcagggccagccgggcggcgagaatggcgagaacggcgagggcggggtgccgcagccgccggaaggcatgccgggggcgccggaatga

SEQ ID NO: 323533 - DNA, 1002 bp, Pseudomonas aeruginosa
atgaggcgcgggcagaacggcgtcgcgctgatcaccgtgctgctggtggtggcggtggtgaccatcgtctgcgccgggctgatcatccgccagcagttggcgatacgcagcagcgccaaccagttgcacgtgcgccaggcctggcactatgcgctgggcggcgaacgcctggcggaagcggtgctgcgccgcgacctgcgccagggcggcgagaatacccgcgagccggtggaccacctgggcgaggcctgggcgcgaccgatgacgccgttcaagctggatgacggcggcgagctgcgggtgcggatcgaggaccccagcgggcgtttcaacctcaacgggctggtgcgcaagcgcaaggtcaagccggattcggtgaagcagttccgtcgcctgctggccaccctggggatgaaggaagagatcgtccagggcttgccggaccggctggccgactggctcgacgccgaccagaatccgcagggcgagcaaggcgccgaggacaaccagtacctgctggaggcgccggcctaccgcgccgccaaccgcagtttcaaggacgtgtccgagctgcgcctgctgaaattgtcggaagccgactatcgacgcctgctgccgttcgtcagcgccttgcccgaagatgcgccgctgaacgtgaacactgccagcgtgccggtgctggccgccatgttcgagatcgatccgggacaggcggaaaacatcgtggacgcccgcggtcgggaaggtttccagagcaaggacgatttcaccaagcatctgacccagttgggttcgaagaccggaaacgtcagttatgccgtcggcacccgctacttccaggtgatcagcgaggtcagcctgggcgaccgccggcaggtgctggtgagtaccttgcagcggggcaaggacggcaagatacgcgtgatggcccgcgacatggggcagggcggcctgcccatcccgtcgacgggcggcgacgattggaagaaggacgagcgatga

SEQ ID NO: 323534 - DNA, 1149 bp, Pseudomonas aeruginosa
atgagtggagtgagtgcgctgttcctgccgcccgccagcacggcgggagccgatggggaactggcggtatggtgggtgcaggatggcgagtgccggcgcgcgccgttcgcccaggcgctggcggagatccgcgcgccctggcggctgtacctgccggtggaggcggtgaccgcctgcgcggtgaacctgcctacacagaaggcgcgctggttgcgccagtcgctgccgttcgcggtggaggaacaactggccgacgatgtcgagcagatgcaccttgcccttggtccggcgctggccgacggccgccaccgggtattcgccgtgcagcgcacctggctcgccgcctggctggcgctggccgagggcgcgggcaaggcgccggcttcgctgcatgtcgatgccgattgcctgccgggcgagggcagttgcctgttctggctggaagagcgctggttgctcggcggcagcggcgccgtacgcctggcctgcggcagcgaggattggccggtactgcgcgacagttgcccgccgccgcagcgggccttcgccgcgcaggaggtggcgcccctggagggggtggaagtccaggccctggcgggcaatccgcacgtctggctgagcgagcagccgctgggcaccgacctggcccaggccgagttcgccgcgcgccagcagagcagccagtggcgccgctggcggccgctgctggggttggtcgggctgtggctggtattgcaatggggcttcaccctggtccaggcctggcagttgcagcgcgaaggcgaccgctacgcggcgcagagcgcagaactctaccgccagttgtttcccgaggaccgcaagctgatcaacctgcgcgcgcagttcgaccagcacctggccgacagcgccagcagcggcggcgagggccagttgctcggcctgcttggccaggccgccacggtgatcggcggcgagccgacggtgagcgtcgagcaactggacttcagcgccgctcgcggcgacgtcgccctccaggtgcgggctcccggtttcgacgtgctggaacggctgcgttcgcgtctcagcgagtccgggctggcggtgcagctgggttcggccagccgcgatggctcgacggtcagcgcgcgcctggtgataggaggttga

SEQ ID NO: 323535 - DNA, 525 bp, Pseudomonas aeruginosa
atgaaggtgatgacgcaattccacgagcgcctcagggcccaggcggaaacctcgcagctggcgatccgctggcgcgggctgccggcgcgggaccgcctggcgctgctctggctcggcgcgttcctcctgctggtgatgctctacctggcgctgtggcgcccggccgagcgccatttgcagtcggcgcggcagtacttcaccgaacagcgcgcgctgcatgcctacatccagcagcaggcgcccaacgtgcgccaggccgatgccgcggcgccgcaggcgcagatcgacccggcggcgctgcagggcatggtcacggcttcggcggcccaggccggactgagtgtcgagcgcctcgacaacgaaggcgagggcgccgtgcaggtggccctgcagccggcgccattcgccaagctgctgccctggctggagcagttgaacgggcagggcgtgcaggtggcggaggccggcctggaccgccaggtcgacggccgggtctcggcgcgcctgagcctgcgggtcgagtga

SEQ ID NO: 323536 - DNA, 423 bp, Pseudomonas aeruginosa
atgaaagcgcgtatccagtgggcgggcgaggcgatgttcctcggcgagtccggtagcggccacgtggtggtcatggacggtccgccggaccatggcggacgcaacctcggggtgcgccctatggagatggtcctgatcggcctcggcggctgcaccaacttcgatgtggtcagcatcctgaagaaggcgcgccagccggtggagagctgcgaagccttcctcgaggccgaaagggccgacgaggagcccaaggtgttcacgaagatccacgtgcacttcgtggtcaagggccgcggtctcaaggaggcccaggtcaagcgcgcggtggagctgtcggcggagaaatactgctcggcatcgatcatgctcggtcgcggcggggtggagatcacccacgactacgagatcgtcgaactcggctga

SEQ ID NO: 323537 - DNA, 795 bp, Pseudomonas aeruginosa
gtgaaaagcaaactcaagctccacgggttcaacaacctgacgaagaccttgagcttcaacatctacgacatctgctacgccgagacgcccgaagacctccaggcctacgtgcagtacatcgacgaagagtatgacgcggagcgtctgacgcagattcttaccgatgttgtcgacatcatcggcgccaatatcctgaacatcgcgcgtcaggactacgacccccagggcgccagcgtgaccatcctgatctccgagcagccggtcactccgaccgacagccagatcgaagagtccccgggcccgctgccggacaccatcctggcgcacctggacaagagccacatcaccgtgcatacctacccggaaatccatccggtggacggcatcgcgaccttccgcgtggacatcgatgtgtccacctgcggagtgatctccccgctgaaggccctgaactacctgatccaccagttcgactcggacatcgtcacggtcgactatcgggtccgcggcttcacccgcgacatcgaggggcgcaagcatttcatcgaccacgagatcaactcgatccagaactatctctccgacgacacgcgcgaggcctaccagatgaccgacgtgaacgtgtaccaggagaacctgttccacaccaagatgctgctcaagaacttcgaactggagaactacctgttcggcgacgctacccggacgctctcgacggagcagcgcgagcaggtcacggaacggctcaaacacgaaatgctggagatcttctacgcgcgcaacatgccgcgctga

SEQ ID NO: 323538 - DNA, 648 bp, Pseudomonas aeruginosa
atgtccgccgaccgccactattcgcccatcgaccgtttcctgctgcaggccgactccgccctgcgcaccctgctgccgttcagcggccagccggcgcgaccgtcgccggccatcgtggaacccgatggcgaactgagcgaggaagacacccgccatatcgccggcctgatgcgcatcaaccacaccggcgaggtctgcgcccaggcgctgtaccagggccagtcgctgaccgccaagctgcccgaggtccgcgaggcgatggaggaagccgccgaggaggagatcgaccacctggcctggtgcgagcaacgcatccgccagttgggcagccgtcccagcgtgctcaatccgatcttctacggcctgtccttcggcgtcggtgccgccgccgggctagtcagcgaccgggtcagcctgggcttcgtcgccgccaccgaagaccaggtgtgcaagcatctggacgaacacctggcgcagattccccaggaggatcggaaatcccgtgccatcctcgagcagatgcgtatcgacgaggaacagcattcgagcaacgccctggccgccggcggcctgcgcttcccggcaccggtgaagctgggcatgagcctgctggcgaaggtgatgaccaagagcacctaccgcatctga

SEQ ID NO: 323539 - DNA, 339 bp, Pseudomonas aeruginosa
atggactgtctgttctgcaagatcgtggcgggggaagttcccgcgcgcaagttctacgaagacgaggaagttgtcgcgtttcacgatatcggcccgcaggcgccggtgcacttcctggtcatcccgaaaaggcacattcccaccctcgagcacctgaccgaggcagaccggccgctggcaggccatatcctcttcaccgcccagcgcctggcccgggagcagggctgcgaggaaggcttccgtgtggtgatgaactgcaacgaccttggcgggcagaccgtgcaccacatccacatgcacgtgctgggtcaacgccagatgcactggccgccgggctga

SEQ ID NO: 323540 - DNA, 1482 bp, Pseudomonas aeruginosa
gtgaagaacgacatacacgacctcggcctggtcctggattcccgggtcaagctgatcctgatcgagtcctgggacgagccgaaggtgatggaaaccctcaccggcctggcggtcaggcgcggccttggcctgtatgcctggtcggtgaccgagggcgtgcagcgcctgggcttcggcggcgagccgctgggcggggaggagagccgcgacccggtcgcggcgttgcgcttgatcaagcacgatcagcaggcgaatctctacgtgctctgcgacctgcatcctttccttggcgacagcccgaccctggtgcgcctgctcaaggaaatcgccatggccgaaggcaatcatcgaccgaccgtggtgctggtgtcccatgcgctgaagctgccggccgaagtgcagcgcttcgccgcgcggttctcgctgtccctgcccagcgaggacgaactgctcggcatcgtccgcgaggaagcgacgcgctggagcgagcgcaaccgtggtgcccgcgtgcgcaccgacaaccgcaccctgcagcaggtggtgaagaacctgcgtgggctcagccatgccgaggcgcggctgctggcgcgcaacgtgatctgcaacgatggggcgatcacccaggaggacctgcccgagctgaaccgcaccaagttccagctactcgacctggagggcgtgctgagcttcgagtacgacaccgcgcgcttcgccgaggtcggcgggcttgccgcgctcaagcgctggctcggcgagcgtcagtcggcgttcctcgccggcacgcctggcgaccagccgaagggcatgatgctggtcggcgtgcagggcgccggcaagagcctggcggccaaggcggtggccggcctctggggcttgccgttgctgcgtctggatttcgcctgtctctacaacaagtacttcggcgaaaccgagcgcaacctgcgcgaggcgctgcgcctggccgaacagatggcgccctgcgtgctgtggatggatgaagtggagaagggcatttctggcggcgaccaggacaacggcgtcagtcagcgcgtgctgggtaccctgctgacctggatggccgagcgcgaggcgccggtcttcatggtcgccaccgcgaacgctatcgaccgcctgccgcccgaactgatccgcaagggacgcttcgacgaattgttcttcgtcgacctgccgacgccggaggttcgcgccgagatcttccgcatccacctgcaacgccgcgagctggagccggcacagttcgacctccttctgctggcggctgccagcgagggtttcagcggggcggagatcgagcaggcggtggtggcggcactgtacgccgggcaggcgcgacagcaggcggtggatcaggagctgttgctcagggagctgtcgcgaacctcgccgctgtcggtgctgatggcggaaaagctcgccgcgctgcggacctgggccaaggggcgggcggtgccggcagactga

SEQ ID NO: 323541 - DNA, 801 bp, Pseudomonas aeruginosa
atgccccgttatgccctgatcaccggcgcttccagcggtatcggcctggccctagccgaagccctggcccggcgcggtcgcgccctgatcctggtggcgcgccagcgcgacgcgctggagagcatcgcctatgagctggcgcagcgtttcggcgtggaagtgctgttccgcacctgcgatctttccgagccgctgcaactgtcagggttgttgcacgaactggaacagggcgaacgacagatcgacctgctggttaacaatgccgggatcggtacctccggccccttcatcgaccaggaatgggcgcgggaacaggagctgatcgaactcaacatcctggccctggcccgcctttgccactccctcggcgcccgcatggcggcacagggcgggggccagatactcaatatcgcctcggtggccgccttccagcccggcgcctggatgagcaactactacgccagcaaggcctacgtcctgcacttctcggaaggcttgcgggaagaactgaaagagcgcggcgtcaaggtctcggtgctgtgccctgggccaacccgcacggcattcttccgggaagccgggatgcggctcggcaggctcgaccggagcaagctgatgatgaccccggaggaagtcgcgctgctggccctgcgcgggctggacaagaaccgcgccctgatcgtccccggttggcgcaatcgcctgctggcgctgagcccacgcctggcgccacgctggctggtacgccgactcgccgcgcggatcaacgcctcggcggtaccctccgccccacggggttga

SEQ ID NO: 323542 - DNA, 1077 bp, Pseudomonas aeruginosa
atgaccgaccaacgcttcaagatcgtcttctccggcgagctgatgcccgacgcatcgctcgaaaccgtgaaggacaatctcgcccgcctgttcaagagcgaaccgggcaagatcgacgccctcttcggcggtcgcccggtggtgctgaaacgcgaacttccagaggccgaggcggagcgttacctgaccgccttgcgccaggccggcgccaatgcctacaaggaagtcgacctggcggccagcctgagcctggtggaaacgcccgatcacaacccccaggtcgcggaggaaaccccggcgcaagacctgcctcccatgacctgcccgaaatgcggccatgaacagcccagcggagcggaatgttcggcctgcggcgtcatcatcgagaagtacctggcacgccaggcgcagctcggcgaaaacgccgcgcctgcggccaccgcggctgcgggcgcgtctccctacacaccacccagcgcccaggtcggcgacgccctccccgagttcggcgagctgaacgtgttcaccaccaacggccggatcggacgcctgcgctatctcggctggtcgatggcgatgacgctgtgcttcctggtcatcatgggcctgggcttcctgctcggcgaaaccgtcggcgtggccgtcaccgccctggcctcgatcgccttcatcgtcatcgccgtgatgatcggcgtgcagcgcctgcatgacctcggctggtcgggctggctctggctgctcaacttcgtccccttcgtcggcagcgtgctcggcatcctgatgctggtcctgcccggcagcaccggcgccaaccgctacggtccgccgccgccggcgaacagcaccggggtgaaagtcctggccagtctgatcatcctgctgccgatagtcggtatcatcgccgccatcgccctgccgtcctaccagggttacctggagcgagcgaactatgacggcggcgccagcgctccagccgacccgtacaccaccgacgagcaggccgccgcagcggcggccgaagccgatgaagccgccacggcggcggcagaggccatggaagacgacgaccaacagtag

SEQ ID NO: 323543 - DNA, 969 bp, Pseudomonas aeruginosa
atgtccttgcccgccctgctcgaccaacgcctgcgactgccgatggtggccgcgccaatgttcctggtatccaacccgcagttggtgctggcctgctgccgcagcggcatcgtcggcagcttcccggcgctcaaccagcgcgagagcagcggcttcgagggttggctggaggaaatcggggccggcctgcaggcgctggacaatcccgcgccctatgcggtgaacctgatcgtccacaacaccaatccgcggttgcaggccgacctgcggatctgcgtcgagcaccgcgtaccgatcgtcatcaccagcctcggcgcagtgcgcgaagtggtagacgctgtgcatagctacggcggcctggtgttccacgacgtcaccacccgccgccacgccgaaaaagccgccgaggccggggttgacggcctgatcgcggtggcggccggcgcgggcgggcacgccgggacctggagccctttcgcgctggtcgcggaaatccgccagttcttcgacaagaccctgctgttggccggctgcatcaaccacggccacgagattctcgccgcacagatgctcggcgccgacctggcctatctcggcactcgcttcatcgccacccgcgagagcaatgcctccgacgcctacaagcagatgatcctggaggcacgcgccgccgacatcgtgcacaccccggcggtgtccggcgtaccggccagcttcatgcggcaaagcctggaggccgccggctacgatctgaagcgcctgaccgacaaggcagacatgaactacggcgagaaactcaagccggtgaacgacgaggccaaggcctggaagaccgtgtggtccgccggccagggcgcgggcaacatagacgacttgcccggcgtcgacgagttggtcgcccgcctcgaccgggaatatcgcgccgccctgcggaacatggatcgcctggccaaccgctggccgcgctga

SEQ ID NO: 323544 - DNA, 423 bp, Pseudomonas aeruginosa
atgtacatgtggctcaaagccttccatatcatcgccgtggtctgctggttcgccggcctgttctacctgccgcgcctgttcgtctaccacgccatgagcgaggaccagaccagccgggaacgcttctgcgtcatggagcgcaagctctaccgagggatcatgatgccctcgatgctcgccaccctggtccttggcctctggatgctctatctcacccccggctggctgagccaaggctggctgcacgccaagctgaccctggtggtcctgctgatcggctaccaccacgcctgcggcgccatgctcaagcgcttcgcccgcggcgagccggggcgcagccatgtgttctaccgctggttcaacgaagtgcctgtactgttcctgctgctgatcgtcctactggtggtgctcaaacctttctga

SEQ ID NO: 323545 - DNA, 1035 bp, Pseudomonas aeruginosa
atgatcaaggtcggcatcgttggcggtacgggttatacgggcgtggaactgctgcgcctgctggcgcagcatccgcaggcccgggtggaagtgatcacttcgcgttccgaggcgggggtgaaggtcgccgacatgtacccgaacctgcgaggtcattatgacgacctgcagttcagcgtgccggacgtgcagcgcctcggcgcctgcgacgtggtgttcttcgccacgccgcacggcgtggcgcacgcgctggctggcgaactgctggacgccgggacccgggtcatcgatctgtccgctgacttccgcctggcggacgccgaggagtgggcgcgctggtacggccagccgcatggcgctccggcgctgctcgacgaggctgtctacggcctgccggaagtgaaccgcgagaagatccgccaggcccgcctgatcgccgtgccgggttgctacccgaccgcgacccaactgggcctgatcccgctgctggaggccggcctggccgacgcctcgcggctgatcgccgattgcaagtccggggtcagcggcgccggtcggggcgccaaggttggctcgctgttctgcgaggcgggcgaaagcatgatggcctacgcggtcaaggggcatcggcatctcccggaaatcagccagggcctgcgtcgggcctccggcggcgacgtcgggctgacgttcgtaccgcacctgacgccaatgatccgcggtatccatgcaaccctctatgcccatgtcgcggatcgctcggtcgacctccaggcgctgttcgagaagcgctacgccgacgaacccttcgtcgacgtgatgccggccggcagccatccggagacccgtagcgtgcgtggcgccaatgtctgccgaatcgccgtgcatcgcccccagggcggcgacctggtggtggtgctgtcggtgatcgacaacctggtcaagggcgcctcgggtcaggcgctccagaacatgaacatcctgttcgggctggacgagcgcctgggcctctcgcatgcggccctgctcccctga

SEQ ID NO: 323546 - DNA, 720 bp, Pseudomonas aeruginosa
atgtccggctgggaactccagttccgtgatccacggcgggcctggctggtccgcctcggggtgggtgcgctgctgctggcggttccgctggcgtttctcggcggtcgctggtcgaccggggcggacgccgctcgcagcgaggccgatgcgcaacgccaggaaaccctgatcggcgagcagaaggccgagctggagcgcctgcgtaccgaaatcgaggtgttgcgcagcggagaacgtctcagccagcaggccaccgaacagagccggcagaccatcaagctgcttgaggaccaggtgttcaagcagcaacaggacatcgcgttctacaagggggtcgtcgcgccggccagcaaggcggatgcgctggaaatccgtgcctttgaggtgcagggcacggacgacccgcagcgcttccgctataaggtgatgctcagccgcctgggcagggacgaccgcaagctggatgggcggctgaaagtccgcatcagcggcaagctggcgcgcaaggacgctacctacgacctcgaacagctctcgccggaactgggcaagacagggctgtcgatttccctccggcatttccagtcgatcccagaaggggggcgtttcgccgagctggagctgccgaagaacttcatcccgaagctgatcgacgtacgtgcggagctgaatggccagtccaaaccgctacagcgccgtttcgattggccgaagcagtga

SEQ ID NO: 323547 - DNA, 414 bp, Pseudomonas aeruginosa
atgtggagcaagaacaaaggccgggccgacgtccagcgtttcaccgggcagaccagcctgatcgccagcggcgccgaactggtcggtgacatgaacctcaagggcgcggtgcagatcgacggcaccgtccgcggagcgttgcaggcgcacgaagggctggtgcgggtcagcgccggcggtcgtgtcgacggcgaaatccgggccccccatgtgatcatcgacggtcaggtggatggcgacatccatgccatcgaacgcctggagctgggggcccaggcccgggtgaagggcaatcttcactatgggctgatcgaaaccgccatgggggcccagatcgagggccgcctgtgcccgatgaccgaggccagtccgcgccccctggaactgcctgccagcgtggaaactgtggattag

SEQ ID NO: 323548 - DNA, 351 bp, Pseudomonas aeruginosa
atgagcatcgagaccttcacccctacgcccctgctctttaccccaggcgcagccaacaaggtgaagacgttgattgacgaagagggcaatcctcgcctgaaactgcgtgtattcgtcaccggcggcggttgctcgggcttccagtatggcttcaccttcgacgaagatatcgccgatgacgataccgtgatcgagcgcgatggcgtgggcctggtggtggacccgatgagcttccagtacctggcgggctcggaagtcgactaccaggaaggcctggaaggttcgaggttcgtcatcaagaacccgaacgccgccacgacttgcggttgcggacagtcgttctcgatctga

SEQ ID NO: 323549 - DNA, 1092 bp, Pseudomonas aeruginosa
gtgccgcgctacctggggttgatgtccggaaccagcctggacggcatggacatcgtcctgatcgagcaaggtgatcgcaccaccttgctcgcttcccattacctacccatgccggccgggctgcgcgaagacatcctcgccctgtgcgtccccggtcccgatgaaatcgcccgcgccgccgaagtcgagcaacgctgggtcgcccttgcagcacagggcgtgcgcgaactgctgctccagcagcagatgagccccgacgaagtccgtgccatcggcagtcacggtcaaaccatccgacatgaacccgctcgccacttcacggtgcagatcggcaaccccgccctgctggcggagctgaccggcatcgatgtcgtcgccgacttccgccgccgcgacgtcgcagccggcggccagggcgccccgctggtaccggccttccatcaggcgctgtttggcgatgatgacgcctccagggcggtcctgaacatcggtggcttcagcaacgtttcgctgctcagccccggaaagccggtacgcggcttcgactgcggcccgggcaacgtgctgatggacgcctggattcatcaccaacgcggcgaacatttcgaccgggacggtgcgtgggccgccagcggccagatgaaccacgcactgctggcaagcctgctggcggatgagttcttcgccgcgcgtggccccaagagcaccgggcgcgagcgcttcaacctgtcctggctgcaggagcacctggctcgtcaccctgccttgccggcagcggatatccaggcaaccctgctggaactgagcgcgcgcagcatcagcgaatcgctgctggacgcccagccggactgcaaagaggtgctggtatgcggcggcggcgccttcaatacggcgctgatgaagcgcctggccctgctgatgcccgaagctcgggtcgccagtaccgacgaatacggcattccccctgcctggatggagggcatggcattcgcctggctagcccatcggtttctcgagcgcctgcccggcaactgccctgatgtgaccggtgcgctcggtcccagaactctgggcgcgctgtatcccgcctga

SEQ ID NO: 323550 - DNA, 1200 bp, Pseudomonas aeruginosa
atgaagtcggttgaagagcagctggcgctgatccagcgcggtgcagacgagatcctggtagaggcggaactggtggccaagctgaagcgtggccagcccttgcggatcaaggccggcttcgacccgaccgctcccgatctgcatcttggccataccgtgcttattaataagctgcgccagttccaggacctggggcatcaggtgatcttcctcatcggcgacttcactgggatgatcggtgaccccagtgggaaaagtgttacccgtcctcccctgacgcgcgagcaggttctggagaatgcggagacgtacaagtcccaggtcttcaagatcctcgaccctgccaagaccgaagtagccttcaattccacctggatggaccaactgaccccggctgacttcattcgtcttgcctctcagtacaccgttgcgcggatgctggagcgtgatgactttagcaagcgctatgccagcaatcagcccatcgctatccatgagttcctctatccgctggtccagggctatgactccgtcgcgctgaaggcggacgtcgagttgggtggcaccgaccagaagttcaacctgctgatggggcgcgagctgcagcgtgcctatggccaggaggcccaggtgatcctgaccatgccgttgctggaagggctggatggcgtgaagaagatgtccaagtcgctgggcaactatattggtatccaggaagcgccgggtgtcatgtacagcaagctggtctccattcctgacacgctgatgtggcgttacttcgaactgctcagcttccgttccctggatgagatcgatagcttccgcaaggacgtcgaggcgggcgccaacccgcgtgacatcaagatcaagctggccgaggagatcgtcgcccgcttccatggcgaggaggcggcggcgagcgcacacaagtcggccggcaatcgcctgaaggatggcgagctgccggaagacctgccggagatcgagctgtcgtcccccgaggatatgcccgttgcctctgtccttaataaggcggggttggtgaagaatgcggctgcggctcgcgatctcctgggtgccggcagcgtcaaggtggatgggcaggtcgtcgaccgcaccttcatgctggcgctgggtgagacccgtgtgttccaggcagggaagaaggctttcgcgcgcatcacgctgaaggctgaataa

SEQ ID NO: 323551 - DNA, 684 bp, Pseudomonas aeruginosa
atggtccggacgcggcgccgcgccgggcggcggcggggtgaggaagtcgaacaggtcgggcttggtgtccagcggcgagccgccctggaaatgcgccgtcaccgcggggtgcggggtgggcgccggttcggcgaaggcaggcgccgatccggcggcctgccggctcatcagggcgtcgaagctggtgaacggatcggtctgcggattgccgctgccgggcagggcgatgtcatggccgagctggacgaggatgtcgtattcgccgaggcggacggtctcgccgtcctgcagcggctcgctgttgccgcggcgcaggcggtgcccggcattgaccagcagcacgccgttggtgctggtgtcggtgaggtagtacaccccgtcgcggttgaggatggtgcagtggcggctggagaccaggcgctccgggtccggcaggacccagtcgttgtccgggccccgaccgatggtcagctgtccctggtccagtaccttttccgaacactgaccgggggtcagcttgtggtagctggtgatggtcaatcgcagcggcattgctactccttgcattgccagcgcccggctcttccaggcgctcacccccgtgcccgagggatttcggttcgcatccaggctggcccgacggctttccggcgtttcgtcgcctcgggaagacacatcgggtga

SEQ ID NO: 323552 - DNA, 1035 bp, Pseudomonas aeruginosa
gtgctggatgtacccgttttgctggctgccgtatccccggactcgccctgtggcgacgatctggagtacgacgccgcgttcctcgaactcgaacgcatcgcccagggccaacccgagcgccagatgggcgatgccgtgctgcccgccgaaccgccggagtggccgcgcgtacgcgcgctggccagcgaactgttcggccgtagcaaggacctgcgggtagccaacctgctgctgcagagcaacgtcgccctcgacggcctggacgggctcgccgacggcctgctgctggtccgcgagctgctcggccagtactgggacggcgtctatccgctgctcgacgccgatgacgacaacgaccccaccttccgtatcaacgccctcaccggcctggtcgccgaaccgctgctgcaactggtctgggcgatcccgctggtgcgctcgcgggcgttcggcccggtcaacctgcgcgccgcgctgaacgccgccgggctgcaacgcttcgccagcgagaccctgagtcccgagcagatcgccggcgccttcgccgatgccgacgccgatgcgctggccgccacccggcgcgccctggaaggcgcccaggaacatgccctggccatcgagagcggcgtcgccgaacgggtcggctcggcccagggactcgacctcggtccccttcgtcaactgctgcgccaggccctccaggtgttcgacctgtacggcccgcagggcgccggcgagcccttggcgccgggcgccgaagcggccgccgacgagcaggggggcgccgcgcctgtcgcagccgtcgccgcgccggcaccgcgagccagcggcgagatcgccaaccgcgaagacgtcctgcgccagctcgaccgcctgctcgagtattacgttcgccacgagccgtcgagcccggtgccggtgctgctcaagcgcgccaagacactggtgacggccgacttcgccgaaatcgtgaggaatctcatccccgatgggatttcccagttcgaaaccctgcgaggcccggaaagcgagtaa

SEQ ID NO: 323553 - DNA, 519 bp, Pseudomonas aeruginosa
atgggaagcactaccagcagtcagaagttcatcgccaggaaccgggcgccacgcgtgcagatcgagtacgacgtggagttgtacggtgccgagaagaaggtccagctgcccttcgtcatgggcgtcatggccgacctcgccggcaagcccgccgaaccccaggcggcggtcgccgaccgcaagttcctggagatcgacgtggacaacttcgatgcccggctgaaggcgatgaagccgcgggtggccttcaacgtaccgaacgtgctgaccggcgaaggcaacctgagcctggacatcaccttcgagagcatggacgacttcagccccgccgcggtggcgcgcaaggtcgattcgctgaacaagctgctcgaggcgcgtacccagctggccaacctgctgacctacatggacggcaagaccggcgccgaggaaatgatcatgaaggcgatcaaggacccggccctgcttcaggccctggccagcgcgccgaagcccaaagacgacgagccgcaggcgtaa

SEQ ID NO: 323554 - DNA, 1497 bp, Pseudomonas aeruginosa
atggccgaattgagcaccgagaacctggcccagggccagaccaccaccgagcagaccagtgagttcgccagcctgctgctgcaggagttcaagcccaagaccgagcgcgcccgcgaagcggtggagaccgccgtgcggaccctcgccgagcatgccctggagcagaccagcctgatctccaacgacgcgatcaagtcgatcgagtcgatcatcgcggcgatcgacgccaagctcaccgcgcaggtcaacctgatcatgcaccacgccgacttccagcaactggaaagcgcctggcgcggcctgcactacctggtcaacaacaccgagaccgacgagcaactgaagatccgcgtgctgaacatctccaagccggagctgcacaagaccctgaagaaattcaagggcaccacctgggaccagagcccgatcttcaagaagctctacgaagaggaatacggccagttcggcggcgagccctatggctgcctggtcggcgactactacttcgaccagtcgccgccggacgtcgagctgctcggcgagatggcgaagatctccgccgccatgcacgcgccgttcatttccgccgcctcgccgacggtgatgggcatgggttcctggcaggaactgtccaacccgcgcgacctgaccaagatcttcaccaccccggaatacgccggctggcgttcgctgcgcgagtccgaggactcccgctacatcggcctgaccatgccgcgcttcctggcgcgcctgccctacggggcgaagaccgatccggtggaagagttcgccttcgaggaagaaaccgacggcgccgacagcagcaagtacgcctgggccaactcggcctacgcgatggcggtcaacatcaaccgctccttcaagctctacggctggtgctcgcggatccgcggcgtcgagtccggcggcgaggtgcagggcctgccggcgcacaccttccccaccgacgacggcggcgtggacatgaagtgcccgaccgagatcgccatttccgaccgccgcgaggcggagctggcgaagaacggcttcatgccgctgctgcacaagaagaacaccgacttcgccgccttcatcggcgcgcagtcgctgcagaaacccgccgagtacgacgatccggacgccaccgccaacgccaacctggcggcgcgcctgccctacctgttcgccacctgccgcttcgcccattacctgaagtgcatcgttcgcgacaagatcggttccttcaaggagaaggacgagatgcagcgctggctgcaggactggatcctcaactacgtcgacggcgacccggcccactccaccgagaccaccaaggcccagcacccgctggcggcggccgaagtggtggtggaggaagtcgaaggcaatccgggttactacaactcgaagttcttccttcgcccgcactaccagctcgaggggctgacggtatcgctacgcctggtatccaagctgccttcggccaaagaggcctga

SEQ ID NO: 323555 - DNA, 489 bp, Pseudomonas aeruginosa
atggctgttgatatgttcatcaagatcggcgacgtcaagggtgagtccaaggacaagactcacgccgaggaaatcgacgtgctggcatggagctggggcatgtcccagtccgggtcgatgcacatgggcggtggcggcggcgccggcaaggtcaacgtgcaggacctgtcgttcaccaagtacatcgacaagtccacgcccaacctgatgatggcctgctccagcggcaagcactatccgcaggcgaagctgaccatccgcaaggccggcggcgagaaccaggtcgagtacctgatcatcaccctgaaggaagtcctggtgtcctcggtgagcaccggcggcagcggtggcgaggatcgcctgaccgagaacgtgaccctgaacttcgcccaggtccaggtcgactaccagccgcagaaggcggatggcgcgaaggacggcggtccggtcaagtacggctggaacatccgccagaacgtgcaggcctga

SEQ ID NO: 323556 - DNA, 786 bp, Pseudomonas aeruginosa
atgatcgccgaagaactgttgcgcgccgggcgcctggacgatgccttgaaagccttgcaggaacaggtgcgcagccagccgtcgaacgctaccctgcggatcttcctgttccagctgctggccgtgatgggccagtgggcgcgggcgcagaaccagctcaaggtggtcggcgaactggatgcctcggcgctgccgatggtacagacctactccaccgccatcgactgcgaggcgctgcgccgcgaggtgttcgccgggcgcctgacgccggtgatcctcggccagccggcggaatggatcgcgccgctgttgcaggccctgagcctggacgccgaaggccatggcgaggccgcccaggccctgcgcgagcaggccttcgacgccgcgccggcggtgcccgggcggatcggcgaagcgccgttcgcctggctggcggatgccgacacgcgcctcggcccggtgctcgaggtaatcgtcaacggtcgctatgcctggttgccgatgagcaacctgcgcagcctcaaggtcgaggcgccgagcgacctgcgcgacctggtctggctgccggctgaactgaccctggccaacggtggcgcccccgtcgcgctgctgccggcgcgctacgcggaaaccgtcgagcacggcgacgacgccgcgcgcctggggcgcaagaccgaatggctggacagcggcctgccggtcggccagcggctgttcgtcaccgatgccggcgagaccgcgctgttcgacctgcgtgaactggacttcgagccgacggacgcctga

SEQ ID NO: 323557 - DNA, 1860 bp, Pseudomonas aeruginosa
atgaacccgcgcctgctcgagtactacaaccaggaattgcaacacatccgcgaaagcgccgcggagttcgccgaggaattcccgaagatcgccgggcgcctgtcgctgtccggcttcgagtgcgccgacccctacgtcgagcgcctgctggaaggcttcgcctatctcaccgcgcgggtccagctgaagctcgacgcggagtacccgaccttcacccacaacctgttggaaatcgcctacccgcactacctggcgccgaccccgtcgatgaccgtggtgcagttgcgcccggaccccaacgaaggcgccctgagcagcggcttcagcgtcgagcgcggagcctccctgcgcggccagctcggccccgatgaccagaccgcctgcgaataccgcaccgcccacccggtgaccctgtggccgctggaagtggcccaggccgactacttcggcaatcccgccgcggtgctcggccgcctcgccgccagcgagccgcgggccaaggccggcctgcgcatccgcctgcgcagcggcgccggcatcccgttcgacagcctgtcgctggacgccctgccgctctacctgcacggcgccgacgaacaaccctaccgcctctacgaacaattgctcggcaacgcctgcgcggtgttcgtccgcgccccggacaatgcctgggtcgaacgcctgccgacgagcagcctgcgtgcgcgcggcttcgacgacgaggacgcgctgctgccggtggtgccgcgggcgttccagggctaccgcctgctgcaggaatacttcgccctgccggcgcgcttcctgttcgtcgagttctccggcctgaaccgcgccctgcgtcgatgccacggcgaggagctggaactggtcgtgctgttcggcaagcacgaccagcgcctggagggcacggtggacgcggagcaactggtgccgttctgcaccccggcgatcaacctgttcccgcgccgctgcgaccgcatccacctgtccgaccgggtcaacgagcatcacgtgatcgtcgaccgcacccgtccgctggatttcgaggtgcattcgctgcaacaggtgagcggccacggcagcggtccggagcaacccttccaaccgttctacgcggtgcgcgacccggcgcgctacggccgcgagcaggcctacttcagcgtgcgccgcgaaccgcgcgtgctgtccagcaagcagcggcgcaagggcccgcgctcgacctacgtcggcagcgagaccttcgtcgccctggtcgacgccaaccaggcgccctatcgccacgacctgcgccagctcggcatcgccgcgctgtgcaccaaccgcgacctgccgctgttcatgccgatcggcgcgcacaagagcgacttcaccctggaggacagcgcgccggtcatgcaggtgcgctgcctcgccggaccgagccggccgcgcgccagccgtgcccacgatgccagcgcctggcggctgatcagccagctgtcgctgaactacctgtcgctggccgagcgcggccagggcgccgccgccctgcgcgagctgctgcggctctacggcgacagcggcgatccggcgctgcaattgcagatcgagggcctgcgcgaggtcagcagcaagccttgcacgcggcgcctgccgatgcccgggccgatcgtcttcggccgtggcctggagatcaccctggacttcgacgagaacgcgttccgcggcaccggggtgttccttctcggcgctgtgttcgagcgcttcctggcacgctacgtgtcgatcaacagctttaccgagacggtgctgcgcaccggcgaacggggcgaggtgatgagatggcaggcgaagccgggcagccgtccgaacctctga

SEQ ID NO: 323558 - DNA, 1047 bp, Pseudomonas aeruginosa
atggcaggcgaagccgggcagccgtccgaacctctgaacctgctcgccgggatggcggcggcgccctgggactatgacttcttccaggcgctgcggcgcatcgagtgcgagtcgccgcaactgccgcgcctcggtcattcggtgcggctggcggacgacccgctgcgtctcgggcagaagcccgactgcaccttcgcgccctcgaccctggcctcggtgagccaggccggcaccgctgcggtgccgcgcctggaccagttcttcttcggcctcaccggccccaacgggccgctgccgctgcacctcaccgaatacgcccgggaacgccagcgcaacgtcaacgacgcgaccttcaagcgcttcatggacgtcttccaccaccgcctgctgaccctgttctaccgggcctgggcggaggcgcggccggagatcagccacgaccggatcgacgacgactactggtcggcgcgcctcgccgcgctctccgggcgcggcatgccgagcctgcgggggcgcgagccgctggcggataccgcacgctactactacaccggccacctcgccgcgcagacccgctacccggacggcctgcgggtgatcctcgcggagtatttcgaggtcccggtggcggtcgaggaatacgtcggccaatggctggagctgcccgagcgcagccgcctcggcgtcgactcgacgagcctgggcatggacgtctgcctgggcacccacgtctgggaccgccagcacaagttccgcctgcgcctggggccgctggacctcgatcaataccagcgcttcctgcccgacggcgaccacttcgtcgagctggccgcctgggtcgccgaatacctgggcgaggagctggactgggacgtcaacctggtcctgcaacgccacgaagtacccccgctgggcctgcagggcggcgggcggctcggtttcaacacctggctgggcgatcccggccaggacgccagggatctactgctggcccgccagtacgccactgcgcggccgcacgagcacaaggagaaggaacatgagtga

SEQ ID NO: 323559 - DNA, 318 bp, Pseudomonas aeruginosa
atgggtatcgtcggcgcggtactggtcagtgtctgggcatgcggcctgatccggcagagcagccgggtattgctggatgcgcagatggacgcgccggtggctgcggaaatccgcgcggcgatcgccagcagcccgctgccggcggaactgctcgacctgcacctgtggcaggtcggccagggcaagtacgcctgcctgctgagtctgctgaccaccgaggaaggcagcgccgactatttcaagcgccgcctggccgagcatgaggaactggtgcacatcaccgtcgaggtgaacccgctgctcccgctcgccgcctga

SEQ ID NO: 323560 - DNA, 933 bp, Pseudomonas aeruginosa
atgcgcttgctgattctcgaacgtgaccacgctctctatgccgcgctgctgatggcggccgaccccagcctgaaggtggtggcgggggacgatcccctgcagctcatcgacgccgccagcgagtgctcgatctggctcggccagcccgacctggtggcgcagatgctgcgacagggcgtgcatccggtctgggtgcagtcgacctgggcgggcatcacgccgctgctggccgccgacctgccgaaggactacagcctgacacgcgcggtaggcatcttcggccaggtgatgagcgaatacctgctgacctacatgctcgcccacgagcgccagttcctcggtcgcctggccagccaggtcggttcgcaatgggatagccgcacgcctggcgggttgcgtggccggcaggtggtgatcgtgggcaccggggagatcggccaggcggtggcgcataccctgtccggcttcggcatggacctgaccggggtggcgaagaatccgcgttcgctggtgccgttcaaccgcatggggtcgctcgacgacctcggtcgcctggtggagacggccgactacctgatcaacctgctgcccgacacccccgatacccacgacatctacgaccgtgcgctgttcgcccggctcaagcccacggcgctgttcatcaatgccgggcgtggtgtcgcggtggtggacgccgacctggtggcggcactggagaacaaccaactggccggcgcggtgatcgacgtctgccgcgaagagccgctgccggccaaccacctgttctggcataccccgcgcctcttgctgaccgggcacaccgccgcgccgaccctgccgggggcgatggtcgaactgttccgcgacaacctcgcgcgcttctgggcgggtaccgccatgcgcggcgaggtggacttcgctcgcggctactga

SEQ ID NO: 323561 - DNA, 294 bp, Pseudomonas aeruginosa
atgaaacgaatctgttccgtctacaagagcccgcgcaagaacgagatgtacctctacgtcgacaagcgcgaggcgttgagccgcgtacccgaggccctgctggtgccgttcggcgcgccgcaacatgtcttcgacctgctgctcacccccgagcgccaactggcccgcgaggatgtcgctaaggtcctggagaacatcgagaagcagggcttccacttgcagatgccgccgggcgaaaaagagtacatcgagcatctcccggaagagttgctgcgcatgaacgacccgctctga

SEQ ID NO: 323562 - DNA, 1125 bp, Pseudomonas aeruginosa
gtgaccgcgcccgaaatccagtggatccgcgatgatgccagcctggcgcagcaatgccgggaatggcgcacacagccgtacctcgcgctcgataccgagttcatgcgcgtcgataccttctatcccgcggccggtctggtgcaggtgggcgatggccggcaggagtggctgatcgatccgctgctgatccaggactggagccccttcgccgagctgctcgaagacgagcgggtggtgaaggtgctgcatgcctgcagcgaagacctcgaggtgttcctgcgcctcaccggcagcctgccggtgccgctgttcgatacgcagttggccgccgcctatctcggcatggcccattcgatgggctactcgaagctggtgaaggaggtgctggacatcgacctgcccaaggacgagacccgttccgactggttgcaacggccgctcaccgagatgcagatgcgctacgccgccgacgacgtccagcacctcgcccaggtctacctggccctggatgcgcggctgagcgaggagaaacgcgcctggctgctggaggacggcgccgaactggtcgccaacctctgccgcgagagtgatccgcgcgaggcctaccgcgaggtcaagctgggttggcggctgcgtccgcagcaactggcggtgctccgcgaactctgcgcctggcgcgaggagcaggcacgcctgcgcaaccggccgcgcaaccacgtgctgcgcgaacgtaccctgtggccgctggcgcgcctgctgccgaagaacaagaccgacctggcggcgatcgaagacatgcatccgcgcaccgtgcgccaggacggcgacttcctcatcgaactgatcgcccaggcttcgcgcctgccgcagagcgaatggcccgaggcgctgcccgagccgctgccgccggaggtcaccccgctgctcaagagcctgcgcgccatcggccagcgcgaagcggagaccctgggcatggcgcctgagctgatgctgcgcaagaagatcctcgaggcactgctcaagagcggctatcccgacggtccctacgaactgcccgattccctccgcggctggcgccgcgaacgcatgggccaggccctgctggacgccctggagagcgcatga

SEQ ID NO: 323563 - DNA, 1062 bp, Pseudomonas aeruginosa
atgaagaagctcagcggaataatcgtcctcctgctggctggcgcggctctttacctggccctgaagaccagcccgatcgacccgctcgcctgggatgctccggccgctccgcagatgaccggggtcctcgaacccaacgacaccctgatgaaggccgagctgcttggccagggccagttgcacggccccgaggacaccgccgtggacagccagggccgcgtctatgccggtctcgccgacggccgcgtggtacgcctggacgccagcggcaaggtcgagaccttcgtcgacaccggcggccgcccgctgggcatggacttcgatgccgccggcaacctgatcctcgccgacgcctggaaaggcctgctgcgcatcgatccgcagggcaaggtggaaaccctcgccaccgaggccgacggtgtccccttcgccttcaccgacgacctcgacatcgccagcgacggccgcatctacttcagcgacgcttccagcaagttccaccagcccgactacatcctcgacctgctcgaggcccgaccgcacggccgcctgctgcgctacgacccgtccaccggcaagaccgaggtgctgctcaaggacctgtacttcgccaatggcgtggcactctcggcaaacgaggacttcgtactggtcaacgagacctaccgctatcgcatcacccgctactggctgaaaggcgagaaggctggccagcacgaggtgttcatcgacaacctgccgggcttgccggacaacctccagggcgaccgcaagggtaccttctgggtggccctgccgaccccgcgcaaggccgacgccgacttcctccaccggcatccctggctgaaggcgcagctggccaagctgccgcgcatgttcctgcccaagccgaccgcctacgggctggtcatcgccatcgacgaacagggcaggatcgtccgcagcctgcacgacaccagcggccaccacctgcgcatgatcacctcggcgaagccggtgggcgaccagctctacttcggcagcctggaaaacgaccggatcggccgcctggcgatcccctga

SEQ ID NO: 323564 - DNA, 780 bp, Pseudomonas aeruginosa
atgaccgatcagttgcaacacatcaggaagccgccgcgcaccggcaaggctgcccgcagcggtacccaggacgagatcgtctacgcccacatcttcgacgccatcctcgaacaacgcctggcccccggcaccaagctgagcgaggaggcgctcggcgagatattcggtgtcagccgcaccatcattcgccgcgccctctcgcgcctggcccacgagcaggtggtgctgttacggccgaaccgcggcgcggtggtcgccagcccgagcatcgacgaggcccggcagatccttttcgcccgccgcacagtcgagcgcgccatcaccgaactggccaccgacaacgccaccgccgagcgtctggccgagttgcgcgagatggtggtgcaggaacaatccagcttcgcccgtggcgaccggggcgccggcatccgcctgtccggcgagttccacctgaagcttgccgagatggcgcgcaacgctcctctggtgagtttccagcgcagcctggtgtcgcagacctcgctgatcatcgcccagtacgaaagcggcggtcgctcgcactgctcgttcgacgagcacaacgagatcctcgacgccatcgagaagggcgacaaggagcgcgcggtgaccctgatgatgcaccacatggagcacatcgacagcaagctcaacctggagagcgacaacgcttccggcgacttgcacgcggtgttctcgcacctcctcggcggcaagaagaagccacgccgggccaaggccgacagcgattcggcggcctga

SEQ ID NO: 323565 - DNA, 1350 bp, Pseudomonas aeruginosa
gtggaaagcaccaaacaagaagaacaagggatctacgctgcgacaccgcccgccaccggcctgctcgaacgcctgttcaagctccgccagcatggtacgacggtcaggaccgagctggcggccgggctgaccaccttcatcaccatggcctacatcatcttcgtcaatcccaacatcatggccgacgccggcatcgaccacggcgcggcgttcgtcgccacgtgcctggcggccgccctcggctgcttcctgatgggcctgtacgccaactggccggtgggcctggcgccgggaatgggactgaacgccttcttcacctacaccgtggtcggcaccatgggctacagctggcagatcgccctgggcgcggtgttcatctccggggtgatgttcatgctgctgaccttctcccgggtccgcgaatggctgctcaacagcatcccccgcagcctcaggttcgccatgggcgcgggagtcggcctgttcctcggcctgatcggcctgaagaccgccggcatcgtggtggccagcccggcgaccctgatcaagctcggccacctcacctcgcccggcccgctgctggcagcactgtgcttcctgatgatcgccgtgctcgagtaccgccgggtgttcggcggcatcctcatcagcatcctcagcgtcaccctggtcggctgggccctcggcctggtgcagtacggcggggtgttctcggcgccgccgagcctggcgccgaccttcctggcgatggacatcgccggcgcgttcaacgtcaccatgatcagcgtgatcctggccttcctcttcgtgcacatgttcgataccgccggcactctcatgggcgtcgcccagcgcgcgcacctggtgaaggaggacgggcgcatcgagaacctgtcgaaagcgatgaaggccgacagcgcctccagcgtgttcggcggcatgctcggtgtcccgccggtgaccagttacgtggagagcgccgcgggcgtggccgccggcggacgtaccgggctcaccgcggtggtggtcggcgtgctgttcgtcgccgcgatgttcttcgccccgctggccgggatgatccccgccttcgccaccgccggcgcgctgatctacgtggccatgctgatgatgggcggaatggcgcacatcgactgggacgagcacaccgagaccatcccggcgatcgtcacggtgatcatgatgccgctgaccttctcggtggccgacggtatcgccctgggcttcatcacctacgtcgcgatgaaggtcctcaccggcaagcaccgcgaagtctcggccagcctctatgccttgttcgtgatattcgtcgccaagttcatcttcctctga

SEQ ID NO: 323566 - DNA, 381 bp, Pseudomonas aeruginosa
gtgtccgccagcgggcgcccgcaacccatgggacgtttgaccacgcatgtactggattccgcacacggctgccccggccatggcatcaagatcgagctgtaccgggtagaaggccagcaactggaactgatcgccaccaccctgaccaaccacgacggccgctgcgaccagccggtgctgcaaggcgaggacttccgtcccggggtctatcaactggtgttcaacgccggcgactactatcgcgcccgcggcgtgcaattgccggagccggccttcctcgaccaggtggtgctgcgtttcggcatcgcctccgccgacgatcactaccacgtgccgctgctgatctcgccctacagctattcgacctatcgcggcagctag

SEQ ID NO: 323567 - DNA, 927 bp, Pseudomonas aeruginosa
gtgagcgctgactacccacgcgacctgatcggatacggcaacaaccctccccaccctcactggcccggcgatgcccgcatcgccctgtccttcgtgctcaattacgaagaaggtggcgagcgctgcgtcctgcatggcgacaaggagtccgaggcgttcctttccgagatggtggctgcccagcccttgcagggcgtgcgccacatgagcatggaatcgctctacgaatacggcagccgcgccggggtctggcgcctgctcaagctgttcaagcgacgcaacgtgccgctcaccgtgttcgccgtggccatggcggcgcagcgcaaccctgaggtgatcagggcgatggtcgccgacggccacgaaatctgcagccacggctaccgctggatcgactaccagtacatggacgaggcccaggagcgcgagcacatgctcgaagccatccgcatcctcaccgaactcaccggccagcgcccggtgggctggtacaccggacgcaccggcccgaacacccggcgcctggtgatggaggaaggcggcttcctctatgactccgacacctacgacgacgacctgccctactgggacccggccagcaccgcggagaaaccgcacctggtgattccctataccctggacaccaacgacatgcgcttcacccaggtgcagggcttcaacaatggcgagcagttcttccagtacctgaaggacgccttcgacgtgctctacgaagaaggcgcgacggcgccgaagatgctctccatcggcctgcattgccggttgatcggtcgcccggcgcggatggccgctttggagcgcttcatccagtacgcgcagagccacgacaaggtctggttcgcccgccgcgaagacatcgcccgccattggcaccgtgagcatcctttccaggagaccgaggcatga

SEQ ID NO: 323568 - DNA, 516 bp, Pseudomonas aeruginosa
atgagccgtttccagaccctgacccccgcctcgctgtcccgcgaggccttcgtcgaagccttcgccgacatctacgaacactccccctgggtcgccgagaaggcctatgacctgggtatcgacgacagcctcaacgatatcgagggcctgcaccagcgcatggccgacattctcctgtcggcaagccgcgaggcccagctggcgctgatcaacgcccacccggacctcgccggcaaggcggcgatccgtggcgaactgaccgcctccagcacctccgagcaggccggcgccgggattcacgaatgcagcgccgaggagttcgcccgcttcaccgaactcaacgacgcctacaaggccaggttcggcttccccttcatcaaggcggtgaagggcagcaaccgccatcagatcctggcggccttcgaggaacgcatccagcactccgccgacgaggagttcgctaccgcgctggccgagatcaacaagatcgccctgttccgcctgcagcagctctga

SEQ ID NO: 323569 - DNA, 999 bp, Pseudomonas aeruginosa
atgaacgccgaacactcgcccttccgccactacctcgacctcgccgacgcacgcctgggcagccaggtggtcgccgtcagcgacgaatggttcgccccggccagccgcatgctgcaggccggcgaaccggtgtggaaggaaggcgtattcgacgacagcggcaagtggatggacggctgggaaacccgccgcaagcgcttcgagggccatgaccaggcggtgatccgcctgggtgtgccgggcgtgctgaagggcgtcgacatcgacacccgcttcttcaccggcaaccatccgccggcggcttccctggatggctgcttctgcgccgaaggcgacccggacgacagcacgtcctggagcgaagtgctgccggcggtggggctgcagggcgatagccatcactaccacccgatagacgacgaacgcccctggacccacctgcgcctgaacatctacccggacggcggtatcgcccgcctgcgcctctatggcgtgccctaccgcgactggagcagccagccgccgggaacggcgctcgacctggccgcagcggtcaacggcggccgggcgctggcctgctccgaccagcatttcggacgcatgggcaacctgctcaaccccggacgtgccatcaacatgggcgacggctgggaaaccggccgccgccgcacgccgggccacgactgggtgatcgtcgccctcggccatcccggcagcatcgaggcggcggtcgtcgataccttgcacttcaagggcaactatccggaaagctgcagcatccaggccgccttcgtggaaggcgggaacgaggcccggatcgaggcgcagagcctcttctggcgcgagctgctgccagcgcagaagctggaaatgcaccaggaacaccggttcgagcggcacctcaacgccctcggcccgatcacccatgtacgcctgaacatctttcccgacggcggcgtcagccgcctgcgcctgttcggcaggccacaattaccgtga

SEQ ID NO: 323570 - DNA, 510 bp, Pseudomonas aeruginosa
atgcgcactctcaagatcgagccgttgaccaaggaagccttcgccccgttcggtgacgtgatcgaaaccgccggcagcgactatttcatgatcaacaacggctccacccgccgttatcacaagctggccacggtcgagaccgcgcagccggaagataacgcgatcatcagcatcttcagcgccgagaagctggaaatgccgttgcgcatccgcatgctggaacgccatccgctgggcagccaggccttcatcccgctgctcggcaacccctttctggtcgtggtcgcgccacttggcgatgtacctgtaccgggcctcgtccgcgccttcctgaccaacggaaggcagggcgtcaattaccaccgcggcgtctggcaccatccggtgctgacgatcgaaaagcgggatgacttcctggtggtcgatcgcagcggttccgggaacaactgcgacgagcatttcttcaccgaggacgaacagctcctcctcgacccccaatcaaaccaataa

SEQ ID NO: 323571 - DNA, 1278 bp, Pseudomonas aeruginosa
gtggaagcacatctcatcgaatggctgaacctgctggtgcgctggattcacatgatcgtcgggatcgcgtggatcggcgcttcgttctatttcgtctggctggagaacaacctcaaccgcagcaacccgcgtgaaggcctgtccggagacctctgggcaatccacggtggcggcatctaccacctggagaagtacaagctggctccgccgaaaatgccggagaacctgcactggttcaaatgggaggcctactccacctggatgtccggggtggtgttgctgaccatcgtgttctacctgaacccgaccctctacctgatcgcccccggcagcgacctggcgccggcggcggccatcgccatcggcatcggttcgctggtctgcggctggttcgtctacaccatcctctgcgattcggcgctgggcaagacccctgccctgctcggcctggtcctgttcgtcctgctggtcgccgccgcctacggcctgacccaggtgttcagcggccgcggcgcctacctgcacgtcggcgcgatcatcggcaccatcatggtcggcaacgtgttcagggtgatcatgccggcccagcgcgcgctggtgaaagccatcgaagaaaaccgcgagcccgatccggtgctgccggccaagggcctgctgcgctcccggcacaacaactacttcaccctgccggtgctgttcatcatgatcagcaaccacttcccgagcacctacggcagccagtacaactggctgatcctggccgccatcgcggtgctcgcggtactggtacgccactacttcaacacccgccacgaaagcaaccgcttcgcctgggcactgcccgccggcgcgctgggcatgatcgccctggccttcgtcaccacgccgaactaccagcaggcttccgcaccgctggccagcaccccggcggcggcaccggcacaaccggcgaccggcggcgacgcaccagccgcgcccgccgcgacccaggcctccaatgccggggccgcgagcggagccgacttcgacaaggtccatcacgtgatccaggagcgctgcaccgtctgccactcggcgaaaccgaccagccagctgttcagcaccgcgccaggcgggatcatgctcgacaccccgcagcagatccagcaactggcaccgaagatccaggcccaggccgtggcctcgcagatcatgccgctgggcaacatcacgcagatgacccaggaagaacgcaacctgatcggcagctggatcgccaagggcgcacagatcaactga

SEQ ID NO: 323572 - DNA, 405 bp, Pseudomonas aeruginosa
gtggtcgccgacgaagtgcgggcgctggccagccgcacccagcagagtacccaggaaatccagggcatgatcgatcgcctgcagcagggcaccaacgccgcggtcgacgccatgcgccgttccggcgaggccggcgagggcaccagcaaccaggccaaccaggccggcgattcgctggatgccatcgcccagctgatcgccaccatcaacgcgatgaacgcgcagatcgccagcgccgccgaggaacagaccgcggtggccgaggagatcaaccgcagcgtgcaccagatcgccggcgcggtggacagcgtcgccgacgaggcccagcagggcgcgcagaccgcccgcagcctggcgcaactgggccagggcctgggccgactggtcggtcagttccgcatctga

SEQ ID NO: 323573 - DNA, 1059 bp, Pseudomonas aeruginosa
atgctcgacacgaaactggaatcccggacttttctcctgttgctggcggtggtcacgctcgccttcggctggctcttgctgccgttctacggcgcggtgttctggggcaccatcctggcgatcatcttcgccccggtgcaacgccgcctgcaggtgcgcctgagggatcggaagaacctcgccgcgctgatcaccctgctgatctgcgtgctgatcgtgatcatcccggtgatcttcatcgccggttcgctggtgcaggaaggcgcgagcgtctaccagcgggtcaagtccggcgaactgaacttcgccgcctacctgcagcaggcggtggctgccttgccgccatcggtgcaccagtggctggagcgcttcgacctggccaatctctcgagcctgcaggagaagctctcctcggtggcgatgcaggccagccaggtggtggcgaccaaggcgttcagcatcggccagaacaccctcgacttcgtcatcagcttcggcatcatgctctacctgctgttcttcctcctccgcgacggtcgcgtgctcggccggcggatcaagcaggcggtgccgctgagccaggaacacaagcaccacctgttcgccaagttcaccacggtgatccgcgccacggtgaagggcaacatcgccgtggctgccacccagggcgctctcggcggtctgatcttctggctgctgggcatcgagggcgccttgctctggggcaccctgatggccttcctgtcgctgctgccggccatcggtgcggcgctgatctgggcgccggtggcggcctacttcctgctcaccggggcgatctggcagggtgtagtgctgatcctgttctgcgtggtggtgatcggcctggtggacaacatcctgcgcccgatcctggtcggcaaggacaccaagatgccggactacgtggtgctgatctccaccctcggtggcatggccctgttcggcctcaacggcttcgtcatcggcccgctgatcgctgcgctgttcatggccagctgggacctgttcactggccgcgaggaagaaccgcaggcctga

SEQ ID NO: 323574 - DNA, 810 bp, Pseudomonas aeruginosa
atgcccaccttccacgaaatcgacgtcctgcgacacaacagcgccagttgggacgcccaggccgcccgtgactgcgaatggtcgcgaccggtcagcgccgaagaggtcgccgccgcacgccgcggcgactgggcggtgaagctgaccccgggcgcgttacccgctcactggctgggcgacgtacgcggccgcgagatcctctgcctggcctcggccggcggccagcaggcgccgatccttgccgccgccggcgcacgggtcacgctgttcgacgcctcggcgggacagctggacaaggaccgccaggtcgccgcccgcgaccgcctcgaactggcctgcgtgcagggcgacatgcgcgacctctcgaccttcgccgatgcctccttcgacctggtcttcaatcccatctccaatctctacgtcgacgatgtcctgccggtctggcgcgaatgcgcgcgggtgctgcggccgggcggcaagctgctggcgagcttctacaacccggcgctgttcatcgaggaccgctcgccggaactggcagagcagggcctgatccggccgcgacatcgcctgccctactccgacctggaaagcctctccgccgaagccctcgcggcaaagcgcgagaaaggcgaagccctggtgttcggccatagcctgacccagcagatcgccggccagctcgccgccggcctgctgctgcaggatttctacgaagactggcaaccgcacccgcgcttcgtcatcgaccgcttcgtgccgaccttcctcgccacctgcgcgctcaagccgaggtccgccgccggttga

SEQ ID NO: 323575 - DNA, 1461 bp, Pseudomonas aeruginosa
atgacctttacgatccaacacttcatcgcgctcctgccactgctgatcaccagcgccaccctggtggtggtgatgctggcggtagcctggaaacgcaatcactcgttcaccgccaccctctcggtgatcggcctcaacctggccctgctgtcgctgctgccggtcctcggcgtcaccccgatcgaggtgacaccgctggtgctggtggacaactacgcctgcttctacatggccctggtgctggtctccgccctggcctgcgtgaccctcgcccacgcctacatggaaagctatccgggtaaccgcgaagagctgtacctgctcctgctgctggccaccgccggcggcctggtgctggtcagcgcgcagcacctggccagcctgttcatcggcctggagctgctctcggtcccggtctacgggatggtcgcctacgccttcttcaacaagcgctcgctggaagccggcatcaagtacaccgtgctctcggccgccggctccgccttcctgctgttcggcatggccctgctctacgccgagtccggtaccctgggcttcgccggccttggcgccaaggtcgccgagcacgtgctgagcggtccgctggtcagcgttggcgtaggcatgatgctggtcggcctgggcttcaagctgtcgctggtgcccttccacctgtggaccccggatgtctacgaaggcgccccggcgccggtctcggcgttcctcgccaccgccagcaaggtcgcggtgttcgccgtgctgctgcggctgttccagatcgcccctgcggccctggacaaccaactgctgaacatctccctgagcgtcatcgcggtcgcctcgatcctcttcggcaacctgctggcactgacccagagcaacatcaagcgcctgctcggctactcgtccatcgcccacctgggctacctgctggtcgccctgatcgccagcaagggcatggccgtggaagcggtcggcgtctacctggctacctacgtactgacctccctcggcgcgttcggcgtgatcaccctgatgtccaccccgtacagcggccgcgacgccgatgcgctgttcgagtaccgcggcctgttctggcgccggccggtactgaccgcggtgatgaccgtgatgatgctgtcgctggcaggcatcccgctgaccgccggcttcatcggcaagttctacgtgatcgcggtcggcgtcgagtcgcacctgtggtggctgatcggcgccctggtgctgggcagcgccatcggcctgtactactacctgcgggtcatggtcaccctgttcctggtcgagcccggcatccgccagcacgacgcaccgttcaactggggccagcgcgccggcggcatcatgctggtcgccatcgccctgctggcgttcttcctcggcgtctacccgcagccgctgctggaaatcctccagcattccggcctggccctcgccggctga

SEQ ID NO: 323576 - DNA, 1530 bp, Pseudomonas aeruginosa
atgattctgccctggctaatcctgatccccttcatcggcggtttcctctgctggatcgccgaacacagcagcaagaccctgccccgctggatcgcgctgctttcgatgaccctggtcctgatcctgagcctttggatctgggccaccggcgacttccagctggcgcccgcgcccggcggcgagccggaatggaccctgcaattcaaggtgctgtggatcgagcgtctcggcatcagcatccacctggcgatggatggcctgtcgctgctgatggtcgccctcaccggcctgctcggcgtgctctcggtcctctgctcctggaacgagatccagcgccgcatcggcttcttccatctgaacctgctgtggatcctgggcggtgtgatcggcgtgttcctcgccatcgacctgttcctgttcttcttcttctgggaaatgatgctggtgccgatgtacttcctcatcgcgctgtggggacacagttccgatgacggcaagaagacccgcatctacgccgccaccaagttcttcatcttcacccaggccagcggcctggtgatgctggtggcgatcctcggcctggtgttcgtcaacttcaatgccaccggcgtgatcaccttcgactacgccaccctgctgaagacccagctgagcccccacgtggaatggctgctgatgctcggcttcttcgtcgccttcgcggtgaagatgccggtggtgccggtgcattcctggctgccggacgcccacgcccaggcgcccaccgccggctccgtggacctcgccggcatcctcctgaagaccgccgcctacggcctgatccgcttcgccctgccgctgttccccaacgcctcggcggaattcgcgccgatcgccatgtggctcggcatcatcggcatcttctacggtgccctgctgtccttcgcgcagaccgacatcaagcgcctggtcgcctactccagcgtttcgcacatgggcttcgtgatgatcggcatctactccggcagccaggtagcgctgcagggcgtggtggtgcagatgatcgcccacggcctctccgccgcggcgctgttcatcctctgcggccagctctacgagcgcctgcatacccgcgacatgcgcaagatgggcggcctgtggtcgcgcatgccctacctgccggcgatcagcctgttcttcgcctcggcgtcgctgggcctgcccggtaccggcaacttcgtcggggagttcctgatcctgatcggcgccttcaaggtggtcccggtgatcatcgtgatcgccaccttcggcctggtcttcgcctcggtctactcgctgatcatgatccaccgcgcctacttcggccccagccagtccgacgagccgatcctcggcctcgatgcccgcgaactgagcatggtgctcggcctggcggtcctgctggtcctgctcggggtctacccgcagccagtgctggacatctccgcggccagcatgcacggcgtgcagcaatggctgggcgcagccctttccacccttgcaggacggtag

SEQ ID NO: 323577 - DNA, 1848 bp, Pseudomonas aeruginosa
atgaaccttctacctcttaccttcctgttccccctggtcggcttcctgctgctgtcgttctcccgcggcaggtggtcggaaaacctttcggcgctggtcggcgtcggctcggtcggcctctccgccctgagcgcggcctgggccatcttcagcttccacagcagtccgccggaaggcggcgcctacagcctggtgctgtggcagtggatggcggccggcgacttcagcaccaacttcaccctgtacctggacggcctctcggtaaccatgctcggcgtggttaccggcgtcggcttcctgatccacctgttcgcctcctggtacatgcgtggcgaaaccggctattcgcgcttcttcgcctacaccaacctgttcatcgccagcatgctgttcctggtgctgggcgacaacctgctgttcctttacttcggctgggaaggcgtgggcctgtgcagctacctgctgatcggcttctactacagcaatcgcaacaacggtaacgcggcgctcaaggcattcatcgtcacccgcgtcggcgacgtgttcatggctttcggcctgttcatcctgttccagcagttcggcaccctgaacatccaggagctgctggtgctggcgccgcagaagttcccggaaggcaacctctggctgaccctggcgaccctggccctgctcggcggcgcggtcggcaagtccgcccagctgccgctgcagacctggctggccgacgccatggccggcccgaccccggtctccgcgctgatccacgccgccaccatggtgaccgccggcgtctacctgatcgcccgttgccacggcctgttcaccctggccccggacatcctcgaactggtcggcatcgtcggcgcggtgaccttggtcctggccggcttcgccgccctggtacagaccgatatcaagcgcatcctcgcctactcgaccatgagccagatcggctacatgttcctcgccctcggcgtcggcgcctgggacgcggcgatcttccacctgatgacccacgccttcttcaaggccctgctgttccttgcctcgggcgcggtgatcgtcgcctgccaccacgagcagaacatcttcaagatgggcggcttgtggaagaagctgccgctggcctacgccagcttcgtggtcggcggtgcggcgctggccgccctgcccttcctcaccgcgggcttctactccaaggacgagatcctctgggaggccttcgccagcggccatcgcgaactgctgatcgccggcctggtgggtgcgttcctgacctcgatctacaccttccgcctgatcttcgtcgccttccacggcgagccgaagaccgaagcccacgccggccacgggatttcccactggttgccgctcagcgtgctgatcgtcctgtcgaccttcgtcggcgccctgatcaccccgccgctggctggcgtcctgccggaaagcgtcggccacgcaggtggcgaagccaagcacagcctggaactggcctcgggtgccatcgccatcgccggtatcctgctggccgccctgctcttcctcggccagcgccgcttcgtcagcgccctggcgaagagcgccccgggtcgcttcttcggtacctggtggtaccacgcctggggcttcgactggctgtacgacaagctgttcgtgaaaccctacctgctgctctgccaattgctggggcgcgaccccatcgaccgtaccctgggcgtcgttccgttcagcgtgcgcggcggacacaacctcctcagcctcaccgagaacggccgcctgcgctggtacgccgcttccctggtgggtggagccgccatcctgctcggcgcgctgctgctggcctaa

SEQ ID NO: 323578 - DNA, 309 bp, Pseudomonas aeruginosa
atgaacgcaataccactggaacacggcctggccctcgccagcgtcctgttcgccctcggactggtcggcttgatggtgcgacgcaacatcctgttcgtactgatgagcctggaagtgatgatgaacgccgccgccctcgccttcgtggtcgccggcagccgctggggccaacccgacggccaggtgatgttcatcctggtgctgagcctcgcggccgccgaagcgagcatcggcctggcgatcctgctgcaactgtatcgccgcttccacaccctcgatatcgacgctgccagcgagatgcgcggatga

SEQ ID NO: 323579 - DNA, 501 bp, Pseudomonas aeruginosa
gtggaattcgctttctatttcgctgccggcgtcgccgtactggccacgctgcgggtcatcaccaacagcaacccggtgcatgccctgctctacctgatcatttccctgctggccatctcgatgaccttcttcagcctcggcgcacccttcgccggtgccctggagatcatcgtctacgctggcgccatcatggttctgttcgtcttcgtggtgatgatgctcaacctcggcccggccgtggtcgagcaggagcgcaagtggctcacgcccggcatctgggtcgggccttcggccctggccctggtcctgctggtggaactgctggtggtcctcgcccgcaccccgagcggtgccggcatcggccataccacggtagacgccaaggcggtcggcatcagcctctacggcccgtacctgctggtggtcgaactggcctccatgctgttgctcgcggccctggtcgctgcctatcacctgggtcgtcaagacgccaaacaataa

SEQ ID NO: 323580 - DNA, 549 bp, Pseudomonas aeruginosa
gtgatcaaagaaatcatcaacgtcgtgcatggcaccttcacccagcttcgcagcctggtgatgatcttcggccatgccttccgcaagcgcgacaccctgcaataccccgaagagccggtctacctgccgccgcgctatcgtggccggatcgtcctgacccgcgaccccgacggcgaggaacgctgcgtagcctgcaacctgtgcgccgtggcctgtccggttggctgcatctccctgcagaaggccgagaccgaggacggtcgctggtatccggagttcttccgcatcaacttctcgcgctgcatcttctgcggcctgtgcgaggaagcctgcccgaccaccgcgatccagctcaccccggacttcgagatgggcgagttcaagcgccaggacctggtctacgagaagcacgacctgctgatctccgggccgggcaagaacccggactacaactactaccgcgttgcggggatggcgatcgccggcaagccgaaaggcgccgcgcagaacgaagccgaaccgatcaacgtgaaaagcctgctgccataa

SEQ ID NO: 323581 - DNA, 996 bp, Pseudomonas aeruginosa
atgagttggctgactcccgctctggtcaccatcatcctcaccgtggtcaaggccatcgtggtgctgctcgccgtggtcatctgcggcgccctgctaagctgggtcgagcgccgcctgctcggcctctggcaggaccgctacggccccaaccgggtcggtccgttcggtgcgttccagctcggcgcggacatggtcaagatgttcttcaaggaggactggaccccgccgttcgccgacaagatgatcttcaccctggccccggtgatcgcgatgggcgccctgctcgtcgccttcgccatcgtgccgatcacccccacctggggcgtggcggacctgaacatcggcatcctgttcttcttcgccatggccggcctgacggtgtacgccgtgctgttcgccggctggtcgagcaacaacaagttcgccctgctcggcagcctgcgcgcctcggcccagaccatctcctacgaggtgttcctggccctgtcgctgatgggcatcgtcgcccaggtcggctcgttcaacatgcgcgacatcgtccagtaccagatcgacaacgtctggttcatcattccgcagttcttcggcttctgcaccttcatcatcgccggcgtcgccgtgacccaccgtcacccgttcgaccagccggaagcggagcaggaactggcggacggctaccacatcgagtacgccgggatgaaatggggcatgttcttcgtcggcgagtacatcggcatcgtactggtctcggcgctgctggcgaccctgttcttcggcggctggcacggtccgttcctggacaccctgccctggctgtcgttcttctacttcgccgccaagaccggcttcttcatcatgctcttcatcctgatccgcgcctcgctgccgcgtccgcgctatgaccaggtgatggcgttcagctggaaggtgtgcctgccgctgaccctgatcaacctgctggtgaccggcgcgctcgtgctggccgcggcccagtaa

SEQ ID NO: 323582 - DNA, 762 bp, Pseudomonas aeruginosa
atgcacgacctgctcgccgccccgccccccgccgacctcgccagcctgctggccagcctgcgccaggtcgaggcgctgctcgacgccatgcccggcgtggtgttcttcgtcaaggacaagcgcgcccgctacgtcctggtcaaccgcaccctggcacgccgctgcggcgtgaaggacaaggccgaactgctcggccgcagcgccgacgaggtcttcccttccagcctcggtccgctctatgccgagcaggatcggcgcgtgctgcgcggcggcgcgacgctggagaaccagttggagctgcacctctatcccggtcgccagccgggctggtgcctgacccacaagcaggcgctgcgcgatgccgacggggcgatcatcggcatggccggcatctcccacgacctgccggcggcgcagtcggcgcacccggcctacgggcggctggcggcggtggatgcgcatatccgcgagcactacgaccagccgctcagcctcgccgatctcactgccatcgccgggctctcggtggcgcaactggaacgtcactgcaagcgcatcttccagctcaccccacggcagatgatccacaaggcgcggctcggcgccgcctcgcaactgctcgccggcgacgcgccgatcaccgagatcgccctgcgctgcggctacaccgaccacagcgccttcagccgccagttcaaggcgctcaccggactctcgccgagccagtaccgcgagacccatcgccagccccgaaaagcgtaa

SEQ ID NO: 323583 - DNA, 822 bp, Pseudomonas aeruginosa
atgaataccaagaagacccttgccctagccctcaccgctgccctgggctgttccctcgccggtctcgcccaggccgacaagctcgacgacatcatcgagtccggcaagctgcgctgcgccgtcaccctggactttccgccgatgggctcgcgcgatgcacagaacaacccggtgggcttcgacgtcgattactgcaacgacctggcgaaggccctggacgtcaaggcggagatcgtcgagacgccctttcccgaccgcatcccggcgctggtgtcgggtcgcgccgacgtgatcgtcgcatccacctcggacaccctggagcgggccaagaccatcggcatgagcatcccctacttcgccttcgtcaaggtggtactgacccgcgaggacaccggcatcgccagctacgaggacctcaagggccgcccggtcggcggcaccgccggcaccttcgaggcgctggccctggagaaggacagcaaggcctggggcgacgccaagggcagcttccgcgcctaccagtccgaggccgacaccgccctggcgatcagccaggggcatatcgacgccacggtcgtctcttccaccgtcgccgcctcgtggatcaagtcgggcaagtacaagggcctgaagatcgccggcgacgcgccctatgacatcgactacgtggccctcggcgccaagcgcaacgaatacggcctgctcaactacctgaacctgttcatcaaccagcaggtgcgcaccggccgctacgccgagctggcgcagaaatgggtcggcggcacggcgccggagctgaccaccagcgcggtctaccgctga

SEQ ID NO: 323584 - DNA, 1743 bp, Pseudomonas aeruginosa
atgaagcacgcacacctcatcgttccccgtaccctggtcgccggcagcgcgtccggcgaactgctgtacgcaccgaccggcctgagcttctggggcggcgtcgacccgcgcagcgcggaagtgatcgaccgtcaccacccgctcagcggccgccatctacacggcaggctgctggcgattcccggtgggcgcggctcctgtaccggcagcagcgtactgctggaactgatcctcggcggacgtgcgccggcggcgatcctcctgcgcgaaccggacgaaatcctcgccctcggcgcgatcgtcgccgaggaactgttcggccgctcgctacccatcgcctgtctcggcgagcgcttcgacgaactcgccgcctatccctgggcgcgcctggccgacggacgcctggaactccaccgcgatgccccgccgccgctggagacccgacccgccgaagcgctggcgaccgatgccggcccacgactggacgccttcgaccaggccctgctcgccggcgaacacggcgaagccgcacgcctggcgatgcgcatcgtcctgcgcatggcggcgttgcagggcgcgcaacggctgatcgacatccagcgcgcgcacatcgacgcttgcatctacaccggcccggccggcctgcgcttcgccgagaccctgcgcgacctcggtgcccgggtgcgggtaccgaccaccctcaacgccatctccgtggaccagcgccgttggcgcgaacagggcgtacccgccgccctcggcgagccggccgcggccctggcccaggcctatctcgacatgggcgcgcagcccagcttcacctgcgcgccctacctgctcgacgacagcgcgcgggccggcgaacagatcgtctgggccgagtccaacgcggtgctcttcgccaacagcgtgctcggcgcacgcaccaacaagtacgccgacttcatggatatctgctgcgccctcaccggtcgcgcgccgctggccggctgccacctcgacgagcagcgccaggcgcgggtactgatcgaagtggaagacctcggcagcgtcgacgatgccttctacccgaccctcggctacctctgcggcctgctctgcgacgggcagatcccggcgatcgacggcctgcggcagcggcagccggaccacgacgcgctcaaggccttcggcgcggcgctgggcaccagttcctcggtgccgatgttccacgtcatcggcgtcaccccggaagcccctgacctggccagcgccttcggcggccgcgcgccgcggcggaccctgcgggtcggacgcgagcgcctgcgcgacgcctggcgcgagctggacagcgccggcgagacgcggatcgacctggtggcgctgggcaacccgcacttctccgccagcgaattcgcccagctcgccgcgctctgccacggccgccgcagacacccggaggtagcgctggtgatcaccagcagccggcaggtcgtcgcccaggccgaagcggccgggcacctggcgacgctgcaggcgttcggcgcacggctggtcaccgacacctgctggtgcatgctcgacgaaccgctggtgccgccgggcgcgcgcaccctgatgaccaactccgccaagtatgcccactacgcccccggactggtcggccgccaggtgcgcttcgccggcctcgccggctgcgtcgaggccgccgtcggcgggcgggcccccgccgggctgcccgcctggttgagcgaggactgctga

SEQ ID NO: 323585 - DNA, 666 bp, Pseudomonas aeruginosa
atgttcgactacaccttccactggcgctcggcgttcaacgccctgccggagatgctcgccggcagcctggtgacgctccaggtcaccgcgctgtcgatgctcttcggcatcctcatcgccctgctcctggccttcgcccggctcggcggcaaccgcccgctgcgcgccgccgccggagcctggatctccatcgcgcggaataccccggcgctattccagatctacatcctctacttcggcctgggctccttcggcctgcacgtcagttcctggttcgccctgctcgccggggtcaccttcaacaacgccggctacctcgccgagaccttccgcggcggcctccaggcggtgcccgagacccagctgcgggcggcccgctcgctgggcatgagcgcgccgcaggcctatcgcctggtggtgatcccgcaactgctgcgggtggtgttctacccgctgaccaaccagttggtctgggccatgctgatgacctccctcggcgtggtggtgggcctgaccgacgacctcaccggcgtcacccaggcactcaacgtcaagaccttccgcaccttcgaatacttcgccctggccgccgttctctacttcgccatggccaagctgctggtgctggccgcccgcctgctgggctggcgcctgttccgttactga

SEQ ID NO: 323586 - DNA, 645 bp, Pseudomonas aeruginosa
gtgttcaccaccagcctcaccgccaacgacctgctgttcctcctgcaaggcgcctggaccaccctcgccatcaccgccatggcgatgctgatcggcaccctgctgggcgtcgtcttcggcctgctccgcgccctgctgccacgcgccagcctgccgctggcggcgctgctcgacgtattccgcagcgtgccgctgctgatccagttcgtcctgctcaattccttcaagagcatcctcggcctcgactggagcgccttcgccgtggcctgcctggtgctcggcgtgtacgccgccgcctactgcaccgaggtggtccgcggcggcgtcctctcggtaccgccgagcgtgcgccgggcggcgcgttcgctgggcctgagctatcgccaggacctgttccacatcgtcctgccgatggccgcccgggtggccttccccggttgggtcaacctgaccctgtcggtgatgaaggacacctcgctggtgctctggatcggcatcgtcgaactgctgcgcgcctcgcagaccatcgtcacgcgcatccaggaaccgctcttcgtgctctgcatcgcggggctcgtctattacctcatgagctgggtggtcgcgcgactcggcgcccggctggaacggagatggcagcaatga

SEQ ID NO: 323587 - DNA, 723 bp, Pseudomonas aeruginosa
atgatcgagatcagcggcgtgcacaaggcctacggccagttcgaggtggtcaagggtgtagacctgagggtggacaagggcgaggtgctgtcgatcatcggcggctccggttccggcaagtcgaccctgctgatgtgcatcaacggcctggagccgatccagcgcggcagcatccgcgtcgacggcatcgacgtgcatgcccgcggtaccgacctcaaccgcctgcggcggaagatcggcatcgtcttccagcagtggaacgccttcccccacctgaccgtgctggaaaacgtcatgctcgcgccgcgcaaggtgctcggcaagagccgcgccgaagccgaggcgatggcgctgaagcaactcacccacgtcggtctcggcgacaagctcaaggtcttcccccagcgcctttccggcggccagcaacagcgcatggcgatcgcccgggcgctggcgatgtcgccggactacatgctgttcgacgaagccacctcggcgctcgacccgcagttggtcggcgaggtgctggacaccatgcgcctgctcgccgaggaaggcatgaccatggtcctggtcacccacgagatccgcttcgcccgcgacgtgtccgaccgggtggcgttcttccgcaatggcctggtccacgagatcggcacccccgaccaggtgatcggcaacccgcagcggccggagacggtggaattcctccgctcggtgctctga

SEQ ID NO: 323588 - DNA, 1035 bp, Pseudomonas aeruginosa
atgcgttcgcagcggatcgtccacatcgtcagttgccatgccgaaggcgaggtcggcgacgtgatcgtcggcggcgtcgccgcgccgcccggcgccaccctctgggaacagtcgcgctggatcgccagagaccagaacctgcgcaacttcgtcctcaacgaaccgcgcggcggagtgttccgccacgccaatctgctggtgccggccaaggacccgcgcgcgcagatgggctggatcataatggagccggccgacaccccgccgatgtccggttccaattcgctgtgcgtggccaccgtactgctcgacagcggcatcctgccgatgcgcgaaccgctgacccggctgctgctggaagcgccgggcgggctgatcgaggcccgcgcggaatgccgcgacggcaaggccgagcgggtggaaatccgcaacgtgccgtcgttcgccgaccgcctcgacgcctggatcgaagtcgagggcctcggctcgctacaggtcgacaccgcctacggcggcgacagcttcgtcatcgccgacgcccggcgcctgggcttcgccctgcgcgccgacgaggccgccgagctggtcgccaccggcttgaagatcacccacgcggccaacgaacaactgggcttccgccacccgaccaacccggactgggaccatctgtccttctgccagttggccgcgccgccggagcgccgcgacggtgtcctcggcgcgagcaacgcggtggtcatccgccccggcaagatcgaccgctcgccctgcggcaccggctgctcggcgcggatggcggtgctccaggcgaaaggccagctgcgggtcggcgaacgcttcgtcgggcgctccatcatcggttcggaattccactgccacatcgagtcgctgaccgaactcggcggccgtccggcgatcctcccgtgcctgtccgggcgggcctggatcaccggcatccaccagtacctgctcgacccggacgatccctggccgcaaggctatcggctgtccgacacctggcccggcggccactgctga

SEQ ID NO: 323589 - DNA, 918 bp, Pseudomonas aeruginosa
atgagcaagcacgtcaactggagcggcgtattccccgcggtcaccacccaattcaacgccgatttctcggtgaacctggaggaaacccacacggtcatctccaacctggtgcgcgacggcgtgtccgggctggtggtatgcggcagcgtcggcgagaacacctcgttgaccatcgaggagaagatggccgtcaccgaggtcgccaaggatgcctccggcggccgcgtgccggtgatctgcgggatcgccgagttcaccagcgccggcgcggcgaaggtggccaaggcggtggagcgggtcggcgtcgacggcatcatggtgatgccggcgctggtctattcctccaagccgcacgagaccgccgagcatttccgcagcgtggccagcggcaccgacctgccggtgatggtctacaacaacccgccgatctaccggaacgacgtcaccccggacatcctggtttccctggccgactgcgagaacatcgtctgcttcaaggacagctccggcgacacccgccgcttcatcgacgtacgcaaccaggtgggcgagcgcttcatcctcttcgccggcctcgacgacgtggtcctggaaagcgtggcggtgggtgcccagggctggatctcgggaatgtccaacgtgttcccgaaggaaggcgagaccatcttccgcctggccagggccgggcgcttcgccgaggcgatgccgatctacgagtggctgatgccgatcctccatctcgacgcccgtcccgacctggtgcagtgcatcaagctctgcgagcaactcgccggtcgcggcagcgccctcacccgtccaccgcgcctggccctgcgcggcgccgatcgcgagcacgtcgagcggatcatggccaaggccctggccagccggccggcgctgccggacgtcggcttgtag

SEQ ID NO: 323590 - DNA, 1581 bp, Pseudomonas aeruginosa
atgcccagcatcctcggtcacaactacgtcggcggcgctcgcagcgccgccggcaacctcatcctgcgcagcctcgacgccgacagcggcgaagcgctgccctacgccttcgtccaggccaccgaggcggaggtcgacgccgccgcccgcgccgccgaacgcgcctatccacactaccggcaactgtccgccacgcgccgcgccggattcctcgaggcgatcgcctcgcgcctcgacgccctgggcgacgacttcgtcgccctggtccgtcgcgagaccgcgctgcccgccgcacgcatccagggcgaacgaacacgtaccgccaaccagttgcggctgttcgccgaagtcctgcggcgtggcgacttccacggcgcgcgcatcgaccgtggacaacccgggcgtaccccgccgcgccccgacctgcgccagtggcgaatcggtctcggcccggtggcggtgttcggtgccagcaacttcccgctggccttttccaccgccggcggcgacagcgccgccgccctggccgccggctgcccggtggtggtcaaggcacacggcggacacatggccacagccgaatgcgtggccgacgcgatcctccaggcggcggccgacagcggcatgccggccggggtattcaacatggtctacggcagcggcgtcggcgaggcgctggtgcgccatccggccatccgcgcggtcggcttcaccggttcgctcaagggcgggcgcgcactgtgcgacctggcagcggcgcggccgcagccgatcccggtgttcgccgagatgagcagcatcaatccgctggtggtgctccccgaagccctgcgccggcgcggccggcaggtggcagaggagctggccgcctcggtgacgctcggctgcggccagttctgcaccaagccgggcctggtgcttggcctgcgctcccccggcttcgacgccttcgtcgcggccctgggcgaggcactggccgccaggccggcacagagcatgctcaacgccggcaccttgcgcagctatgtcgaaggactgcaacgcctggagcgccaccccggcatccggcgcctggccggcgcgccacaggaagggcggcaggcccatccgcagttgttcaaggccgacgtgggcctgttgctggaaggcgacgaactgctccaggaagaggtgttcggcccggccaccgtggtcgtcgaggcggccgacgaggaacagcttgcccgcgcgctggacaacctgcacggccagttgtcggcgaccctgatcggcgaagcggacgacctcgcggcgttcgccgggctggtcccgctgctcgaacgcaaggccgggcgcctgctattcaacggctatccgaccggcgtcgaggtgtgcgacgccatggtccacggcggcccctacccggccacctccgacgctcgcggcacctcggtgggaaccctggccatcgagcgtttcctgcgcccgctgtgctaccaggactaccccgacagcctgctcccggacgccctgaagaacgccaacccgctgggcctgctgcgcctggtcgatggccggagcacgcgcgaggcgctggattga

SEQ ID NO: 323591 - DNA, 180 bp, Pseudomonas aeruginosa
atgctcggcgcctcggcggaggagcacctggcgcgcgccgagacgctgttcgaaggcatcgtcgaacagggcgcgcgcttgccctcgcagcgacgcttcgaagcgcgcgaacgcagcgccagggacggtgtgacgattcccgaggcgttgcaccgggagctgctggcgttgctggagtga

SEQ ID NO: 323592 - DNA, 288 bp, Pseudomonas aeruginosa
atggccagcaccgaggggacttccagcggcgccggcacccgggtggagctggcggtggaaaccgcgcaaggctgcgcgcgcttccacgtccgcgaccacggtccgggcatcgccgaaaccgacctgccgcacctcacccggcgtttctggcgccacggcaagagcggcggcagcgggctcggcctggccatcgtccaggctatcgtgcaacgctgccaatgccggctggacttcgacagccgcgcggacggcctgcgggtgacgctggaaatgccgctgcgcgagtga

SEQ ID NO: 323593 - DNA, 876 bp, Pseudomonas aeruginosa
atgaacatgccgtcgatcctttccctggccgtcgccggcctgctggtcgctcccgtccacgcggcaacggcgccctcggagccgttccagccgccggcggaaagcagcctcccggacaacgccttcggcgaaatggtacgccagggccaggcgttgttcgtggaaacccggaagaacgcgccgcatctggtcggcaaccagctcaactgcgtcaactgccatctcgaccagggccgccgggccaactccgcgccgcagtgggcggcctatccggtctatccggcgttccgcgccaagaacaacaaggtcaatacgttcgccgagcgcctgcagggctgcttccagttcagcatgaacggcaaggtgccggcggccgacagcccggagatcaaggccctgaccgtctacgcctattggctggcgagccaggcgccgaccggggtcagcctgcccggacgcggctatccggacgtggccccgccggaaggcggctacagcatcgagcgcggcgccaaggtctatgccgcgcagtgcgcgatctgccacggcgccgacggccagggccagatggctctggggcagacggtgttcccaccgctgtggggcgcgcagtcgttcaactggggcgcgggcatgcaccgcatcaacaccgcggcctccttcatcaagtacaacatgccgctgggcaagcccggtaccctcagcgaccgcgacgcctgggacgtcgccgccttcatgaacagccacgagcgcccgcaggacccgcgcctggtggacggttcggtggagaagacgcggcagaagttccatgccaacgacggcgtcaacctgtacggacagaaggtcaacggcgtgctgctgggacagggaatctga

SEQ ID NO: 323594 - DNA, 654 bp, Pseudomonas aeruginosa
atgccggttgcacaccgactgctgttttcattgaccgccttgctggcggcgacggcccaggccgccgtcgacggccagaaactctatacccagggcggcgccaacccggccgccgcggcctgcgtcacctgccacggcgccgatggcatgggcctggccgccgccggctttccacgcctggcgggccttcccgccgcctacctgagcaagcagctgcacgacctcaagcagggcggcagtcgcgagcacccggtgatgaagggcatagccgatgctctcggcgacgacgagatccaggcgctcgccaataccctcgcggcaatgccggcgcccaagccggtggagctgtcgcgcgtggccaccccgcgcagccccggcgagaccctggcggtgcgtggcgcctgggagcgcaacattcccgagtgcgtgacctgtcacggtccggccggcagcggcgtgggggaggccttcccgccgttgcaggggcagggcgagatgtacctgagcaaccagttgcgcgcctggcagcttggcactcgccgcaacgacccgaacgatctgatgggacatatcgccaaatccctcagcgaagaggagatccgcagcgtcagccagttcttcgccaccctcggtcaggcaggaggccagccatga

SEQ ID NO: 323595 - DNA, 1002 bp, Pseudomonas aeruginosa
atgacaacgcttgctgatattcccctgtccatgctcgacctggtgccggtgcgcaccggcggcagcgtggccgaagccctgcacaactccctggacctggcgcgccatgtggagcgcctgggcttcaaccgtttctggctggccgagcaccacaacatggatggcatcgccagctccgccaccgcgctgctgatcggccatatcgccggcggcacctcgcggatccgcgtcggctcgggtggggtgatgctgccgaaccatgcgccgctggtggtggcggaaaacttcggcaccctggagacgctctacccgggccgcatcgacctcggccttggccgcgcccccggcgccgaccaggcgaccatgcgcgccttgcgtcgcgaccgcctgggcaacggcgacgacttccccgagcaggtcgccgagctggaaatgctgctcggcccgcgccgttcccagcagagcctgctggcggtgccgggcgagggtacccaggtgccgatctggctactcggttcgagcctgttcagcgctcacctggcggcgcagaaaggcttgccctatgccttcgcttcgcatttcgcaccgcgttacctgcacgaggcgctgcgcatctaccgcagcaacttccagccctcggcggtactcgacaaaccttacgcgatgatcggcgtgccgctgatcgccgcacctaccgacgaagaggccgagttcctcgccactaccgccttccagcgcgtgctggcgctgatccgcggcgagagcctgaaacagaagccgccggtggaaagtatggcgccgttgtggctgccccacgagcaggatgcggtcggcagcttcttcggcctggcggtgatcggcggtccggagaaggttcgtgcgcgtctggagatcctcctggagcagaccggcgccgacgagcttatcttcaccagcgacttctacgagcacgcccatcggctgcgctcttgcgaaatcgtcgcggagctgaaaggggcgtga

SEQ ID NO: 323596 - DNA, 615 bp, Pseudomonas aeruginosa
atggccaagcgtggacgcccctgcggcttcgatcgtgaacaggcattgcgccgggcgctcgacgtgttctgggaggccggctacgaaggcgcgaccatggccgcgctgaaggaggccatgggtggcatctgcgcgccgagcatgtatgccgcctatggttccaaggaggcgctgttccgttcggcggtggaactctacctgagccaggagtgccagctttccaagggcgccttcgccctgccgacggcgcgcgagtcgatcgccgcgctgctggaaagcgccgccgtcagctacaccaccgaaggcaagccgcgcggttgcctggtcgacctcagcacgaccaatttctcgccggccaacaaaggcgtcgaagactacctgcgcgatcaccggcggcgcgccgcgcgcctgctgcgcgagcgtttcgcacgaggcgtggccgacggcgacgtgccggccggagccgatctcgacgcgctcaccagtttctacagcagcgtgcttcagggcctgtcgatccaggcccgcgacggcgccagccgccagcagttgctggccatcggccgctgcgcgatggcggcctgggattccctgctggcggtcgaggccgcctga

SEQ ID NO: 323597 - DNA, 195 bp, Pseudomonas aeruginosa
atgctctcagcccgctcccgcaaggccccgacctatggcgtcacctatgtgagcctcgaggattgcaccctgcacttcgagaccgagtacatcatcgagcgccgcgacggcagcctcgcgcacatgccgatgcgcacgccggtcagtgagcgcgaagccctgcaacgcctgatcgaaagctgcatcgacgactga

SEQ ID NO: 323598 - DNA, 273 bp, Pseudomonas aeruginosa
atgaaagccgaagacatccttcccgaccgacaggaccgcatccgcctgggcggcgtggagatacgcaagggcagcgtcggcgcgttcatcgccaacgcccggctgctgcttgaggaggaactgcccacggcgcaacggcggcaggctgaagaagacctgcgcgccctgctgccggcgatccgggcactggggctgctggaactcttcgaactgcgcgacgcgcgactgcggacgctggtggcggattgggaaaacgccgctggccgctcctga

SEQ ID NO: 323599 - DNA, 765 bp, Pseudomonas aeruginosa
atgcttccggaacccctgcccgtcccgctcttcgccctgcgcatcgaccgcgcagccagccgcacggcctcccaccgccatgcctgcggccagctctactgcctggagcgcggccttctggtggtcgaggacgagcatggccgccaggccctgcctccgcgccagatcgcctggatcccaccgggtcacccacactcggcgcactcccacggcagcctggcgggctggagcgcctacctcgccgccgaacactgccgcgacctgccccggcaccccggcgtgctcgcctgctcggctttcgtggcgctgatcgtcgaacgcgccacccgctggccgaccggctccgcctggagcaccgaacgcgagaacctgctgcgcgtgctgctggacgaactgcgccacgccgtgccccagcggacccgcctgccctatccgggggattcgcgcctgcgcaggatcgccgaggcattgctggccaaccccggcgatccgcggccggcggccgaatgggcacgctgggcgggcctcagcagccgtagcctgagccggctgttcggcgccgagaccggtatgagcttcgcgcaatggcggcaactggcgcgactgcacgcggccgtcgaacggctggcagcgggccaggcggtcggcgaggtcgcctggtcgctcggctacgaaagcccgagcagcttcgccagtgccttccgcacagtattcggcgagacgccgtccggctattccagtcgcgccaacgaagcgctagcctga

SEQ ID NO: 323600 - DNA, 816 bp, Pseudomonas aeruginosa
atgagccacgccaatacgccccgcgactgggttcgacgcgccccgcaatacggtgcggtggaacgcatcgaggcttacttcgccggccacggctacgatccgcatcgccacgacacctatgccatcggccagaccctggccggggtgcagagcttccgctatcgccgcagccagcgccacagcctgccgggcggctgcctggtgctgcatcccgacgagctgcacgacggcgaggccggcagccaggaagggttccgctaccggatgctctacgtcgagccggcgctgatccagcaggccctcggcggccggccgctgccgttcgtgcgcgggggcttgtccgacgacccgcgcctgatcgccgccagccggaccctgctacaggccatggataccccgctggagccgctggaagaacaggacgccctgttcgaactggcccacgccctcgacgccgtggccggcaaccgggcgcgcggcaggcgccacttcgacttcgtcgccgccgagcgcgcccggcagtacatccacgcgcacctggagcgcccgctgggcctcgacgaactggcgcaggtcgcccagcgcgaacgctggagcctgtcgcgcgatttccgcgcgctgttcggcaccagcccctaccgctacctgatccagcgccggctggacatcgcccgccggctgatgctcggcggccagacgctggccgaagccgcgcttgccgccggtttcacagaccagagccacatgacccgccatttcggccagagctacggcctgccaccggcacgctggctgcgtatgctcggccgcgcctag

SEQ ID NO: 323601 - DNA, 375 bp, Pseudomonas aeruginosa
atgtccaccagcacaacccaagcgatcaacttcgccgccaagctcgccctgttcgacgaccgctggcaacccagggtgatcgcccagatgaacgactaccagttcaagctggtgaagatcgaaggcgacttcgtctggcacagccacgccgacaccgacgagaccttcatcgtcctcgccggtcgcctgcgcatcgatttccgcgacggcgcggtgcacctgggccccggcgagatgtatgtggtgccgcgcggcgtggagcacaagccgttcgccgagggcgaggtgcgcatgctcctggtggagccctgcggcgtgcgcaataccggcgaccagggcggcgagcggacggccgtcaacgatctgtggatctga

SEQ ID NO: 323602 - DNA, 1152 bp, Pseudomonas aeruginosa
atgaacttcaaagcaagcatatctcagagcgaatttcttagccagtaccaagaaaatcaaccattacatatgaaaggtgctgtcctgccaataaatttttcatggaacgatgtaaatcgactaattgaacgaagcgatccctcatcacccgacttcaagttatccctagacagaatcctccccaaagaaaaatatgtcgaaaaatatttagacattggaaccattcgccaacgaatcataaagccagctttatatgattacctaagtcgtggtgccacgctaatcatcaacaagataaagagcgatccaaaaataacggaaatcacacaacaaataggattattcactgaaagacagattgtcagcagtgcctatttagcatttggcaagaaaagctcctttcgttgccattgggacacaagagacgtttttgcaatccaactaatagggagaaaacgctgggtagtatacgaaccatcctttgaactccctctttacactcagcaaagcaaagatcttgagcatatttacccgtgccctatcaacccttacatggatatcaccttggagccaggggatgtattctatctaccaaagggctggtggcataacccactaccaattggacaaccgagtttccatttggcacttggcactttcccggcattaggaattgactatctgcaatggactttatcccacatggaaaacttccttggagccagaaaatctttgagcaaatgggcctcagaccaggaaaacctagcaaatattgcaaaccacatacatagactaatcaacaatcatgaacactatttgaacttcatgaaaaatcacttgataggaaccagaatagactccccactggccgtagaggcattttgccgagcagacactgaaaccattccccttcattcacaactatgcctatgcacaaacaacaaattcggcatagagcaaaactatttaatatgcaatggaacaaagctaaacatagaccctcacagcatgccaataattaaccacatcgcagcatcccccggcacaagccttgaagatctcattcataatttcccccagcatgaatcaactgacattaagaaactcatcaccgccctctgcaaagaggacatacttagcatcaccttataa

SEQ ID NO: 323603 - DNA, 300 bp, Pseudomonas aeruginosa
atgaaagaactcaatgacattgaagtcacctgcgtttcgggtggaactctttccggcatgatcgtaggcgccgtcgacggcgccgcgacgggcatggcaatcggcgggaaatggggcggtgccggcggcttcggcttcggcgctctttcccagttggtcggcctgatcgtgccaaccgcaatgggcgctattgccgggggcacggtcggtctcttcaccaatgcagagacggctgtcggttacttgggccaataccgggaaaacttcggtcccggtgatgtaggccgcaccaccatctaa

SEQ ID NO: 323604 - DNA, 1794 bp, Pseudomonas aeruginosa
atgcacgacctcatccagcacgccgacgccttcgtcggcgatcccgaccaggaatccggcggcctgtcgcgccgcagcttcctcggcaagagtgccacgctcggcgcggtcggcctggtggccggctggaccccggccttcgtcatccagcccgccgaagccgccgccagcagttgtccggcgccggcaggctttccggccggcctcgaactttatcggcgggcgttccgcaactggtcgggggaaatcgccgccgacgacctctggagctgcgccccgcgcaccaacgaagaggttctcgcggtggtcaactgggcctggcagaacggcttcaaggtgcgcccgcgcggcatgggtcacaactggtccccgctgctgctgaaaggcggcgagaactgcgagagccgcatcgtgctggtggaaaccagccgttacctgacccgcgtacggatcgacgcccagggcgagttcggcctgttcagcgcgcagaccggcgtcaccatggaagccctgctgaaacaactggagcgggtcaagctcggcttcgtcgccacgccggcgccgggcgacctgaccctcggcggggtgctcgccatcgacggccacggcaccggcatcccggcgcagggcgaaagccgcctgccggggcagagctacggctccctgagcaacagcatcgtggcgctgaccgcggtggtctgggacggcgccgccggaaaatacgtgctgaagaccttccgccgcgacgatccagcctgcgcgccgttcctcgtccacctcggacgcgccttcatcgtcgaggcgaccctccaggccggggtcaacaagcgcatgcgctgccagagctacgtgaacatcccggcgagcgagatgttcgccgcggccggcagcggcggaaggaccttcgacagcttcctgcagaaaagcggacgcgccgaggccatctggttccccttcaccgacaagccctggctgaaggtctggacgccgaccccgcgctgcccgttcggcgcccgcgcggtcaacggcccgttcaactaccccttctccgacaacattcccaaggcgctgtccgacctgctggcggcgatcaacaccggccacccggaactcaccccgctgctcggcaagctgcagtacgacctggtagtgggcggcatggcgctgaccctgggctacgacctgtggggctggagcaaggacctgctgctgtacatcaagcccagcacccttcgcgtaaccgccaacggctacgcggtgctgacccggcgtcgcgacgtgcagcgggtgatcaacgagttctacctgcagtaccagacgatggtcgccgcctaccgcgccaacggccactaccccatgaacggcccggtggagattcgcgtcagcgggctcgaccagcccggcgagtcgatcgttcccggcgcccaggtgcccagcctgtcggcgatccgtccgcgccccgaccaaccggagtgggacacggcgatctggctggacatcctcagcctgcccggtaccccgcaggccaatgccttctaccacgagttcgaggcctggctgttcgaccacttcagcggcgactacgcctcgctgcgggtggagtggagcaagggctggggctacagccccgccgccgcctgggacgagccgacggtggtcgaccagttggtggcgcagtcgctacgccagggcctggtcgcagacaacgattgggacagcgcggtgcgccagttgaacgaagccgatccgcatcggctgttcagctcgccgctgctcgaccggctgatgccatga

SEQ ID NO: 323605 - DNA, 300 bp, Pseudomonas aeruginosa
atgcaactcgccacacttcaggaactgagcttcgatgaaatcgaccaggtatcgggcgccggactcttcagcttcgtcggcgatgccatcgtcgatgtggtcaaggtgtccaacgacctgctcaacacgtcggtcatctcttcggtcggcaaggtgttcaacgccgtcggcctgacccccatccatcaactggccgacaccctcggctacggcgtgttcaagggcgtcgccgcggtcggcggcctgctcggcggcgacaccagccgcatcgattaccactacgacaccgagtggacctga

SEQ ID NO: 323606 - DNA, 1182 bp, Pseudomonas aeruginosa
gtgtccgtcccgacccatcagcaagacctgatcgccctgctcgaagagcgtggcttcgtccaccagtgcaccgaccgcgacggcctcgccgcgcacctggccgccggtccggcaaccgcctacctgggcttcgacgccaccgccgacagcctgcacgtcggccacctgcagggcctgatgctgatgcgctggctacagaaggccgggcaccgcccgttgctgctgatcggtggcgcgaccacccggatcggcgatccgagcttccgcgattcgagccggccgatcctcaccgaggcgcagatccaggccaatatcgacggcatcgcccgggttttctcgcgctacgtcgaactgcacgacgacagcctggtgaacaacgccgaatggctggacggcgtcggctacctggagttcctcgaccgggtcggccggcacttctcgatcaaccgcctgctgaccttcgacgccatcaggcagcgcctggaccgcgagcattcgctgtcgttcctcgagttcggctacaccctgctgcaggcctacgatttcgtcgaactgtcgcgccggcgcggctgcaccctgcaactcggcggcgcccagctgttcggcctgaccatgccgctgctggccaccagtgacgggcgcaagatgggcaagtcggcgcagggtgcggtatggctcaacgccgagcgcctggcgccgttcgacttctggcagttctggcgcaactgcgatgatcgcgacgtcggtcgcttcctcgccctgttcagcgaactgccgatggatgaggtgcgccgcctgggcgccttgcagggcgccgagctgaacgaagcgaaggtggtcctggccaatgccgccaccgccctggcgcacggcgagcacgccgcgcgatccgccgccgatgccgcgcgcggggtgttcgccgacggtacgcgggacagcggcctgccggtgatgaagctatcccgcgcgcgcctggcgcagggactgtcgctgaccgacctgctgctggaacacgcgatccagccctcccgcagcgcggtccgccgcctcgccgccggcggcggcctgcgcctggacggcacgccggtcagcgatccggacgcgccgctggcgggcgaggtcgacgggctgcgcctgagcctgggcaagaagcagcatttgcacctgcgactcgaggattga

SEQ ID NO: 323607 - DNA, 1257 bp, Pseudomonas aeruginosa
atgatcacggcatgcccccgcccgtgcgcctggcgcagctatgcgcttggcctcggcctcctgcccctcgccgcgcaagcggaattcctcgcggacagcagcgcccacctcgacctccgcaacttctaccagttgcgcgactaccgccagcacgatgcgccccaatcgcaggccggcaactggtcgcagggcttcgtcctgcgcctgcaatccggtttcaccgacggcccgctcggcttcggcctggatgctaccgggctgctcggcgtcaagctcgactcgggacgcgggcgtagcaacgatggcacgctgccgttcggagcgaattcgaaggagccggtggacgactacagtcacctcggcctgaccgccaagctgcgctattcgcagacccagctacaggtcggcatcctcatgccgcaactgccggtggcgttccgcgacgacgtgcgcctgttgccgcagaccttcgacggcgcgctgctgacctccagcgagatcgagggtctcaccctcaccgcggggcaattgtggaagtcgcgcactcgcgagtcggccggcagcgacgacatgtacatcatgggccgcgacaaggcccacgccagcgacgagttcaatctcgccggcgcgacctacgccttcacccctcggctcagcgccagctattactacggccagctcaaggacatctaccggcagcactatctcggcctgctgcacaccctgccgctgggagaagggctgtcgctgcgcagcgacctgcgctacttcgacagcggcgaagacggcgcggcgatctccgggccggtggacaatcgcaacctcaacgccatgctcaccctgcgcgccggcgcccacgccttcggcatcggtgtccagaagatgatcggcaacgacgcctttccggtgctcaacggctacaccacgccctacgtggccaacctcatggcctaccagaccttcacccgaccgcaggagaaatcctggcaactgcgctacgactacgacttcgccggcctcggcctgcccggcctgaacctcatgacccgctatgtacagggccgcgacatcgaccgcggcgccggccgtgccgacgacagcgaatgggagcgcaacaccgacctgtcctacgtgatccagagcggaccgctgaagagcgtcgccttgaaatggcgcaacatcacctaccgcagccgctacggtgcggacctggacgagaaccgcttcatcgtcaattacacgctaaagctctggtga

SEQ ID NO: 323608 - DNA, 1209 bp, Pseudomonas aeruginosa
gtgcctgcgagtgcatcgaggattcaggtcggaagcggcgaacgacgcctgttgctgctgttgtcggcgctggtggcgttcggcccgctgtcgatcgacatgtacctgccgagcctgccggcgatcgccgccgatctcggcgccagcgatgcccaggtgcagcggagcatcagcggcttcctggtcggcttctgcgtcggcatgctgttctacggccccttgtccgaccgtttcggccggcgcccggtgctgctggccggtatcgccttgtacctgttcagcagcctggcctgcgcgctggccgacagcgcggggcaactggtcctgctgagggtgctccaggccctcggcggcggcgccgcgtcggtgctggcgcgggccatggtgcgcgacctctatccgttgggcgaggccgcccggatgctggcattgatgcacatggtgaccatgctggcaccgctggccgcgccgctgctcggcggctacctgatgctctgggccggctggcgcgcgttgttcgtggtcctggcgctgttcgccgggctctgcctgctggcggtctggcgggtcgccgaaagccacccgccggagcgccgcggcggcagcctggcccaggcctttctcgcctatgggcggctgctcggcgaccgtcgcgcgctgggctacgtgctgtgcatggggctggcgttcgccgggatgttcgcctacatcagcgccgcgcccttcgtgttcatcgagcatttcggcgtgcgcgcggagcgcttcggctggttcttcggcctgaacatcctcggcgtgatgctcgccacctggtgcagcgcgcgcctggtgcgccgccacggtccgcggccgctgctgcgggccggcagcctgctggcctgcgtgtccgggctgttcctcctcggctatgcggcgctcggcgagcggggcgggttgtgggcgctggtgcccggcctgctgtgcttcgtcagcgtcaccggcctgctcggcgccaactgcatcgccagcctgctggcgttgtatcccggacaggccggggcggcttcggcggtggcggtgtccgggcagttcggcctcggctgcctggccagcctggcggtcggctggctggcgctgcccggcgtgctgccgatggcgctggtgatggccgtctgcggcgtcggcagcctgctcgcgctgggcttggccctgcacggcggaaaccgttga

SEQ ID NO: 323609 - DNA, 423 bp, Pseudomonas aeruginosa
atgtcaacgccaagaccctccctgaccctgaccctgttgcaggctcgcgaagccgcgatgagtttcttccgcccctccctcaaccagcacggcctcaccgagcagcagtggcgggtgatccgcatcctgcgccagcagggcgagatggagagctaccagttggccaaccaggcctgcatcctgcgcccgagcatgaccggcgtgctggcgcgcctggagcgcgacggcatcgtccggcgctggaaggcgcccaaggaccagcggcgggtctacgtgaacctgacggaaaagggccagcagtgcttcgtctccatgagcggcgacatggagaagaactaccagcgcatccaggagcggttcggcgaggaaaagctcgcgcagttgctggaactgctcaacgagctgaagaagataaagccctga

SEQ ID NO: 323610 - DNA, 243 bp, Pseudomonas aeruginosa
atggaattcagctggagcgagatcctgctggagctgctggcgatcgccgtgctgttcttcggcgtgcattggagcctgcgccacgccaagaccctggaccaggcgagcatgctgccgttcgccgacgacgaggaggtggcccgccgggtcgagcgggaaaccggcaggagccgcaccggctgcggctgtcccggtcgctgccagggcgactgccggcactgggacaagaattggccggcatga

SEQ ID NO: 323611 - DNA, 765 bp, Pseudomonas aeruginosa
atgatgtactacttcgtgcccaagcaggccgagcgtccggtctactcctaccggctgtccatcgtccacttctgggcgctgatcaccctgtacatctgggccggcccgcaccacctgcactacaccgcgctgccggactgggcgcagtcgctgggcatggtgatgtcgctgatcctcctggcgccgagctggggcggcatgatcaacggcatgatgaccctctccggggcctggcataagctgcgcgacgacccgatactgcgcttcctggtggtgtccctggcgttctacggcatgtccaccttcgaaggcccgatgatggcgatcaagaccgtcaacgccctctcccactacaccgactggaccatcggccacgtccacgccggcgccctcggctgggtcgcgatgatcaccatcggctcgctctaccacctgattcccaaggtctacggggtcgagaagatgcacagcgtcggcctgatcaatgcgcacttctggctggccaccatcggcaccgtgctgtacatcgcctcgctgtgggtcaacggcattacccagggcctgatgtggcgcgcggtcaacgaggacggcacgctgacctactccttcgtcgagtcgctggtggccagccatccgggcttcatcgtgcgcctggtcggtggcgggttcttcctcaccggcatgctgctgatgagctacaacacctggcgcacggtacgccaggcgcgcccggaaggaatcctcgcggcggcccgcatggcctga

SEQ ID NO: 323612 - DNA, 537 bp, Pseudomonas aeruginosa
atgcatatcccgcccgagctgatcatccaccagacccgccactggacgctgaaccagcggatcgactcggccctgcccggctactgcatgctcggctcgcggcaaccggcgacggccttccaccaattgccggaacaagccctcgccgaattcgggccgctgctggccagggtcgagcgcgaaatggacgcgctgctgcggccgcgacgcatctatgtcggccgctacggccacatgcccggcctgccggtgcatttccacctgattccactgtacgactgggtcgaggaattgttctgggaggacacgcgctaccggacgctccagcagttcggcgtgccgaccgccgacccccttaccgatggcgccgagctgaccctgttcgtctggcgcgaattctgcgaacgcgccgatccaccggccgtgcgcggcatggatcggcaacaggcgatcgccggattgcgccgggcattcggctacggcgtccaaccccgaacatcgtctgggccggactccgagtccgcgcaggacgcatga

SEQ ID NO: 323613 - DNA, 1641 bp, Pseudomonas aeruginosa
atgaccgctgtcgacctgctgctggtcgcgaccctgctggcggccctgctcgcctggtggatacccgccctgcccggccaccgtggcctgctggcgctcgcctcgacgctggcgctcggcgccggcctgtacgctgcatgggacgaccgctggcaagccggcgtcggcgccttcgccggtttctccctgctgctcggcgcctgcctgcgccggaagcccgagcgcggcctgccgttccgaaccggttcgctgtacggcctgctggtgctgctggcaatcgccgcgctgtacctgttcccggtcgcgccgctgccggcgccgagcggcccctatgcggtcggcgtgcgcgatttcgaactggatgaccccagccggcccggcctgctcggcaccccggccgggcagccgcggcgcctgctggtacgcgcctggtacccggcacgcccgatcgccggcgccgcgccgcgtcactatttcgatccaggcgaggcgcgcagcaccgcgcggggcttcggtgaaatactcggctttccgccgttgctcgcctacctcaagcacctgcgcaccaattcctatccggacgccccgctgcgcgacgattccgctcgcctgccggtggtgttctacagccatggctacagcgccttcgccggcggcaactggaccctgatggaagaactggccagccacggctacgcggtctacgccatccagcacagcggcgacgcgtcgccgacccgcctgcccgatggcacgctgctgcccatggaccccgggctggtcgaacacctgcgccgggccgcccacgacggcttgccgcaggccatgcgccagggctatgtcagcgacgatctcgaccagcgcctcgacggccagttgcacaccgccctcgacctgcccgccccggccaaccgcgccgtcaacctcagcgcgccggtatggctggccgaccgcctgttcgtccatgaccgcctgcaggccggcgaggtcccggacagggtcgccgacctggtggccgccagcgacttcgcgcacaccggcgagatgggcatgtccttcggcggctcgaccaccggcgcggtctgcatggtcgaccgacgctgcgcggcagcggtcaacctcgacggcggcgacttcgacttcgcgcccttcgatagcgatttcccggcgccgctgctgatgctgcacgccgaccttggcaacttctatcggctgttcggcatcgaaccgccggcccgcccgagaagcttcaacgacttttcctacgaacgcttcgagcacgccggccagcgccaggacattcatcgcctggtactgcgcgattcggcccatgccgggcttaccgacaatccgctgttcatccgccggccgctgcgcgacgggctgctcggctcggcaccgacggaagtcctcatccaggctcccaacgccctggtgctgggtttcttcgatcactacctgcgcggccgcgccaacgactttccgcaagcgcagatggcgcgcttccccgcctggctgacgcgctacgacaactcggcggtgcgcgactggtggctggccaagtcggaagcccagcgcctggcgctgcgacaacgcatcgacgaaatgaaacggcgcaagaccgggctggatcttccctga

SEQ ID NO: 323614 - DNA, 1212 bp, Pseudomonas aeruginosa
atgaccaccccgccgccctccgccaacaccctggacctgcgtccgctgatgttcgagaccttcgtctgcaccctcgcggtgatgtccttcgtcgccctggtcggcccgctcgcccgcaagctcggcctggcgccctggcaggccggcgccgcggtgaccgtcggcggcatcgcctggatgctcgcggcgcggccctggggcatcgccagcgaccggcatgggcgacggcggatactgctcggcgggctggccggcttcgccctctcctacggctcgctctgcctgttcatcgtgctcgccctgcactggacgttgccgaccctgttcgccttcgccggtatcgttctcctgcgcggcctcgccggcggtttctacgccgcggtgccggcctgcacggcggcactggtggccgatcacgtcgaggcgcaacgacgcgccgcggcgctggccggactcggcgcggccagcgcgataggcatggtgatcgggccggggctggccggactgctggcgactcacgggctggtcctgccgttgctggtcaccggcgcgctgcccctggtcgccctgctggcgctctggcgctggctgccgcgcgaggagcgtcgccagccgaaccgcggcgccgccctggcgatcggcgaccgccgcctgcggcggccgctggcggtgggcttcgtggcgatgttcagcgtcaccgtggcgcagatcaccgtgggcttcttcgccctcgaccggctgcgcctggattccgccgacgccgcgcgggtggccggcatcgccctgaccgcagtgggcgtcgcgctgatcctggcccagctcctggtgcgccgcctggactggccaccgccgcgactgatccgggtcggcgggctggtcgccgccatcggcttcgccgccgtgtgcttcgccgactcgccgccgctgctctggctggccttcttcgtcgccgcggcgggcatgggttgggtattcccggcagtctcggcgctcaacgccaatgccgtgcgcgccgaggaacagggtgccgccgccggcaccctggtggccgtacatggcttcggcctgatcagcgggccgctgctcggcacgctgctccaccaattggacagccgcgccccctacgcgctggtcggtctgctgctggcgctggcggcgttctggccgagccaaccgacgcgccccgtggaaacgaggagcgaagcaccatga

SEQ ID NO: 323615 - DNA, 189 bp, Pseudomonas aeruginosa
atgaggcgcggtctctggatgatcttccgctggcccctgctactggccctgctcggcctcttcgggctgctctcggcgctgctcggcgacggcctctacgacctgctctcctggctcgccctgggcactccgctggtgctggtcggctgggtctggctgcgcctgccgcgaacccgaaggaacccctga

SEQ ID NO: 323616 - DNA, 1152 bp, Pseudomonas aeruginosa
atgaccgcgaaaaccctgcgcacctggtacctggtgcacaaatggaccagcctgatctccacgatcttcctgctgatgctttgcctcaccgggttgccgctgatcttccacgaggagatcgagcactacttcgagccgcatccgcagctcgagccgctcaccgccgagtcgccgcgcatcgactacgacgacgtgatcgcccgcgccctggccgcccggccgggcgaagtggtgcgcttcctggtattcgaaaaggacgacccgctgggcctggtgatcagcgcgccgagcctggtaccgccgccggagaacggccacatgcagccgttcgacgcgcgcaccggggaattcttcgacgcgctgccgccgccgggcggcttcatgtacctgatgctgaagctgcacaccgacctgttcctcggcctgcccggctacctgttcctcggcctgatgggcctgctgctggtggcctcgctggtgtccggggtggtggtatacacgccgttcatgcgcaagctggacttcgccacggtacgcgccgaacgcagccgtcgcctgaagtggctggacctgcacaacctgctgggcatcgtcaccctgtcctgggtactggtggtcggcgtgaccggagtgatcaacaccctggccctgccgatcctgatgctctggcaaggcgggcagttggcggaaatgaccgcgccctacaaggacgcgccgccgttacagcgcctcggctcgctcgacgcggccctggccacggcacgccgggcggcgccggacatggaggtcagcttcgtcggcttccccggcacccagttcagcagccagcatcactatgcggtgttcatgcgcggcaacacgccgctcaccgagcgcctgctgaagccggcactgatcgacgcgcagagcggcgaactcaccgacatgcgcgagatgccgctgtacgtgaagacgctcctgctgtcgcagccgctgcacttcggcgactacggcggcatgccgctgaagatcgtctgggcgctgctcgacctcgtcagcatcgtcatcctcgccagcggtctctacctctggctcggccgacgcaagacgccattggagaagcgcctggcggaactgccggacggcagcctggcgacggagggcaaggcatga

SEQ ID NO: 323617 - DNA, 1725 bp, Pseudomonas aeruginosa
gtggagcttttatctggcgctgaaatggtcgtccgctcgttgcgcgacgaaggcgttaagtacatctacgggtacccgggtggtgccctcctgcatatctacgacgcgctcttcaaggagcacgacgtgacccacatcctggtgcgccacgaacaggcggctacccatatggccgacggctacgcccgcgccaccggcaagcccggtgtcgtgctggtgacttccggcccgggcgcgaccaacgccatcaccggtatcgccaccgcatacatggactccatcccgatggtgatcctgtcgggccaggtgccgagcaatatggtcggtaccgatgcgttccaggaaaccgacatggtcgggatctcccggccgatcgtgaagcacagcttcatcatcaagcatccctcggaaattcccgaggtgatcaagaaggccttctacctggcgcagtccggtcgtccggggccggtggtcgtggatattccgaaggacatgggcgacccgacgcagaagttcgaatattcctatccgaagaaggtcaagttgcgttcgtacagcccggccgttcgcggtcactcgggacagatccgcaaggccgccgagatgctcctggccgccaagcgcccggtggtctattccggcggcggcgtgatcatgggcaatgccgcggcgccgctgaccgagctggcgcagatgctcaacctgccggtgaccaacaccctgatgggcctcggcgggtatcccggcgcggaccgccagttcctcggcatgctcgggatgcatggcagcttcaccgccaacctggcgatgcatcacagcgacgtgatcctcgcggtcggcgcgcgtttcgacgaccgggtcatcaacggtgcggcgaagttctgcccgaacgccaagatcatccacatcgacatcgatccggcgtcgatttccaagaccatcaaggccgacatcccgatcgtcggcccggtggacagcgttctcaccgaaatggtcgcgatcgtcagggaaatcggcgagaccccgaaccaggatgcccaggctgcctggtggaagcagatcgacgagtggcgtggtaaccgtgggttgttcccgtacgacaagggcgacggcagcatcatcaagccgcagaccgtcatcgagacgctctacgaggttacccatggcgatgccttcatcacctccgatgtcggccagcaccagatgttcgcctcgcagtactacaagttcaacaagcccaatcgctggatcaactccggcggtctcggcaccatgggcttcggcttcccggcggcgatgggcatcaagctcaacttcccggacgacgatgtcgcctgcgtgaccggcgagggcagtatccagatgaatatccaggaactgtctacctgcctgcagtacgacctgccggtgaagatcgtcaacctgaacaatggtgccctgggcatggtccgccagtggcaggacatgcagtacaacagccgttattcgcattcctacatggaatccctgccggacttcgtcaagcttgccgaagcctacgggcatgtcggcatgcgcatcaccgacctgaaggatctgaagccgaagatggaggaggcgttcgccatgaagaatcgcctggtcttcctcgacatccaggtggacgccagcgaacacgtctatccgatgcagatccgtgacggcgcgatgcgcgacatgtggctgagcaagacggagcgtacctga

SEQ ID NO: 323618 - DNA, 492 bp, Pseudomonas aeruginosa
atgcgacacatcatttccctgctgctggaaaacgagccaggcgcattgtcccgtgtggtcggcctgttctcccaacgcaactacaacatcgaaagcctgaccgtggcgccgaccgaggacccgaccctgtcgcgtctgacgctgaccaccgtggggcacgatgaggtgatcgagcagatcaccaagaacctcaacaagctgatcgaagtggtcaagctggtggatctgtcggaaagcgcccatatcgagcgcgagctgatgctggtgaaggtcaaggccacgggcgcccagcgcgccgaggtcaagcgcaccaccgatatcttccgtgggcagatcgtcgacgtcaccagtagcgtctataccgtgcaactggcgggtaccagcgacaaactggacagcttcatccaggccatcggcaccgcgtcgatcctggaagtggtccgcagtggcgtcaccggcatcgcccgtggcgacaagactctgagcatctga

SEQ ID NO: 323619 - DNA, 1017 bp, Pseudomonas aeruginosa
atgcgcgttttctacgataaagactgtgacctctcgatcatccagggcaagaaagttgccatcatcggctacggctcccagggccacgcccatgcctgcaacctgaaggactccggcgtcgacgtcaccgtgggcctgcgtagcggctccgccaccgtggccaaggccgaagcgcacggtctgaaggttgccgacgtgaagaccgccgtcgctgcagccgacgtggtcatgatcctcaccccggacgagttccagggccgcctgtacaaggaagagatcgagccgaacctgaagaagggcgccaccctggccttcgctcacggcttctccatccactacaaccaggtcgtcccgcgcgccgacctcgacgtgatcatgatcgcgccgaaggccccgggtcacaccgtgcgttccgagttcgtcaagggcggtggcatccctgacctgatcgccatctaccaggacgcttccggcaacgccaagaacgtcgccctgtcctacgcctgcggcgtcggcggcggtcgtaccggtatcatcgaaaccaccttcaaggacgagaccgaaaccgacctgttcggtgagcaggccgttctctgcggtggttgcgtcgagctggtcaaggccggtttcgaaaccctggtcgaagccggttacgcgccggaaatggcctacttcgagtgcctgcacgagctgaagctgatcgtcgacctgatgtacgaaggcggcatcgccaacatgaactactccatctccaacaatgccgaatacggtgagtacgtaaccggtccggaggtgatcaacgccgagtcccgtgctgccatgcgcaacgccctgaagcgcatccaggacggcgagtacgcgaagatgttcattaccgaaggggcggccaactacccgtcgatgactgcctaccgccgcaacaacgccgctcacccgatcgagcagatcggcgagaagctgcgcgcgatgatgccgtggatcgcagccaacaagatcgtcgacaagagcaagaactaa

SEQ ID NO: 323620 - DNA, 816 bp, Pseudomonas aeruginosa
atgagtgaacgtcccgaggagccgaacaaggcctccgacgaagaaagcctgctgcccatcgacgaacatatagaagaagggcacgacgccgaagggcggaaggttcgtcaccgcggtatctacctgctacccaacctgttcaccacggcggccctgttttccggcttctacgccatcatcaatggcatgagcggccaattcgccaacgccgccatcgctatcttcgtggccatggtcctcgatggactggacggccgcgtggctcgcctgaccaacacccagagcgccttcggcgccgagtacgactcgctgtccgacatggtcgccttcggtgtggcgccggcgctggtcgccttcgaatgggcgcttggcagcctcggcaaggtcggctggatggtcgccttcatctacgttgcgggcgccgccctgcgtctggctcgtttcaacacccaggtcggcaaggccgacaagcgctatttcatcggcctggccagtccggccgccgcggcgctggtggcgggcacggtatgggcgttcagcgatttcgagatccagggcgccaaggttgccttcctcgtcgccctgctggtcgccgccgctggtgtgctgatggtcagcaacatcaagtaccacagcttcaaggatctcgacctgcgcggccgggtgccgttcgtggcgatccttatcgtggtgctggccttcgccgtggtctttaccgacccgccgcgcatcctcctgttgctgttccttgcctacgcggcctccggtcctgtgcaatacctgctgcaactgcgtcgccggaagcagccgagctga

SEQ ID NO: 323621 - DNA, 1014 bp, Pseudomonas aeruginosa
atgctgatcaagattccctcccgttccgactgttccgagtcggaagtcacgtccgaaaccctctacctgtcccgtcggcgtctgctcggtgcttccttcgccggattggcgctggccagcggcctgccgcgcctgggctttgccgacgaacagcgctatgccggcgtcgagtcggtaccggcgccgggctggttcgccgaaaagctaccgcagacccgctggcaggcggtgaatgtccagagggaggcgatcacgccattcaaggacgccacccactacaacaatttctacgagttcgggccgaacaagggcgacccggcggaaaacgcctcggccctgaagaccgagccctggtcggtggtgatcgacggcgaggtcggcaagccgggtacctatgccctcgaggatttcgtcaaaccctaccaactggaagagcgcatctatcggctgcgctgcgtggaagcctggtcgatggtgatcccttggctgggctttcccctggcggacctgctcaagcgggtcgaacccaatgggcaggcgaagttcgtccgtttcgaaaccctgcagcgtccggaacagatggtcggccaacgctccggtttctcggtgatcgactggccttatatggaaggcttgcgcatggacgaggcgatgcatcccctggcaattctggcggtgggcatgtacgggcggctgttgcccaaccagaatggcgcgccgttgcgcctggtggtgccgtggaagtatggcttcaagagcatcaagtctatcgtgcgtatcagtctggtccgcgagcagccgaagaccacctgggaaagcattgccgccaacgagtacgggttctatgccaacgtcaatccgcaggtcgaccacccgcggtggtcccaggcccgcgagcggcgcctgcccagtgggttgttcagtcccaatgtgcgggatacgcagatgttcaatggctacgggagtgaggtcgcttccctttatagcggcatggatctgaggaagtactactga

SEQ ID NO: 323622 - DNA, 609 bp, Pseudomonas aeruginosa
atgcgctactggtatctgcgccttgcggtattcctgggggcgctggcagtaccggcctggtggttgtaccaagcctggatctttgccctcggacccgacccgggcaagaccctggtcgatcgactggggctgggcgccttggtattgctgctactcaccctggcgatgacgccactgcagaagctgagcggctggccgggctggatcgccgtgcgccgccagttggggttgtggtgcttcacctatgtgctgctgcacctgagcgcttactgcgtgttcatcctggggttggactgggggcagttgggcatcgagttgagcaagcgtccctacatcatcgtgggaatgcttggattcgtctgcctgttcctgttggcgatcacttccaaccgcttcgccatgcgcaagctcggtagtcgctggaagaagctgcatcgcctggtctacctgatccttgggctcggcttgctgcacatgctctgggtggtgcgggcagacctggaggagtggaccctgtacgctgtggttggtgcgtcgctcatgctgctgcggctaccctcgatcgctcgccgcctgcccaggcttcgaactcgtcacggtgtttcgtaa

SEQ ID NO: 323623 - DNA, 1032 bp, Pseudomonas aeruginosa
ttgtccaccctgcttggccaacggatggccgcgaaggtagcgatacccgacatgatcacctattacatcctttccggcgaccgcctggagcgacgccagcacgacgatgcccagcgggggttgccgccgggcaccctgtgggtcgacctgcatcacccgacccccgaagaggagcgcctgctcgaatcccacctgcaggtgaacatcccgacccgcgaggagatggccgagatcgaggattcgtcgcgcttctacgaggacggcaacgtcctctacatgaccacttcggtggtcggcgggatcaccgagcaccggccgagcacagaggaagtgaccttcgtcctcagcgagaaatggctgattaccgtgcgctacgccgacctgcgttcgttccgcgagttcgagaaccgctgcatccgccagctcgacgccaaccgcagcagcacccagttgttcgccctgatgatggacagcctggtggaccgcatcgccgacgtgttggaggccgtacaggggcaactgagcagcatgtcgcgggagatcttcgccgagtccaccgcccagacccgcaagccgaagaccgacctgcagcagatcatcaagcacctcgggcgcagcagctcgctgctgtccaagctcaacgacagcctgctcagcatcaatcggatgaacagctatttccgccagggttgcaacggctggctttccgagccggccaaggtgctggcgaagaccgtggagcgcgatgtgcgctcgctggacgagtacctggcgaagatgtccaccgagatcaacttcctcctcgacgcgacccttggcctgatcaacatcgagcagaacagcatcatcaaggtgttctccatcgccgccgtactgttcctgccgccgaccctggtgggcaccgtctacggcatgaacttcaaggacatgcccgagctggactggtccatcggctatccgatggcgctggggatgatggtggtatcggcgatccttccgtacctctggttcaagttcaagaactggctctga

SEQ ID NO: 323624 - DNA, 276 bp, Pseudomonas aeruginosa
atgagcgaacaggacgacaaccaggaagacggcttcgccgaggaaaaactgatccaggccatcgagaaccagatcgaaagcgagaatccgccggcggcgcgcgccgtgttcaacaagctgaccctggtcggctacgagcgcgacgaggcgctgggcatgatggcctacgtgctggcccacgagatcaacgccatgctcgccgccgaccgcgctttcgacagcgccggctacgagcatgcgctgcgtgccctgccgacgttgccggacgacgaatga

SEQ ID NO: 323625 - DNA, 768 bp, Pseudomonas aeruginosa
atgcgatcctggttccacttcctgcccatctgcctgctgctggccctttccggcccggcagcggccgtcccgacagaacccctggtgctcggcgccgaagacgactggtatccctataccgcctacaaggacggccgcatccagggcatgagcgcggacatcgtgcgggccgccttcagggctgcggacacgccggtccagctcaatccctacccctactcccgctgcatgaagctggccctgaaaggcttgatcgccggctgcttcaacacctcgccgaacccgcacatcctcgccgactaccgtctgccccggcatccgttgttccgcgcggagatccagctctgggcgcgacgcgacgaagcgcggccggtgaatgcggagcaggcgctgagcggacggaaagtcgcggtgaccctcggttatgaatacggcgacggcttcgatcgccgccacgacctggtgcgcatcccggtgcgcaaggactactacggtttcctcatgctccagcgcggccgcgtcgactacgccctggcctaccgcaatacggctcgccagttgttcagcgaacatcccgaactggaaggccagttccagccggtggccacggtccaccgcccggagctgtacctgtcgttctcgcgccgccacccgcaggccgagcatctgctcgaacgcttcgacctcggcatgcagcgcatcctcgccagcggcgagtaccagaagatcctcgacggctggagccaggccgccgacgctacgccctag

SEQ ID NO: 323626 - DNA, 2853 bp, Pseudomonas aeruginosa
atgaaccgacaccccgcactcagcctcgatctcgacgatggcatcgaccgcaaggtcctcggccagttgcgccaacgcttcctggcggtcaatgccggtcgcctgcaacgcgcccggcaggcgttgtccagccgccaggagcgggtcctgcgcctgctaccgctgctgttccacatcaaccatccgctgctgccgggctacctgtcggccagcacgccagcgggcctgagcggtttcgaggcggacgacgaagtactcgccgaagcccagcgcctggcccgctcgtttgtctacaagccacgcaggcaggaacccgcacagcagccgatccacggcctgttcctgatgggcagcctggggagcctggcccaggaggaacagagcgatctcgacctctgggtctgccatgccccagaactggagcccggcgcgcgccaggagctgcgccgcaagtgcgcgttgatcgaggactgggcgcgcagccagggcagcgaggtgcactgtttcctgatcgacgtcgcccgtttcggccaggacgaacgcaaagactggaaagagtccggcggcgacggcaatacccagcacttcctgctgctcgacgagttctaccgcagcgcgatctggctcggcggacgcacccctctgtggtggctggtgccgccggcccatgaacggcgctacgacgaatactgtcggaccctgctcggcaaacgcttcatccgcgccgaagaggtgctcgacctcggccacctggcgcacatccccgctcgggagttcatcggcgccggcctctggcagttgtccaaggccatcgattcgccctacaagtcgctgctcaagctgctgctcaccgaggcctacgccagcgagcacccgcgggtccgctgcgtcgccctgcgcttcaaggagcaggtattcgccggccagctcgatctcgacgaactggacccctacgtcctggtctatcgccatctcgaacgctacctgcgggaacagcaggcgccggaacgcctggaactcgtgcggcgctgcctgtacctcaaggtcgggcgcaagctcggcggtcgccagcgccaggcgcagaagggctggcagcacctgtcgatggagcggctcgtcgcggaatggcaatgggagcctcgccgcttggccctgctcgacagccgcagccagtggaagatgcgccaggtgatggaagagcgtcgcacggtggtcaacgaactgacctacagctaccgcctgctgttccagatcgcccgccagcaaggcgctgacagcggcatcgacagccgtgacctgggcctgctcggccgccgcctgtatgccgccttcgagcgcaaggcaggcaaggtggagaacatcaacccggggatcgccccggatctcggcgaagacgtcctgaccctggtccagctgcccgccgacgacgaccgcgagcaggcgcagtgggcgatcttccccggtgccctgggcgctcaccagtggcctgactacgcgccgctgaaacgcagcctcaggctggtcgagctgctcgcctggtgccatcgcaacggcgtcatcgacagcgccacccggctgtccctgcatcccggccagagcgacctcggcgatgccgaactggacaatctcctgggcagcctgcggcagttcctgccggtccccctggcgaccgtggacgacgccgacctgctgcaaccgcgtcggctcaagagcgtcctgctgctggtaaacgtcggtgtcgacccactgcgccaccacagccagatgaacctgcacatggctaccgggcgtaccgacgtgcttggttatgccggggtgcgcgacaacctggtgctgaccctcgaccagctcagcctcaacagctggaacgaactgacggtgcgccattacgcaggcccccaggcgctgcccgagtgccttgccgagttcctcgacgccgtccgcgaaaagcccggaagcccgccgcagccgcctgaactgatggtgcgctgcttctgtcgcaaccgggccgccgccatcgccgtgcgggtcgaagagctgttccgcgagacctacgggcaactgcttggcggccagccaagccgctacctgctgcagatccgccagcagtaccacctgctggaaatgtcgccggaagcggtcagccacgagagcctgcccgacctgccgagcctgctccagcacctgggccgcgagcgcgatggctacagcgccctgaagctggatcgtcacgccctggagggcgaggacctcgggctgatcctgtccatggggcggccggactgcatccaggtgttctaccggcgcgacttcgacagcgccgagatcagcctgctcgacgaacgcaacgccctctggcgccagcgccaggcattgcgtgacgaacgcagcctgctcgcaccgctgcagcgcttcctgcaatcgctgctgtaccggcgcaacgccctgtcgctggcggaacaggtgccggccgcgctggatatccgctactacgagttgctctccaacgacggcagagtgcatgtcgagcctcgcgaggcgccggaggccctggccgggcccgcgctgtacgagctacaggcgctactcgagcgcggcgaacgcaagcgcgtgcaggtcaccctgtactgcgaccaccaggagttttccgaactggagtacggcgccggcctgttcaaggcggtcgcccggcatatcctggcgcatcgcgcagaaagcgaaccctacccctgctacctgaccgacctcgacctgtcgcggctgttcgccgacgaacagccgcaaacgctgcactatctgcgttataaaagcgtcctggaaacggcgctgaaccaggcgctgctggaacaatga

SEQ ID NO: 323627 - DNA, 897 bp, Pseudomonas aeruginosa
ttgttcgactacaagttgctcgccgcgctggccgcggtggtggagcagggcggtttcgagcgcgccgcacaggcgctggggctgtcgcaatcggcggtatcgcagcggatcaagctgctcgaggcgcgggtcggccagccggtcctggtgcgcgagacgccgccgcatcccaccgatctcgggcgccgcctgctcaaccatgtgcagcaggtgcggctgctggagggcgacctgcagcgctgggtgccgaacctggatgaaggcggtgccccggaacgcctgcgcatcgctctcaacgccgatagcctggcgacctggtgggccgccgcggtgggcgatttctgcgccgagcggcgggtgctgctggaccttgtggtggaggaccaggaggtcgggctcaagcgcatgcgcgcgggcgaagtggccggctgcgtctgcggtagcgcgcggccggtggccggcgcgcgttcgctgctgctcggagccatgcgttatcgcggcctggccagcccggatttcattgcccggcactttccccgcggggtcgaggcggccgccctggccggcgtgccggcgatcgtgttcggcccggacgacctgctgcaacaccgctttctcaaggacctcggcgtcgagggcggtttcatccaccacctctgcccgtcctcggaaggtttcgtccgcctcaccgccggcggtctcggctggggcctggtgccggagcgccaggtgcaaggcgagctggcgcgcggcgaactggtcgagctgctgcccggccaggtcatcgacgtaccgttgtactggcactactggcgcaacggcggcgaactgctcgcgtcgctcaccgagcacctgctcgcccgcgccggcgacggcttggtgcgggtgtcaggctga

SEQ ID NO: 323628 - DNA, 1059 bp, Pseudomonas aeruginosa
atggccagtcactggatgatctacggcgccaacggctacaccggccggctggtcgctgaacaggcgcagcgcgagggcctgacgccgctcctcggcggacgcaacccggccgccctgcacgcgctcggcagccagctcgggctggagtgccgggtcttcgacctgggggatccacaggcctgccgcgaagccctggaccaggtgaaggtggtggcccattgcgccggtccgttctctgccaccagcacgccgatgatcgccgcctgccgcgccgccggcacccactacgtggatatcactggagagatcgcggtgttcgagcacgcccacgccggcgacgccgaggcccgcgaggccggcatcgtggtctgcccgggcgtcggcttcgatgtgatccccaccgattgcctggctgcctgcctgaaggaggcgctgccggacgcgcaacggctggcgctgggcttcgacaccggcagcgggctttcgacgggaaccgcgaagaccagcgtcgaaggcctcaagttcggcggcaagatccgcgagaatggccgcctgcgcgacgtgcccctgggctacaagcgccgcgacatcgatttcggccgcggcctgcggcacgccgtgacgattccctggggcgacgtggccaccgcctactacagcaccggcatcccggacatcgaggtctacctgccggcgccgccgctgctggccctgggcatgcgcctgatcgatccgctgcgtccgctgctcggtcggcaacgggtccaggactggctcaaggggcaggtcgacaaacgcatcgccggccccgaccaggcggcccgcgagcgcctgcgcacctgggtctggggcgaggcgcgcaacgcccgcggcgaacgccgcacggcgcgcctggagacggccaacgtgtacgacctgaccctgcacggcgtgctcctggcagtgcgccacctgctggactaccagggtcccggcggctacttcacgccatcgcggttgctcggcgcgcgctgcgtcgaatcgttgcccggctccggacgaatcaccgtcatcggctga

SEQ ID NO: 323629 - DNA, 990 bp, Pseudomonas aeruginosa
atgcggattctggtaacgggggcgacgggcttcatcggcgggcgtttcgctcgcttcgccctggagcagggcctgtcggtacgggtcagcggtcgtcgtgcggacgcggtggaacatctggtggcgcggggcgccgagttcgttcccggcgacctcgccgacccggcgctggtcctgcgcctctgcgaggatgtcgaggcggtggtgcattgtgccggcgcggtcggagtctggggaccgcgcgaacgcttcctggcggccaacgtcgggcttgccgagagcgtcgtcgaggcctgcatgcggcaaaaggtgcggcgcctggtgcatctgtcgtcgccgtcgatctatttcgacgggcgcgaccacctggacctgaacgaagagtacgtaccccggcgtttttccgaccattacggggcgaccaagtaccaggccgagcaactggtgctcagcgcccgcgacctgggcctggaagtgttggcgctgcgtccgcgcttcgtggtcggcgccggcgacaccagcatcttcccgcgaatgatccaggcccaccgcaagggacgcctgcggatcctcggcaacggcctgaaccgggtcgacttcaccagcgtgcacaatctcaacgacgcgctgttcagttgcctgctggccggcgagccggcgctgggcaaggtctacaacatcagcaacgggcagccggtaccgttctgggatgcggtcaactacgtgatgcgccagctcgacctgccgccggtcggcggtcacctgccgtatgccgtcggctatggcctggcggcgctcaacgaaggcgtctgccggatcctgccggggcgcccggagccggtgctgttccgcctgggcatggcggtgatggcgaagaacttcaccctggacatcaaccgcgcccgcgaatacctcgactacgacccgcgggtcagcctgtggaccgcgctcgacgagttctgcgcctggtggcgcgcccagggactctga

SEQ ID NO: 323630 - DNA, 264 bp, Pseudomonas aeruginosa
atggagttgaacaaatccttgctggattgcatgcgcgccgtgcgccgacgcctacgcgaggaacaggcgctggatatccacttccagcaacgcgatgcgatcgccgcgatgcaggcggcctgcgcccgctccggcgatgcgacgacgcgggagctgggacagcgcctcggcaggctcagcggggtcgcgctgccgccggcggaaccttccctgttgcccgcgcaggcgccgagccgacaatacgccggcccgttgcgcggctga

SEQ ID NO: 323631 - DNA, 837 bp, Pseudomonas aeruginosa
atgcgtaacgatgctttcgacgaactcgacgatgtgcccagcctgaccaccgatgctgccgaccgtgatgaattcggccaccacccgcggcacgtctacgaaccggagcagcgccgggtcgtcgacaccaaggagcgccgtccggcctctaccggcccgctctgggccctgctcggggcgatgctgatcgccctcgccggggtgggttggtggagccaccagcaaatcagcctgatggaacagcagttggtggcgacccaggaaagcttcgtaaggatcagcgaggaagccgccgggcgcctcgacgacattcgcggcaaggtggtcgccagcgagtccagcgtcaccagcgaacgcgaggcgctgcgcctgcaggtcaagcaactgcaggagaaactcggcagccaggaacgccagcaggccgatgtgagcaaccagttcggcggccagggcaaacgcctcgaccaactggccagcgatctcaaggcccagcaggaaagcgcggcgcaactggtcgcgcaactggacggcaagctgcagacactggccgccgaacaggagaagctgaaagccctgcaggtcgaactgggcaagaccaacgagcaactcaaggccctcggcggcgatgtcgcggcgctgaagaagcagggcaacccgagccagacgatcaagggtatccaggacgacctgctggtgttgcgcagccagctcgacaatcgcccggcccagggcggcaataccgccgagttcgacgccttccgcacccaagtgatgcgcaacatcaacaccctccaggcccaggtgcagaacctgcagcagcagctcaatacccgctga

SEQ ID NO: 323632 - DNA, 228 bp, Pseudomonas aeruginosa
atgagcgcattgcaaccgtcccgttcctaccgcatcaccggttattcccccgccatcagcaacggctatcgccaacgcctgttctccatggggcttctgcccggcgcggcgctgcgcgtggtgcgcatcgccccgctgggcgacccgatccaggtcgagacccgccagaccagcctggcgctgcggcgcaaggacctcgccctgctgaccctcgtcccgctcgactga

SEQ ID NO: 323633 - DNA, 909 bp, Pseudomonas aeruginosa
atggcggttttccagggcgccgtgcgggttttcgcatggcagtgcatgcggagcgtcgtgcagttgcgcctgccagtagtcgagttcgtccaggcgcgcgccggcctgttcgtgcaggtgccggctccaggcctggtaggaactgctacgcggcccgagatcggcgtcgaggtcggcatagagacgctgcaggtcttccagcaggatgcgccaggacaccccgtccaccgccaggtggtggatgaccagcagcaggcgctggctgccgtcggccatgtccaccagcagcgcacgcagcagcggcccctgttcgaggtcgaggctgcgctgggcttcttcgcaaagcgccagcaacacctcctcggaccccgcctgccggcgccacagcggctcgccggcctgctcggcgtaggcctggtgccaggcgccgcgctcttcgcggaaacgcaggcgcagggcatcgtgctgcgcctgcaggcgttccagggcacgccccagccggtcgccgtcgagcggctggcgcgcctgcaacaagagagactggttccagtgctggcggttgggaatcgactgctcgaagaaccagcgctgtaccggcgccagcgccacctcgccgcttgccggaccctgttccgccgtcgccgcacccgccttggccgccagggccaggctgcggatgttctggtgctggaacaggtcgcgcgggctcagttgcaatccggcctggcgcgcacggctgactacctggatcgagacgatcgagtcgccgccgaggctgaagaagttgtcgtccaggccgacccgctcgacgcccagcaggtcctgccagatttccgccagggttcgctccactgcattgcgcggtgcgctgtagcctgcctgcgccacgcttacttcaggcgccggtag

SEQ ID NO: 323634 - DNA, 1143 bp, Pseudomonas aeruginosa
  misc_feature (757)..(766): n is a, c, g, or t
atggtgctgggtgatgaccaacacatgctcctgcccagccagcgccagcagacgcacgcgcagcagcggcccacgagccaggtcgaatggctggcggatttcctcggccacccgctggcgcaacgttgcttcgctcgccccggcgcaatcctccaggacaatgcgcaacggcatgttcgccaggatcgtctggcgcgcctgaccgtcgacctcctcgaagcgggtgcgcaaggtctcgtggcgcagcaccagccaatcgaaggcctgctgcaacgccgcctggtccaggacgccacgcacgtgcagtacgctggggagatgataggccgcgctttcaggctccagtttccagaggaaccacatgcgttgctgagcatgcgacaaaggcagctcggcgactcgcggcaatacttgcagcacaggggcaacgctcgccgcctgggactccagggaagcggcgaagtctgccaggaccggccgctcgaacaggatgcgcaagggtacgtccagctccagatcctggcgcaggcgcgagaccacccgggtggcgctgagggagtgaccgccgagttcgaagaagtgctcgtcgcgggcgatgccctcgacaccgagcagcgcctcccagatcgctgcgaccgaacgttcgagcccctcccgcggaggctctccggcctggtggcgggcagctgcgtccaccttcggcagcgccttgcgatccagcttgccgttggcgttcagcggcaagctggacagcacnnnnnnnnnnccgctgaacgccaacggcaagctggatcgcaaggcgctgccgaaggtggacagcacctgccaagccgtcggttgcatgtacgcaggcaagcgtccggccagccaggtgcgcagctccgccagaaggtcctcaccccgcatagcgtcacgccccaccaggtaggccgccagcagcggaccaccgacgccatcctgcgccacgaccgctgcttccgccacatacgggtgtgcaagcagttggctctcgatttcgccgatctcgatgcggaaaccacggatcttgatctgctgatcggcgcggccgagatattcgacctgaccgtcgacgcgataacgcgccaggtccccggtgcgatacaggcgctcgcccgaacctga

SEQ ID NO: 323635 - DNA, 1410 bp, Pseudomonas aeruginosa
atggtggcggccaatccgcaagcggagacgagcatgtccctgagtgtcttcgatctgttcaagatcggcatcgggccgtccagctcccacaccgtggggccgatgcgtgccgccgcgcgctttgccgaggggctgaggcgcgaggggttgctggaggccactgccagcgtcaaggtcgagctgtacggctcgctcggcgccaccggcaagggccacggcagcgacaaggcggtactgctcggcctggagggcgagcagccggacacggtggataccgccgcgattcccgctcggctcgatgccatccgttccagcggcgagctgcgcctgctcggcgagcggccgatccgcttcgtcgagaaggaacaccttgcgctgatccgcaagccgctggcctaccatcccaatggcatgatcttccgtgccttcgacgccgccggcctgcaggtccgcagccgcgagtactactcggtgggcggcggtttcgtggtcgacgacgaggccgccggcctcgaccgcatcgtcgaggaccgcacgccgctggcgttccccttcaagaccgcgcggcaactgctcgaccattgcgtccgcgaaggcctgtcgatcagccagttgatggccgagaacgagaaggcctggcgccccgccgaggaaacccgtgccggcctgctgcgtatctggcaggtgatgcaggactgcgtcgaggccggctgccgcaacgagggcatcatgcccggcggactgaaggtcaggcgccgtgcggcggcgctccaccgccagttgtgccagcggccggaggccggtctgcgcgacgccctcagcgtgctcgactgggtcaacctctacgccctggcggtgaacgaggagaacgccagcggcggccgcgtggtgaccgcgccgaccaacggcgcggcggggatcattccggcggttctgcattactacgcgcgcttcatccccggggccgacgacgacggcgtggtgcgcttcctgctcaccgccgcggcgatcggcatcctctacaaggaaaacgcctcgatctccggcgccgaggtcggttgccagggcgaggtcggcgtggcctgctcgatggctgccggggcgctctgcgaagtgctcggcggtagcgtgcagcaggtcgagaacgccgccgagatcggcatggagcacaacctcgggctgacctgcgacccggtcggcgggctggtccaggtgccctgcatcgaacgcaacgcgatggcttcggtgaaggcgatcaacgcggctcgcatggccctgcgcggcgacggccagcacttcatctctctcgacaaggtcatccgcaccatgcgccagaccggcgccgacatgaaaagcaaatacaaggaaaccgcgcgcggcggcctcgccgtgaacatcatcgaatgctga

SEQ ID NO: 323636 - DNA, 1122 bp, Pseudomonas aeruginosa
atgaccgcagaaaccctcgccaagacgcccctgcacgccctgcacctggaactgggggcgaagatggtgcccttcgccggctatgacatgccggtgcagtacccggccggggtgctcaaggagcacctgcacacccgcgagcaggccggtctgttcgacgtttcgcacatgggccagatccgcctggtgggcgccgatgcggcgctggccctggaaagcctggtgccggtggacatcctcgacctgccggtgggccagcagcgctacgcgttgttcaccgacgagcagggcgggatcctcgacgacctgatggtggccaacctcggcgattgcctgctgctggtggtcaacgccgcctgcaagcaccaggacctggcgcacctgcgtcgtcacctggaagaccgttgcagcgtcgagccgctgttcgaggagcgtgccttgctcgccctccagggaccggcggcggtgcgggtgctggagcgcctggcgccgcaggtggcgcagatgaccttcatgcagttcgcccgcgtcgagctgctcggccaggactgctacgtcagccgctccggctataccggtgaagacggctacgagatctccgtgcccgccgcccatgccgaggccctggcgcggcgcctgctggccgagccggaagtggcgccgatcggcctcggcgcgcgcgactcgctgcgcctggaagccggcctgtgcctctacggccacgacatggacagcgccaccacgccggtcgaagccagcctcggctgggccatttccaaggcgcgccgcgccgacggcgtgcgcgccggcggcttccccggcgccgagcggatctttgcccagcaggcgcagggcgttgccagcaagcgcgtcggtttcctgccgcaggggcggatgccggtgcgcgagggcgccgagatcgtcgatgcccaggggcgggcgatcggcaaggtcagcagcggcggtttcggtccgagtctcaacgcgccgctggccatgggctacgtgccgagcgagctggccggcctgggcagcgaggtgacggcgatggtgcgcggcaagccggtgaccctggtggtcagcaagatgcccttcgtggcgcagcgctactaccgcggttga

SEQ ID NO: 323637 - DNA, 705 bp, Pseudomonas aeruginosa
atgactgcagacacccctacctctgtcgctaccatcaaccacctgctgctcggcgcgccctacaccagcccactggtgatccccggcgactggctggtcgacgagttggaaggcgccgtggaggtcggcggcttcaccgacggcctgttccgctggccgacgcgcaagcgcagcggccgcccttcgccgattctctgcggcgacctgctgcgcgcggtacgtaccgaatgcgccgagtcggtgcagttctggtggggtttcagtccgagcctggtggggcgctggcgccgcgccctcggcgtgacccgccgcaacaatcccggcgaccaggcggtggcgcgcgcccgcgccgccctcgcccgctcgctggaccgcaaggcgccgccgaaggcaccggccgcctggtccagcgaagaagtcgagttcatccgccgccatggcagcaagcgcagcctggcctggtgcgcctacatgctcggccgcagctaccagagtgtcgccagcaaggccgaggagctttccccgcacagcgggcgcgaccgcaacaatgcgatctggagcaagtccgaggaagatctgttgcgccagcactaccagcagcgcggctcgctatggtgcgcgcagcagaccggcaagacccgcgcagcggtattccaccgggccaagaagctgggcctgcaacggcagcggccgaaacacccgtga

SEQ ID NO: 323638 - DNA, 963 bp, Pseudomonas aeruginosa
atgcgaagcctgatcgggatgacgttcctgaactcctccgtaggccagcgccggctgcgccagaacggtatcgtgctgcgcctgggaccggtagtcgcggatcgccggcgcgcgaccctgccgcaccggcaaggccactgcctcgatcgtcaggatctggaaaccctgttgctatggctacagcggcacttcctctgcgtgcccctggaacacctgctcgaaggccccgctccagcctgcctgcggatcgccctgagcgtcgacggcaaccctgcggaactggccgagcaggtctatccgctgctggaacgctacgaaatgccggcgagcgccttcatcggcggtgacccgcgcagttggcgcgaagcggtggccgagacgctctggcaggccgatgcgactgccgccggacccttgctggaactgctggagggttacagcggcgcggcactcatggcggtgttcgaacgcaccggcgacgaccagcgtcgcagccgcaacctcgacctcctcctgcgcaagctggaacgcctcgacccggcctcgcagcaggccttgcacgcggcctgcccggttcccgcaccgtacagcgctggcgactgggagcgggtccgccgcctggaaaacagcggcctgcttcgcttcggcctgcgcggacaggagccgcacccatcggcaggcctttgcgccgaggactgtctcggccgcgcccaccgccagctccagcagcattgcgccgcccccctgccggtgttctgccaagctcgcaccacacccgccgcgcaacccggcctgcgcgccgccctcggtcggcttggctaccgcttcgccttcggcgcgcgcaatggcctggtggatacccgttgcgacccgctggacctgccgcgcatcgaggtggatgcggcgatcgccgcccgtcccggccggctggcctggcacatctatcgtggagcccgcccatga

SEQ ID NO: 323639 - DNA, 303 bp, Pseudomonas aeruginosa
atgagagtcgacctggacgccgagggcgtcgccgccgaatcgctgccgcgtttccagcaggcgccccggcagttgcgccagttgtggcgatgggcagcggccagcgtcgcattggccgccgcctgcgccgtgctggggttcttcatcggcctgttcgccgccgactcgctctggccgccgctgctgtacaacctcggcgcggcctggctggtcctgttcgccggtctgcacgcggcctaccgggtcgcggcctggcgttgcgtggtcctcggcgcggaagccctgtctcttatacacatctga

SEQ ID NO: 323640 - DNA, 1218 bp, Pseudomonas aeruginosa
atggacgatctattgcaacgcgtacggcgctgcgaagcgctgcagcaacccgaatggggcgatccgtcgcgcctgcgcgacgtgcaggcgtacctgcgcggcagtccggcgctgatccgcgccggcgacatcctggccctgcgcgcgaccctggcgcgggtcgcccgcggcgaggcgctggtggtgcagtgcggcgactgcgccgaggacatggacgaccaccatgccgagaacgtggcgcgcaaggccgccgtgctggaactgctggccggcgccctgcgcctggccggccggcggccggtgatccgcgtcgggcgcatcgccgggcagtacgccaagccgcgttccaagccgcacgagcaggtcggcgagcagaccctgccggtctatcgcggcgacatggtcaacggccgcgaggcccatgccgagcagcgccgggccgatccgcagcggatcctcaagggctacgcggcggcgcgcaacatcatgcgccacctgggctgggacgccgcgtccgggcaggaggcgaatgcctcgccggtctggaccagccacgagatgctgctgctcgactacgagctgtcgatgctgcgcgaggacgagcagcgccgggtctacctcggttcgacccactggccgtggatcggcgagcgcacccgccaggtcgacggcgcccatgtggcgctgctggccgaggtgctcaacccggtggcctgcaaggtcggtccggagatcggccgcgaccagttgctggcgctctgcgagcgcctcgacccgcgccgcgagccgggacgcctgacgctgatcgcgcggatgggcgcgcagaaggtcggcgagcgcctgccgccgctggtggaggcggtgcgcgcggccgggcacccggtgatctggctgagcgacccgatgcacggcaacaccatcgtcgcgccctgcggcaacaagacccgcctggtgcgcagcatcgccgaggaggtggcggcgttccgcctggcggtgtccggctccggcggcgtggccgccgggctgcacctggagaccaccccggacgacgtcaccgagtgcgtcgccgattccagcggcctgcaccaggtcagccggcactacaccagcctctgcgatccgcggctgaacccctggcaggcactcagcgcggtgatggcctggtccggcgcagaagcgatcccgagcgcaaccttccccctggagaccgtggcatga

SEQ ID NO: 323641 - DNA, 624 bp, Pseudomonas aeruginosa
atgagcggcattcccgaaatcaccgcctatcccttgccgaccgcccagcagttgccggccaacctggcgcgctggagcctggagccgcggcgcgcggtgctgctggtgcacgacatgcagcgctacttcctgcgcccgctgcccgagagcctgcgcgccgggctggtggccaacgccgcgcggctgcgccgctggtgcgtcgagcagggcgtgcagatcgcctacaccgcccagccgggcagcatgaccgaggagcagcgcggtctgctcaaggacttctgggggccgggcatgcgcgccagtccggccgaccgcgaggtggtcgaggagctggcgccggggccggacgactggctgctgaccaagtggcgctacagcgccttcttccactccgacctgctccagcggatgcgcgccgccggccgcgaccagttggtgctgtgcggcgtatacgcccacgtcggggtgctgatctccacggtcgacgcctactccaacgacatccagccgttcctggtggccgacgccatcgccgacttcagcgaggcgcaccaccgcatggccctggaatacgccgccagccgctgcgcgatggtggtcaccaccgacgaggtgctggaatga

SEQ ID NO: 323642 - DNA, 1884 bp, Pseudomonas aeruginosa
atgaacgccctgcccacatcgctgttgcagcgcctgctcgaacggccggcgccgttcgccttgctctaccgcccggaaagcaatggcccgggcctgctcgacgtgatccgcggcgaggcgctcgaactgcacggcctggccgacctgccgctggacgagcccggcccgggcctgccgcgccatgacctgctggcgctgattccctaccggcagatcgccgagcgcggcttcgaggcgctcgatgacggcacgccgctgctggcgctgaaggtcctggagcaggagctgctgccgctggaacaggccctggcgctgctgccgaaccaggcgctggaactgagcgaggaaggtttcgacctcgacgacgaggcctacgccgaagtggtcgggcgggtcatcgccgacgagatcggtcgcggcgaaggcgccaacttcgtgatcaagcggcgcttccaggcgcgcatcgacggctacgccacggccagcgcgctgagtttcttccgccagttgctgctgcgcgagaagggcgcctactggaccttcatcgtccacaccggcgaacgcaccctggtcggcgcctcgcccgagcgacacatcagcgtgcgcgacggcctggcggtgatgaacccgatcagcggcacctaccgctacccgccggccgggccgaacctggccgaggtcatggaattcctcgacaaccgcaaggaagccgacgagctgtacatggtggtggacgaggagctgaagatgatggcgcggatctgcgaggacggcggccgggtgctcggcccctacctcaaggagatggcgcacctggcgcacaccgagtacttcatcgagggccagaccagccgcgacgtgcgcgaggtgctgcgcgagacgctgttcgccccgaccgtcaccggcagcccgctggaaagcgcctgccgggtgatccgccgctacgagccgcagggtcgcggctactacagcggggtggcggcgctgatcggcggcgatggtcagggcgggcgcacgctggactcggcgatcctgatccgcaccgccgagatcgagagcgacggccgcctgcgcatcggcgtcggctcaaccatcgtgcgtcactccgatcccctgggcgaggcggcggaaagccgggccaaggcttccgggctgatcgccgcgctgaagagccaggcgccgcagcgcctgggctcgcacccgcacgtggtggcggcgctggccagccgcaacgcgccgatcgccgacttctggctgcgcggcgccagcgagcgccagcagttgcaggccgacctgtccggacgcgaggtgctgatcgtcgatgccgaggacaccttcacctcgatgatcgccaagcagctcaaatcgctgggcctgacggtgaccgtgcgcggcttccaggagccgtactcgttcgacggctacgacctggtgatcatgggccccggcccgggcaaccccaccgagatcggccagccgaagatcggccacctgcacctggccatccgttcgctgctcagcgagcgccggccgttcctcgccgtgtgcctgagccaccaggtgctgagcctgtgcctgggcctggacctgcaacgccggcaggagcccaaccagggcgtgcagaaacagatcgacctgttcggcgccgccgagcgcgtcggcttctacaacaccttcgccgcgcgcgccctgcaggaccgcatcgagattcccgaggtcggcccgatcgagatcagccgcgaccgcgagaccggcgaggtccatgccctgcgcgggccgcgcttcgcctccatgcaattccaccccgaatcggtgctgacccgcgagggtccgcgcatcatcgccgacctgctgcgtcacgcgctggtcgagcggcggccctga

SEQ ID NO: 323643 - DNA, 837 bp, Pseudomonas aeruginosa
atgcacagatatgtcgtgatagacgccttcgccagcgaaccgctgcaaggcaacccggtggcggtgttcttcgactgcgacgacctcagcggcgagcgcatgcagcgcatggcgcgggagatgaacctgtcggagagtaccttcgtgctccgcccgcaacaggacggcgacgcgcgcatccgcatcttcaccccggtcaacgaactgccgttcgccggccacccgctgctgggcaccgccatcgccctgggcgccgagaccgacaaggacaggctgttcctggagaccaggatgggcaccgtgcccttcgccctggagcgccaggacggcaaggtggtggcctgcagcatgcagcagccgatccccacctgggagcacttcagccgcccggccgagctgctcgccgccctcggcctgaagggctcgacctttcccatcgaggtctaccgcaacggcccgcgccacgtcttcgtcggcctggagagcgtcgccgcgctgtccgcgctgcaccccgaccaccgcgcgctgtgcgacttcccggacctggcggtgaactgcttcgccggcgccgggcggcactggcgcagccgcatgttctcgccggcctacggcgtggtcgaggacgccgccaccggttccgccgccgggccgctggcgatccacctggcgcgccaccggcagattccctacgggcagcagatcgagatcctccagggcgtcgagatcggccggccgtcgcgcatgtacgcccgcgccgagggcgccggcgagcgggtctcgacggtggaagtgtcgggcaacggcgcggccttcgccgaaggccgggcctacctgtga

SEQ ID NO: 323644 - DNA, 648 bp, Pseudomonas aeruginosa
atgatgggcgtcaacgcgaacatttccgagtccctcaccgggaccatcgaagcccctttcccggagttcgaggcgccgccggcgaaccccatggaggtgctgcgcaactggctggaacgcgcccgccgctacggcgtgcgcgagccgcgggcactggccctggccacggtcgacgggcagggccggccgtcgacgcggatcgtggtgatcgccgagctgggcgagcgcggggtggtgttcgccacccacgccgatagccagaagggccgcgaactggcgcagaacccctgggcctcgggggtgctgtactggcgcgagagcagccagcagatcatcctcaacggccgcgccgaacgcctgcccgacgagcgcgccgacgcccagtggctgagccgcccgtaccagacccacccgatgtcgatcgcctcgcggcagagcgaaaccctcgccgacatccacgccctgcgcgccgaagcccggcgcctggcggaaaccgacggcccgctgccgcgcccaccgggctactgcctgttcgaactgtgcctggagtcggtggagttctggggcaacggcaccgagcggctgcacgagcgcctgcgctacgaccgcgacgaaggaggctggaagcaccgctacctgcaaccgtga

SEQ ID NO: 323645 - DNA, 369 bp, Pseudomonas aeruginosa
atgcatgcacctagccagattcgactaacattcaatcaggaccatcccgagcctcatgagcacgaggacgaaggggcggggctcgcggtacaggagtcgaagcctgtattacagccgccaccgttgtataaggtggtactgttcaacgacgattacacgccgatggactttgttgttgaagtgctggaagtgttcttcaacatggaccgggaaaaagccaccaagatcatgttgacggtacatactcagggtaaggcggtctgcggcttgtttacccgggacgtggccgaaaccaaggcgatgcaggtcaatcagtatgcacgggagagccagcatccattgctctgcgagatagagaaagacagttga

SEQ ID NO: 323646 - DNA, 2277 bp, Pseudomonas aeruginosa
atgttgaatcgagagctcgaagtcaccctcaatctcgccttcaaggaggcgagggccaaacgccatgaattcatgacggttgagcacctgctgctggccttgctggacaatgaggcggcggcaacggtattgcgtgcgtgcggtgccaacctggacaagctgcggcgcgacctgcaggaattcatcgattccaccacgccgctgatcccgcagcacgacgacgagcgcgaaacccagccgacgctgggcttccagcgcgtcctgcagcgtgcggtgttccacgtgcagagttccggcaagcgcgaagtgaccggggccaatgtcctggtggcgatcttcagcgaacaggaaagccaggcggtgttcctgctcaagcagcagagcatcgcgcgtatcgatgtggtgaactacatcgcccatggtatctccaaggtgcccgggcatgccgaacatccgcaggatggggagcaggatatgcaggatgaggaaggtggcgagtcggccacgtccaaccatccgctggacgcctatgccagcaacctcaacgaactggctcgccaggggcggatcgacccgctggtggggcgtgagcatgaagtcgagcgggtggcgcagatccttgcccgccggcgcaagaacaacccgctgctggtaggcgaggcgggggtcggcaagacggccatcgccgagggcctggccaaacgcatcgtcgatggccaggtgccggacctgctggccgacagcgtggtctactccctcgacctgggtgccttgctcgcgggtaccaagtaccgcggcgacttcgagaagcgcttcaaggccttgctcaacgagttgcgcaagcgcccgcacgcggtgctgttcatcgacgagatccataccatcatcggcgccggtgcggcatccggcggggtaatggacgcctccaacctgctcaagccggttctgtcctcgggcgagatccgctgcatcggctcgaccaccttccaggagttccgcggcatcttcgagaaggaccgggccttggcgcggcgcttccagaaggtcgacgtgaccgagccgtcggtggaagacacctatggcatcctcaagggcctcaaggggcgcttcgagcagcatcaccacatcgagtacagcgacgaggcgctgcgcgccgcggccgagctggcggcgcgctacatcaacgaccggcacatgccggacaaggccatcgacgtcatcgacgaggcgggcgcctaccagcgcctgcagccggaagagaagcgcgtgaagcgcatcgaggtggcgcaggtcgaggatatcgtggcgaagatcgcgcggatcccgccgaaacacgtcaccacctccgacaaggagttgctgcgcaacctcgaacgcgacctcaagctgaccgtgttcggccaggacgacgccatcgagtcgctgtccacggcgatcaagctgtcccgggccgggctcaaggcgccggacaagccggtcggctcgttcctcttcgccggtcccaccggcgtgggcaagaccgaggtggcgcggcagttggcgaaggccttgggcgtggaactggtgcgcttcgacatgtccgagtacatggagcggcataccgtgtcgcggctgatcggtgcgcctccgggctacgtcggcttcgaccagggcggcctgctcaccgaggcaatcaccaagaccccgcactgcgtgttgctgctcgacgagatcgagaaggctcacccggaggtcttcaacctgctgctgcaggtgatggaccacggcaccctgaccgacaacaacgggcgcaaggcggacttccgcaacatcatcctgatcatgaccaccaacgccggcgcggaagtggcggcgcgcgcgtcgatcggcttcaaccagcaggatcacaccaccgatgcgatggaagtgatcaagaagagcttcaccccggagttccgcaaccgcctggataccatcatccagttcggccgcctgagcaccgagacgatcaagagcgtggtcgacaagttcctcaccgagctgcaggcgcagctggaggacaagcgcgtccagctcgaggtcagcgatgcggcgcgcggctggctggcggagaagggctacgacgtgcagatgggtgcgcgaccgatggcgcggcttatccaggacaagatcaagcggccgttggccgaggagatcctgttcggcgagctggccgagcatggcggcctggtgcatgtcgacctgaagggcgacgagctggccttcgagttcgagatcacggcggcggagcccgcctga

SEQ ID NO: 323647 - DNA, 219 bp, Pseudomonas aeruginosa
atgtcgaaagaagacagcttcgaaatggaaggtactgtcgtcgacaccctgcccaacaccatgttccgtgtggagttggaaaatgggcacgtcgtcaccgcgcacatctccggcaaaatgcgcaagaactacatccgcatcctcaccggcgacaaggtccgcgtggaactgacgccctacgacctgagcaagggccgcatcacctaccgcgcccgctga

SEQ ID NO: 323648 - DNA, 708 bp, Pseudomonas aeruginosa
atgaccgaactcgcccgactgaagttctacgcgacgcaaccgcacccgtgcagctacctgcccgaggagcaggcaaccaccctgttcctcgatcccagccagcccatggacacgcagctgtacgcctcgctgtcggaggtcggcttccgccgcagcggcgaccatctctatcgtccgcactgccagcattgcaccgcctgcatcgccgcgcgcataccggtcgccgacttcagcccgaaccgccagcagcggcgcatcctcaagcgcaatgcggaactgcaggtgatccgcaagcgaccgagcttcaacgaggagtactacgacctctatcggcgctacatcgagcaacgccacgccgacggcgacatgtatccgcccagccgcgaccagttcgccaccttcctggtccgcgacctgcccttctgctgcttcttcgagttccgcctgcatggccgcctgctggccatagccgtgacggacgtgctgccgaacggactctcggccgtctataccttctacgatcccgacgaagagcagcgcagcctgggacgctacgcgatcctctggcagatcgccgagaccgaacgcctgggcctgcaggccgtctacctgggctactggatcaagaattgccgcaagatgaactacaagacccagtaccggcccatcgaactgttcgtcaaccagcgctgggtcgccctcacctga

SEQ ID NO: 323649 - DNA, 681 bp, Pseudomonas aeruginosa
atgctgacctggctttcccgcaccgacttcgactttccgcccctcgacaaggccctgcaggagcccaacgggctgctcgcggccggcggcgacctcaatccgcaacgcctggtcgcagcctatcgccacggctgcttcccctggtaccaggatggccagccgatcctctggtggtcgcccgacccgcgcaccgtcctgttccccgacgaactgcacgtttcccgcagcctggccaagtgcctgcgccagcaacgcttcgaagtcactttcaaccgtgacttccgggcggtgatccaggcttgtgccgcgccgcgtgactacgccgacggcacctggatcaccacgccgatgcaactggcctaccaggagctgcacctgcgcggcatcgcccactccgtggaagtctggcaggagcgacaactggtcggcggcctctacggcctggccatgggcaggctgttcttcggcgaatcgatgttcagccgcgccgacaacgcttccaaggtcggcttcgtcacgctggtccgccatctgcgcgacgccggcttcgtcctcatcgactgccagatgccgacccgccacctgcacagcctgggcgcccgcgccatcagccggggggaattcgccgactacctgcaacgctatcgcgaccagcctcctaccggcgacctggatttttag

SEQ ID NO: 323650 - DNA, 1368 bp, Pseudomonas aeruginosa
atgctcctggctgagcaacaggccgacggcgctgtcctcgagcatgtgacgcaaacggtcctgcggataggtcgggtccagcggcacataggcaccaccggccttgaggatcgccagcagaccgaccaccatgtccagcgagcgctcgacggcgattcccaccagcacatcgggaccgacgccacgcgctatcaggcagtgagccagacgattggcgcgggcgttgagctcggcgtagctcaacgcctgcccctccagcgccagtgcttgcgcctgcggacgcagacgggcctgctcctggatctgcaactggaccaggggcggcaacccaccctcgtcggcgttctctgcccaggcccgcaacaggcaatcgcgctcctcgtccagcaacagcggcaactcggcgaccggccggcccggttcggccacgatgccgcgcaggagattctgccagtgccgagccaggcgctcgacggtcgaggcctcgaacagatccgtggcatagccgaacgatgcccagataccgtcctcggcctcgtgcacgtccagcgtcaggtcgaaggccacggagctgctccgccactccatccgctccagcgacaggcctggcagttgcacgccctggttggccgaacgagagtcggcctggtgattgaacatgacctggaacaacgggttgtggccgaggctgcgttccggctgcaaagcctccaccagttgctcgaacggcaggtcctggtgcgcctgtgcctccagcgcgcgctggcgggcctgggccagcaactcgtcgaaacccatccggccattgatgtcggccttgagcacctgggtgttgacgaagaaaccgatcagccgctcggtttcaacccggttacggttggcgatcggcacgccgacacggatatccgcctgtccgctatagcgatgcaacagcgcctggaaggaagccagcaacagcatgaacatggtcacacccttgcgctgaaccagctgtttcaaggcaagggccaggtgtggctccagctccaggtccaattgcgctccacgatagctgcgcagcggctgccgccggtgatcgaggggcaactcgatcaccggctgctcgccgcccagcaggccggtccagtacgccaactggcgctccttttcccccgcctccatccagctgcgctgccacagggcgtagtccgcgtactggatcggcagggccggcaacaccacgtcgagcccttggctgtagccggcatagagctggaccagttcctcgaccatcaattgcatcgaccaaccgtcggagacgatatggtgctggaccatgaccagcacatgctcgtcggcgtccacctccagcaaagtcacccgcagtaa

SEQ ID NO: 323651 - DNA, 234 bp, Pseudomonas aeruginosa
ttgcaacaggtcgggctcgacgacaacttcttcgagcttggcggccactcgttgctggcgatccaggtgactgcccggatgcagagcgaggtcggcgtggagctgccgctggcggcgctgttccagaccgagtcgctgcaagcctatgccgagcttgccgcggcgcagacttccagcaatgacaccgatttcgatgaccttcgtgaattcatgagcgaactagaggcgatctga

SEQ ID NO: 323652 - DNA, 2160 bp, Pseudomonas aeruginosa
atggcctttctcgacgctctcgccctgcgcctgggccgccgcctgccgctggtgctgcagaccgaagccaccgaatgcggcctggcctgcctggcgatgatcgccggctaccacggccaccataccggcctgatggaactgcgccggcgcttctccgtatcgctcaagggcatctcactcaagcaactgatccagaccgcccaccgcctcggcctgggcacccgcgcggtgaagctcgacctcggcgacctcggcaagctcaagctgccctgcgtgctgcactggaacttcaaccacttcgtcgtgctcaaggcggtcgacgggcgcggcgcggtgctccacgaccccgcccacggccagcgccggctgggcctggaggaagtctcgcggagcttcaccggggtagccctggaactctggccggagagcggcttcgagaaacaggaggcgccgccgcggatcaagctgctgggcatgctcggcaaggtcaccgggctgtaccgctcgctggcccaggtgctgctgctcgccggcgcgctggaagtgttctcgctgatcagtccgttcttcctgcaatggaccatcgacaacgtcatcgtcagcgaagaccgtgacctgctcagcaccctggccatcggcttcggcctgttgctgctgatgcagcaggcggtcagcggggtgcgcgcctgggtgatgatgcacatgagcaccctgctcggcgtgcagtggcaggccaacgtcttcagccacctgctgcggctgcccgcgcagtatttcgagaagcgccacctgggcgacgtggtgtcgcgcttcggcgcggtgaacagcatccagcagaccctcaccgcggccttcctctcggcggtgctggacggcctgatgaccgtcgccaccctcggcatgatgctgctctacagtccgccactggcggccatcgccatcgccgccatgagcctctacgccctcggccgctggatctggtaccggccgttgcgcaacgccaccgaggagcagatcgtccacgccgcgcgccagcagagccacttcctcgagacggtgcgcggcatccgcccgttgaagctgttccagcgccaggacgagcgccgctcggtatggctcggcctgctggtggaacagatcaacgccggcctgcgtacgcagaagctgcaactgttctaccagcagctcaacggcctgctgttcggcgtggagaacctgctggtgatctggctcggcgcgaccatggtgatggacggccagttcagcgtcggcatcctgatggccttcaacgcctacaagtcgcagttcgacagccgcgtcggcagcctgatcgacaagttcttcgagctgcgcatgctccagttgcagggcgagcgcctggccgacatcgtgctccaggccccggaggtcagccacggcgacatcctcccggagaaccttcgcgagcgcgaggcgagcatcgagatccagggcctgcgctaccgctacgcggaacaggagccctgggtcctcgacggcctcgacctgcgcatcgccggcggcgagtcggtggccatcgtcggcccctcgggctgcggcaagagcaccctgttcaacgtcctgctgggcatcctcccgccagtggagggacagatccgcatggccggcctggaccttgcgcaactgggcctggacggcctgcgcgaactggtcggcacggtgctgcaggacgacgtgctgttcgccggttcgctcagcgacaacatcagtttcttcgacccgcaaccggacatgccctggctgctgcagtgcgcgcagatggctgccatccacgatgacatccaggccatgccgatgggctacaacaccctggtcggcgacatgggcacggtgctctccggcggccagaagcagcgggtgatgctggcccgggcgctgtacaagaagccgcgcatcctgttcctcgacgaagccaccagccacctcgacgtacactgcgaacagcgggtcaacgccgccattcgagcgctgcgcatcacccgcatcatggtcgcccatcggcccgagaccatcgcctcggcggaccgcgtgatagtcctcggccagggcaaggtaagcctcgacgaaagcaccgcgcgcctggccgaacgccaggccgccgcggcgcgggagcaggcctga

SEQ ID NO: 323653 - DNA, 1152 bp, Pseudomonas aeruginosa
atggcgctgctggtggtgggcttcttcctgttcggcagctacaccaagcgcagcaccgtcagcggccaattggtgcccgccagcggccaggtcaaggtgcacgcaccgcaggccggcatcgtgctgcgcaagttcgtccaggaaggccaggcggtacgacgtggcgagcgcctgatggtgctttccagcgaacgctacggcagcgatgccggcccggtgcaggccggtatcagcaggcgcctggaacaacgccgcgactccctgcgcgacgaactggaaaagcttcgccgcctgcaagacgacgagcgcgacagcctgaccagcaaggtcgccagcctgcagcgcgaactcaccaccctcgccgcccagaccgacagccagcgacgcctgctggcgctggccagcgacgccgccgcgcgctaccaggggctgatggacaagggctacatctccatggaccagttgcagcagcgccaggccgagctgctcggccagcgccagaccctgcaaggcctggagcgcgaacgcacgtcgctgcggcagcagttgaccgagcgccgcaacgaactcgccgggctttccgcgcgccaggccaaccagctcgcggaaacccgccgccagctcagcgcggtggagcaggacctggccgaaagcgaagccaagcgcaccttgctggtcaccgcgccggagagcggcatcgccaccgccgtgctcgccgaagccgggcagaccgtcgacagctcgcgtccgctgctgagcatcgttcccgccgacaccccgttgcaggccgaactctacgcgccgagcaagtccatcggtttcatccggccgggcgacgcggtgctgatccgctaccaggcctatccgtaccagaagttcggccagtaccacggcaaggtgcagtcgatctcccgcgccagcgtctcctatgccgagctttccagcatggtcggcggcgtaccggggctcggccaggatggcgagcagctgtaccggctgcgggtaaccctcgacgaccaggcggtgaccgcctacggccagccgcgtccgctgcagagcggcatgctgctggacgccgacatcctccaggacacccggcgcctctacgaatgggtgctggaaccgctctacagcctgaccggcaaactctag

SEQ ID NO: 323654 - DNA, 984 bp, Pseudomonas aeruginosa
gtggtcggcgccgaataccgggtggtccaggaactctacgaaaccggcagcggcggcgccggctcgcagttcgagagcgagctggactgcatcgacgccagccagtcgttccgtctcctgccgcagactccggtaccggtggtgcgaggtccgcagaccgcggtggtggtcggacccaagggcgaggagatctggaccgaccagtacggccgggtcaaggtgcacttccactgggatcgccacgaccagtcgaacgagaacagctcctgctggattcgcgtgtcccaggcctgggccgggaagaactggggttcgatgcagatcccgcggatcggccaggaagtgatcgtcagcttcctcgaaggcgacccggaccggccgatcatcaccgggcgggtctacaacgccgagcagacggtgccctacgagctgccggcgaacgccacccagagcgggatgaagagccgttcgagcaagggcggcacgccggccaacttcaacgagatccgcatggaggacaagaagggcgccgagcagttatacatccacgccgagcgcaaccaggacaacctggtcgagaacgatgcctcgctgtcggtcggccacgaccgcaacaagagcatcggccacgacgagctggcgcgcatcggcaacaaccgcacccgcgcggtgaagctcaacgacaccctgttggtgggcggggcgaagagcgacagcgtcaccggcacctacctgatcgaggccggcgcgcagatccgcctggtctgcggcaagagcgtggtggagttcaacgccgacggcaccatcaatatctccggcagcgccttcaacctctacgccagcggcaacggcaacatcgacaccggcggccgcctcgacctcaattccggcggcgccagcgaggtcgacgccaagggcaagggcgtgcagggcaccatcgacggccaggtacaggcgatgtttccgccgccggcgaagggctga

SEQ ID NO: 323655 - DNA, 285 bp, Pseudomonas aeruginosa
atgacacccatcgaatacatcgaccgcgctctagcgctggtcgtcgaccggctggcccgctatccgggatacgaggtcctgctgtccgcggaaaagcaattgcagtacatcaggtccgtcctgctcgaccgcagcctggatcgttccgcactgcaccggttgaccctcggcagcatcgccgtgaaggaattcgacgaaaccgacccggaactctccagggccctcaaggacgcctactacgtcggtatacgcactggccgcggcctgaaagtcgatctgccctga

SEQ ID NO: 323656 - DNA, 1293 bp, Pseudomonas aeruginosa
atggatgcgcaagccgccgcccgactgggcgatgagatagcccacggtttcggtgtcgccgcgatggtcgccggagccgtggccggagccctgatcggcgccgccgtggtcgccgccaccgccgccaccggcggcctggccgcggtgatcctggccggttcgatcgccgccggcgggctgtcgatgttccagatcgtcaagggcctgaccaccatcttcgagctacccgagccgaccaccggggtgctcatacgcggcagcttcaacgtctacgtgaacagtcgcaacgcgatgcgcgccggcgacgacgtctccgccacctgcagcggcctgccgctgaaccatccgctgtggccgttcccggtgctgatcgccgaaggcagcgccaccgtgtacatcaacggcaagccggcggcgcgcctgcagagcaagatggtctgcggcgcgcacatcaagaccggcagccaggacaccttcatcggcggccccaccgagcgggtggccttcgtcctcgacctggaggaatggctgcacaccggcctcgaggcgctgggcctggcggcccttgccggcggcctgctgctggcggcgatggccggggtcgcggcgctggccggcttcgtcgccatcggcgggctgatgatgggcggcatggccctgctcggcgacctcggcgaccgcctcggtcccggctaccgcgacctgttccagggcgtggcggggatggcattgctgggcttcgggccgaaactcgccggtcgtcgtccggcagcggtgacctccgaaaccgcgcaacgacgcgcctacctgaacaacaagttcggtcgttccggcaacctcgaccacgacatcaactaccgcgggaatcgtgaaaccgccgccaagttcttcaagtcgaaggacatcgatcctgccgatgccgagtcgtacatgaacggcctggacttcaaccatccggtccgtgtggaaaccctcgcgcccggcaagaacctgtggcagtaccagtcccccggagcgccgcagggcaactggtatacactcagcccgcgcgtgcagcccacggagctgggaatcaaccccatgggcaccaaccgggcggcgaacaccatcgaacccaaggtcctcaactcctacaggacgacccagaaggtcgaggtcctgcgcagcaccgctgcgccgaccgatgacttctggtcggtaaagggacagtcatatcccgccaaaggcggcgcgcaacaactgttctccaacgagaaaggctccttcggtctgcttccccgggagggatcatga

SEQ ID NO: 323657 - DNA, 435 bp, Pseudomonas aeruginosa
gtgacgctctatcgcctccacgaagccgatctcgagattcccgatgcctggcaggaccagagcatcaacatcttcaagctccccgccagcggccccgcccgcgaagccagtttcgtcatcagccgcgacgccagccagggcgacgcgccgttcgccgactatgtcgcccgccaactggagaatgccgagaagcaattgcccggcttcaagctgcacaagcgctgggacatcaacattcacggccacgccgccgtgctcctcgactaccagtggcagcgcgagggccgcgacctgatgctgcgccaggtattcatcgagcgccgcccggcggtgctgatcaccaccctgaccaccaccccggctgacctgccgcaccacgagccggcctggaagcaggcgatgcagaccctggtcccgcgcccgacccctagctga

SEQ ID NO: 323658 - DNA, 732 bp, Pseudomonas aeruginosa
atggtcgcgctcgcgctgttccagggtcggcgggtagtagggcacgctggcgtagttcggcgggctctggtgcgcgccgtaggcgtcggagagcaccagaatgtggcggctctgctcgtggcggaaccagtagtagatgccttcctgctccatcagccggctgacgaagtcgaaactggtctcgcggtactgcacgcagtattcccactcgcggtaggagcggctcagggcgtcctcgaagtcggagaagccgaggtcgcggaacacctgcttgatgatgtccgggaccttctggttctggaagatgcggcagtcggaggtgcgcgtcagcagccacagccaggggcgcagggtgacctggtagctggcgaactggccgttgccggatccctggctgcaagcggcgacgatgccgtggaaatgccgccggctgccgtcgtgcagttccagcgccaggctggccggcttgcccagcagcccgtcgagtggcaggtcggggttttccgagatcagttccagctcgtaggcgaacggccggccgagctcttcgcgaccctccattcgctgcaattgcagaacctccgcgccgagcggactgtcgacccggaccaggcgggtctgttgcgcaagtgccatgaaatcatccttgatccacgtccatcactggcgccgttggagcggcaccacccaagcagcataggcgcggatgcggtggaaaggggagatgcgtga

SEQ ID NO: 323659 - DNA, 384 bp, Pseudomonas aeruginosa
atgggtgtagatcaggtgatgctcaccttcggcagtcttcaccaacagcagccgcaacagtggcgcacgctgcagttcgaaaccgcgttcgcgctcggccgcagccagcgcgagcagcgcggcgtcccgattcgccgcctggctcaggtcctcttcggcgaagggcaactggcgctgtcgatagacgatctgcaagggctgctgcagctccccctgccaggcgaaaccactgcgcaggatcgcgtgccggtccagggcggactgccaggctgcgcggaagcgcgggatatcgaggccggacacatccacacgcatctgattgatgtagtcgctcgatgcctgctcgtacagcgaatggaacagcatgccctgctgcatgggtga

SEQ ID NO: 323660 - DNA, 1068 bp, Pseudomonas aeruginosa
gtgcttgtcgatgattttcgccacgcgggtcacgtcggggtagttcggcacgccctcgaacagaatggtggtggcgccgttggccagcgggccatagacgatgtaggtgtggccggtgacccagccgatgtcggcggtgcaccagtagacttcgcccggacggtagtcgaagacccgctcgtgggtcagcgaggcgtacaccaggtagccgccggtggtatgcagcacgcccttcggcttgccggtggagccggaggtgtagaggatgaacagcgggtcctcggcgcccatttccttgggtgcgcaagtgctgccggcaaccttcatcaggtcgtcgtaccagacgtcgcggtgctggttccacttgatctccgcaccggtacgcttgcagacgatgatcttctgcacgctggaggtttccgggttggtcagggcgtcgtcgacattggccttcagcggagtgcgcttgccgccgcgcacgccttcgtcggcggtgatcaccaccttcgacttgcaatcgatgatgcgcccggccagggcctcgggggagaagccgccgaagaccaccgagtggatcgcgccgatgcgggtgcaggcgagcatggcgaccacggcctcggggatcatcggcatgtagatggtcactacgtcgccgcggtgcacgtcctgcccgcgcagggcgttggcgaacttgcagacctgctcgtggagctggcggtaggtgatttcctggtggtcggcgggatcgtcgccttcccagatgatcgccacctggtcgccgcgttcggcgaggtgacggtcgaggcagttgtgcgacacgttgagggtgccgtcggcgaaccacttgatgtccacgtgatggtcgtcgaaggaggtctgcttgaccttctcgaacggcttgatccagtcgatccgctgggcctgctcgcgccagaagccgtcggggttgacgacggactgctggtacatcgtcttgtaggtggcttcgtcggtgaaggtccgtgccaccgcttccgggtgcacggggtacagggatgccgcagacatggctttaacctcggtacgtga

SEQ ID NO: 323661 - DNA, 1284 bp, Pseudomonas aeruginosa
atgaccgtgctgatcctgttcctgctgctgttcctgttcatgttcatcggcgtgcccatcgccatctccctggggctgtccggcgccctgacgatcctgctgttcagcccggattcggtgcgctcgctggcgatcaagctgttcgagacctccgaggcctacaccctgctggcgatcccgttcttcctgctctccggcgcgttcatgaccaccggtggcgtggcgcggcgcctgatcgacttcgccaatgcctgcgtcgggcatatccgcggcggcctggcgatcgctgcggtgcttgcctgcatgctgttcgccgcgctgtccggttcgtcgccggcgacagtggcggcggtcggctcgatcgccgtggccggcatggtccgctccggctatccgcgcgccttcggcgcggggatcatctgcaatgccgggaccctgggcatcctcatcccgccatcgatcgtgatggtggtctacgccgccgccaccgagacctcggtgggcaagctgttcgtcgccggggtggttccggggttgttgctcggggtgatcctgatggtggtgatctacatcgtcgcgcgggtcaagaagctgccggcgcagccgcgcgccagcttccgcgagtggctggccgccgcacgccgtgcaggctggggcctgttgctgctggtgatcatcctcggcggcatctattccgggctgttcacccccaccgaggcggcggcggtggcggcggtgtattcggccttcgtcgcgctgttcgtgtacaaggacatgcgcctgcgcgactgtcccaaggtgctgctggagtcggggcggctgagcatcatgctgatgttcatcatcgccaatgccatgctcttcgcccacgtgttgaccaccgagcagatcccccagcagatcaccgaatgggtggtgcaggaaggcctgaccccgatcggcttcctgctgatggtcaacgtggtgctgctggtcgccggcagcttcatggagccctcggcgatcgtgctgatcctggcgccgatcttcttccccatcgccatgaagctgggcatcgacccgatccacctgggcatcgtcatggtggtgaacatggagatcggcctggtacacccgccggtcggcctcaacctgttcgtcacttcggcggtcaccggcatgccgctgggggcgaccatccgcgcggcgctgccgtggctgatgatcctgctgctgttcctgatcctggtgacctacgtgccgttgatctcgctgtggctgccgggcctgctgggcatgagctga

SEQ ID NO: 323662 - DNA, 231 bp, Pseudomonas aeruginosa
gtgaagaccctgttcgtcgccggcatcggcgccgaggacctcgaccacttcggcatcctccaggcctacatcgcggtggtggtgccggtcggcttcggcctggtgctgctgcgctacctggaaatcctcgtcaacctgttgcgcggtcgccagctcgggctgggcctcgccgacgaggccgccgaggcctccaaactggccggcgaagaggccggggagaaccgtccatga

SEQ ID NO: 323663 - DNA, 1245 bp, Pseudomonas aeruginosa
atgcttgagctgtatcgccaccgccgcctggtcatcaccctggcgttgctctacctgtcccagggcattcccatcggcctggccatggacgccctgcccaccctcctgcgccaggatggcgcgccattgcaggcgctggccttcctgcccctggtggggctgccctgggtggtcaagttcctctgggcgccctgggtcgacaaccattggtcgcgccgtctcggccggcggcgtagctggatcctgccgatgcaatgcatcgtcctcgcctgcctgctcggcctggcgacgctcggcctcggcgtggccagtgccggttgggcggtcggcctgctggcgctggcttcgctggccagcgcgacccaggacatcgccaccgacggcatggcggcggagcacttcagcggcgagctgctggccaaggtcaacgcggtacagatcgccggggtgatgatcggcttcttcggcggcggtgccggcagcctgatcctcgccgggcatttcggccagcgcgcggcgttcctggtcgtggcctgcgtgccgctggcaagcctgtgctgcgtgctcgccctggggcgcggcgacccccacgaactccccccggcaccggccgccaaggccagcctgctgcgcttcctgcgtcggccgctggcgccttcgctgctggcgctggcactgctgtcggcgatgaccgcggtatccggcttcggcctgtccaagctgtacctcagcgatgccggctgggccttgcaggacatcggccggctgggcatgagcggtggcctggtcacggtattcctcggctgcggcggcggcgcctggctggtcaggcggatcggcctgtggcgcggtttcgcccttggcgtggtgctcgccggttgttcggcgctgctctggtatctgcaggccggtcgctggttggcactgagcgaaggattggcgtggacctgcgtgctgatcggctcgctggctaccggcatcacctcggtggcgatcctcaccgcggcgatgcgcttcgccggccagggcggccaggccggcaccgatgtcaccgcggtgcagagcacccgagacctcggtgagatgctggcgtcttcgttcctggtcagcctcaccgcgcagatcggctatgccggcggcttcctcaccggcagcgccctggcggtgctggccctgttgctcgccctgcgcctgcaggccggcgaggggcgcggggagtggaaggggcgggcggaagaggcctga

SEQ ID NO: 323664 - DNA, 1209 bp, Pseudomonas aeruginosa
atgagcgaacccatcgatatcctcatcgccggcgccggcatcggcggcctcagttgcgccctggccctgcaccaggccggcatcggcaaggtcacgctgctggaaagcagcagcgagatacgcccccttggcgtcggcatcaatatccagccggcggcggtcgaggccctcgccgaactgggtctcggcccggctctggcggccaccgccatccccacccacgagctgcgctacatcgaccagagcggcgccacggtatggtccgagccgcgcggggtggaagccggcaacgcctatccgcagtactcgatccatcgcggcgaactgcagatgatcctgctcgccgcggtgcgcgagcgcctcggccaacaggcggtacgcaccggtctcggcgtggagcgtatcgaggagcgcgacggccgcgtactgatcggcgcccgcgacggacacagcaagcccctggcgctcggtgccgatgtgctggtcggcgccgacggcatccactcggcggtccgcgcgcacctgcatcccgaccaggggccgctgtcccacggtgggatcaccatgtggcgcggcgtcaccgagttcgaccgcttcctcgacggcaagaccatgatcgtcgccaacgacgagcactggtcgcgcctggtcgcctatccgatctcggcgcgccacgcggccgaaggcaagtcgctggtgaactgggtgtgcatggtgccgagcgccgccgtcggccagctcgacaacgaggccgactggaaccgcaacggacgcctggaagacgtgttgccgttcttcgccgactgggacctgggctggttcgacatccgcgacctgctgacccgcaaccagttgatcctgcagtacccgatggtcgaccgcgatccgctgccgcactggggccggggacgcatcacgctgctcggcgacgccgcccacctgatgtatccgatgggcgccaacggcgcttcgcaggcgatcctcgacggcatcgagctggccgccgcgctggcgcgcaacgccgacgtggccgcagccctgcgcgaatacgaagaagcgcggcggccgaccgccaacaagatcatcctggccaaccgcgaacgggaaaaagaggaatgggccgcggcttcgcgaccgaagaccgagaagagagcggcgctggaagcgatcaccggcagctaccgcaaccaggtggaacggccacgctag

SEQ ID NO: 323665 - DNA, 675 bp, Pseudomonas aeruginosa
atggcatcgtcagccacttcacccaaggcagctcgggttttcgccggacccgctacgaactgctgctggaaccacagttggcgcgcctggagctgtgctgcaactggcggatcttccaggagaagagtgttccggagattctccaggcgctgctcaaggaacaccgggtgcccgactacgaacagcgcatctaccatgagcacctgccgcgcgaatactgcgtgcaggccggcgacagcgatcactacctgcacgaccggctggccttcgaggaaggcctggtctactacttccgcttcgacgaacaccgccacaccctggtctgcagcgaccggctctacgtccaggagcgtatcgccggcggcccggtactgttcagcgcccagccggagggcgacaacccgcagccggtgcttcattctttccgctacagcgaaaatgttcgtacggctcgacagacccagcgggactacagcttcaagcgcccgacctacgaccaggagcatcatctcgctggcgaggcgctcgagcatcagggctcgtcctacgagcgctacgactaccccggtcgctacaagcggagcggcgccggccggcctttcagcgaaagccgcctcagagggcaccggcgcgatgcgcgggtggcatcggtcagcggcgacgacccgcggctga

SEQ ID NO: 323666 - DNA, 519 bp, Pseudomonas aeruginosa
atggcaacccccgcctatatgtccatcaccggcaccaagcagggcctgatcaccgccggcgccttcaccgaggactcggtcggcaacacctaccaggaaggccacgaggaccaggtgatggtccagggcttcaaccacgaagtgatcatcccgcgcgacccgcagtccggccagccgaccggccagcgcgtgcacaagccggtggtcatcaccaaggtcttcgacaaggcctcgccgctgctgctggccgccctgacctccggcgagcgcctgaccaaggtcgagatccagtggtaccgcacctccgccgccggcacccaggagcactactacaccaccgtcctggaagacgcgatcatcgtcgacatcaaggactacatgcacaactgtcaggacccgggcaacgcccacttcacccacctggaagacgtgcacttcacctaccgcaagatcacctggacccacgaagtctccggcacctccggctccgacgactggcgctcgccggtggcagggtga

SEQ ID NO: 323667 - DNA, 681 bp, Pseudomonas aeruginosa
atgcatgtactgctcaccgaagacgacgacctgatcgccagcggcatcgtcgccggcctcaacgcccagggcctgaccgtggaccgggtggccagcgccgccgatacccaggcgctgctccaggtggcgcgcttcgacgtgctggtcctcgatctcggcctgcccgacgaggacggcctgcgcctgctgcagcgcctgcgccagcagggcgtcgacctgccggtgctggtgctgaccgcgcgcgacgcggtgaccgaccgggtcgccgggctgcaggccggcgccgacgactacctgctcaagcccttcgacctgcgcgaactcggcgcccgcctgcataccttgcagcggcgctccgccgggcgttgcgtcaacgtcatcgaacacggccgcctcagctacgatccgagcacccgcgaaacctggctcgacggccgccccgtggaactgtcgcgacgcgaacaggcgctgttgcaggcattgctcaacaaccgcgggcggatcctcagcggcgagcagctcaaggacagcgtctatggcttcggcgacgaggtcgagagcaacgccctcaacgtccacatccatcacctgcggcgcaagctcggcaacgccatcgtgcagaccgtgcgcggcctcggctaccgcctcgggccggcgcgcggcgacggagacgacgcatga

SEQ ID NO: 323668 - DNA, 621 bp, Pseudomonas aeruginosa
gtggccggcgtcgtgcatggctacccgggcggcgtcctcggcgctgcattgcacgccgtcgtcgaacgacaggctgccttccacccgcgccagcagcaacagctggtccagcgtccggtgcagacggtcggcgccttcctcggcgtgggccagggcctgctcggcggcggcgccctcggtcatgcgcgcgacctgcaggtgggtcttgatcgcggtcagcgggctgcgcagctcgtgggcggcatcgccggtcaggcgtcgctcgcgttcgatggcctgggcgatgcgctggaacaactggttctgggtttccaccagcggcttcagttcgcgaatccgcttgagcggcgccagaccctggccggcgccgagccagagcagggccaggctgccgagcagggcgaccgtcaccggcaccgcggcggccaccaccaccgagcgttgcagcacgtcgcgctcttccaggcggtcggcggtgctgacccgcagatcgccggcctgcacggtgaagctgcgccacagcacgccgttgatttcctggtcgcggaagccgctggcggtgctgtccagcgcccgctccggggtggcatggctctgcgccaggacttcgccgcgcagtga

SEQ ID NO: 323669 - DNA, 1446 bp, Pseudomonas aeruginosa
atgatcccagtaatcctttccggtggcagcggctcgcgactctggcctctttcccgcaagcagtaccccaagcagttcctcgccctcaccggcgacgacaccctgttccagcagaccatcaagcgcctggccttcgacggcatgcaggcaccgctgctggtgtgcaacaaggagcaccgcttcatcgtccaggaacagctggaggcacagaacctggcgagccaggcgatcctcctcgaacccttcggccgcaacacggcgccggcggtggccatcgccgcgatgaaactggtcgccgaaggccgcgacgaactgctgctgatccttcccgccgaccacgtgatcgaggaccagcgcgccttccagcaggccctggcgctggccaccaacgccgccgaaaagggcgagatggtgctcttcggcattcccgccagccgccccgagaccggctacggctacatccgcgcgagcgccgatgcgcaactgccggaaggcgtcagccgggtgcagagcttcgtcgagaagcccgacgaagcccgcgcccgcgagttcgtcgccgccggcggctactactggaacagcggcatgttcctgttccgcgccagccgctacctggaagaactgaagaagcacgacgccgacatctacgacacctgcctgctggccctggagcgcagccagcacgacggcgacctggtgaacatcgacgccgccaccttcgaatgctgcccggacaactccatcgactacgcggtgatggagaagacctcacgcgcctgcgtggtgccgctgtccgccggctggaacgatgtcggcagctggtcgtcgatctgggacgtgcacgccaaggacgccaacggcaacgtcaccaagggcgacgtgctggtccacgacagccacaactgcctggtgcacggcaacggcaagctggtctcggtgatcggcctggaggacatcgtggtggtggaaaccaaggacgccatgatgatcgcccacaaggaccgggtgcaggacgtcaagcacgtggtcaaggacctcgacgcccaaggccgcagcgagacccagaaccactgcgaggtctaccgtccgtggggctcctacgactcggtggacatgggcggccgcttccaggtcaagcacatcaccgtgaagcccggcgcgcgcctctcgctgcagatgcaccaccaccgcgccgagcactggatcatggtttccgggaccgcccaggtgacctgcgacgacaagaccttcctgctcaccgagaaccagtcgacctacatcccgatcgcctccgtgcaccgcctggccaaccccggcaagatcccgctggagatcatcgaggtgcagtccggcagctacctcggcgaggacgacatcgagcgcctggaagacgtctacgggcgcaccgcagaaccggccctgcaagtggtcgccggcagccgctga

SEQ ID NO: 323670 - DNA, 666 bp, Pseudomonas aeruginosa
atgcagcccacctcgtccacccgcaagccccgcgccagcagccaggcccggatcgccgcgatcctcgacgccgcccgcggcctgctcgccgacgaaggcatcggcggcctgaccatctatagcgtggccgaacgcgcggaaatgccgccatcgtcggtctaccacttcttccccagcgtgccggccctgctccaggggctgaccggcgaggtccacgccgccttccgcgcgtgcctcgaacagccggtggaccatgcaggcctgcgctgctggcgcgacctgtcgcggatcgtcgaggagcgcatgctggcggtctacgcccgcgacgcggcggcccgccaactgattctcgccagccacggcctggccgaagtcacccaggccgatcgccagcatgacgtgcaactcggccaggccatgcgcgccctgttcgagcggcatttcctgctgccaccgctgccgaccgatatcgagatcttcagcctggccatggagctaggcgatcgcgtctacgcattgtcggtccagcgtcacgggatcatcgacgcacgcctggcggaagaaggcatgcgggtgttcgacgcctacctggggctctacctgccgccgatcctggaaaagcgtagcgaaccattatccggatttatatccgatttaaatcgatag

SEQ ID NO: 323671 - DNA, 906 bp, Pseudomonas aeruginosa
atgggccagcaccacggcatcgcgtaccccggccagaccggcgagcgccgcttcgatctcgcccagttcgatacggaagccgcgaaccttcacctggtggtcgatacgcccgatgtactcgatattgccatccgcctggaaccgtgccaggtcgccggtacggtacagccgctcgccggcgccgccggggaacgggttcggcacgaagcgggtggcactcaacccgggccgcctcaggtagccgcgcgccagaccggcgcgaccgatgtacagctcgcccaccgcgccgcgcggcaccgggttcaggtcacggtcgaggatgtaccaggacaggtccgggatggtcccgccgatcggactgaccaggccaccctccaggtcggcttcgctcaccggacggtaggttacgtgcaccgtggtctcggtgatgccgtacatgttcaccagttgcggctggcgatcgccgaagcgctggaaccacggccgcaggctctgcagatccagcgcctcgccaccgaagatcacgtagcgcagcgccggctgctgcgtcgccatgtcggcggaacaggccatcgccatcagttgcttgaacgccgacggcgtctggttgagcaccgtcacgccttcgcggcacagcagacggtagaagtcttccggcgaacggctcacccattgcggcacgatcaccaggcgcccgccatagagcagcgcgccgaagatttcccagaccgagaaatcgaaggcgtaggaatggaacaacgtccacacgtcccgctcgtcgaagccgaaccaggcctcggtggcgctgaacaggcgcagcgcgttgcggtgggtgagcaacgtgcccttgggcttgccggtcgagcccgaggtatagatcacgtaggccaggttgtccgccgatag

SEQ ID NO: 323672 - DNA, 423 bp, Pseudomonas aeruginosa
ttggccccggcctccgcggtgccgctgatggtcgtgccgttgctcggatcgatcaccggcgccggcggcgccaccgcgtccaccgtggtggcggcctgcgggccggtattgccggtcgggtcggtggccgtggcgacgatcaccgtgccgttggccagcggggtgcccggcgtgaagctccagttgccgctgccgtcggcggtgacctgccctatcgggttgccgccggcatcggtgagggtcaccgtggcaccggcctcggcggtgccgctgatgacgacgccgttgctcgggttgatcaccggcgccggcggcgcgctggaatcgacggtcaccgtcgccggcgggctgctgttaccggcggcgtcctgggccaccacgttgaccacagtaccgttggcgatcggcgtggacggggtgtag

SEQ ID NO: 323673 - DNA, 1491 bp, Pseudomonas aeruginosa
atgtcgcaagcgaatgagttgttgatcggcgctggccccgatggccagccggtaggacaggcctggcgcctggccaaccgtcatggattgatcgccggcgccaccggtaccggcaagacggtgaccttgcagcacctcgccgaatccttcagcgatgccggtgtcgcggtgttcgccgccgacatcaagggcgacctgtgcggcatcgccgcgccgggcaacccgcagggcaaggtcgccgaacgtatcgccagcatgccgtggctgaactaccagccgaaggcctacccgaccacgctctgggacatcgccgggaagaccggccacccgttgcgcaccaccatcagcgagatgggcccgctgctgctggccaacctcctggagttgaccgatagccagcaggccgcgctgttcgccgccttccaggtggccgaccgggaaggcctgctgctgctcgacctgaaggacctgaaggcgctgctcaaccatctgaaggacaatccggaaatccttggcgaggaccgggcgctgttcactggcgcttccgggcaggcgctgctgcgccgcctggccactctggagcagcagggcgccgaggccttcttcggcgagcctgccctgcaactggaagacatcctccgccccgagccggacgggcgcgggcgcatccacctgctcgacgccagccgcctggtgcacgaggcgccgaaggtctacgcgactttcctgctctggctgttggccgagctgttcgagcaactgccggagcgcggcgatgccgacaagccggtgctggcactgttcttcgacgaggcccacctgctgttcaacggcacgccgaaagccttgcgcgaccgcctggaacaggtggtccggctgatccgctcgaaaggcgtcggggtgtacttcgtcacccagtcgccgggcgacctgccggacgatgtcctggcccagctcggcctgcgtatccagcatggcctgcgcgccttcaccgccaaggagcagaaatcgctgcgcgcggtggccgacggtttccgcccgaacccggcgttcgacaccctgggggtgctgaccgaactgggtatcggcgaggcgttggtcggcaccctggaggaaaagggcacgccggccatggtccagcgcgtcgcggtggcgccgccctattcgcggatcggcccgctgagcgacagcgagcgcgctgaactggtccagcggtcgccgttgaaggggcgctacgaccagccgatcgatcgcgagtcggcctacgaggtgctggcgagcaaggcggacgccaagccggaggtgcagggccaggcgcctgcacagcaggaaagcgcgtccggcgtcggcggcatggccgggcagattctcggcagcctgctgtccaattcgacggtgaagagcgccatgcgccaggcggccaaccagttgagccgggagctggtgcgcggcctgctcggctcgttgatgggcgggaagaagcggcgctga

SEQ ID NO: 323674 - DNA, 756 bp, Pseudomonas aeruginosa; identical to SEQ ID NO: 323427

SEQ ID NO: 323675 - DNA, 726 bp, Pseudomonas aeruginosa
atgcaccatcgcgtcgataccggtcgccgcggtgaccgccggcggcaagccgagggtcaggtcggcgtcgagcagcgccaggtcgggcagcaagtggggcgagaccacgcccatcttggtggtctcgccggtggtgacgatggcgatcggcgtcacctcggagccggtcccggcggtggtcggcacctggatcagcggcaggcgcggcccgcgtgcgttgccgaccccgaagacctcgccgagcccctgccctgcttctgggtgggcgagcagcgcgaccagcttggctacgtccatggagctgccgccgccgaaaccgaccaccagctcggcagccatgccccgcgcccgcccgagcgcggcctcgaccaccgactcgggcggatcggcgagcacctggtcgtacacctcgacggccaggcccaggcgcgggaagccgggcaggatcgcatccagcaagccgagccgggtgatccccggatcggtcacgatcaacacgcggcgcgcccttcgctcgcggcagagttccgccaggcggatggcggagccggcctcgcagaggatctgcgcggtagtggcgaaactgaaagcttgcatatcggtctccttgggcgagacgcccgtcagaacgagaaatgctcctcgggcagggccatcaggcagtcggcgccaccgagcaaggcttcgcggtgcatgctcgcccgcggcaggatacgccgcaggtag

SEQ ID NO: 323676 - DNA, 324 bp, Pseudomonas aeruginosa
atgttctccgccgcgcacttgaggatgtgcgagccgaccggggtggaaccggtgaaggcgatcttggcgatgcgcttgctggtggccagggcctcgccggcctccctgccgaagccctggacgacgttgagcacgcccggcggcagcaggtcgccgatgaattccagcagcacgcagatgcccagcggggtctgctcggccggcttgagcaccacgcagttgccggcggccagcgccggggccagcttccaggcggccatcagcagcgggaagttccacgggatgatctgcccgaccacgcccagcggctcatggatgtggtag

SEQ ID NO: 323677 - DNA, 252 bp, Pseudomonas aeruginosa
atggaaggctctgtatcggttcaagtgtgcaagacctgggtccagaacgcggacggcacggttggctgtacgcaccttgagtggatacagacctacctgctgccgcctgaggcagagggctatttgactctgctgatgggtggtttcgacccgtcggccttccgcctcggcttcgccgggaccatcgggctgttcgccgttggtttgggggctggcttgatcatttccgccatgcgcaaagcgcgcaattaa

SEQ ID NO: 323678 - DNA, 219 bp, Pseudomonas aeruginosa
atggaaaaaatgaaaaccctgttccgcaacgcctccatcgccaccgtcggcctggccgtggccaacgtctccttcgccgaatcgctgctcgacgaaaccaccaagggggttctggcgcaagccagcactgatggcgggtccgtggccaagttggtgatcgccgccgtggcggtgctggtcggcctcgccctggtcatcggcgcgatgcgcaaggcctga

SEQ ID NO: 323679 - DNA, 657 bp, Pseudomonas aeruginosa
atgtccgataccgatgtccgtggcctgcaggatcttcccctggaagaactggttgcttgccatgagtgtgatctgttgatgcgccgggaacccctgggaccgggcgagaaagccaattgtccgcgctgcggtttcgagttggccgcgcatcgccatcaatggaaacgccgttgcttcgcgctggttctgacggcgctatttctctatatcccagccaatttcctgccgatcatgaatctcagcctgctcggccagacccgcagcgatacggtctggacgggagtgctcggtctttacgacagtggcatgcagggcgtcgccatcctggtattcctgtgcagcatggtgatcccgttggtcaagttgctctgccagttgctggtgatgatcagcgtgcgtttcggtatcgcccgtcacatcggcatgctgctctaccgcggccatcaccatctgcgcgagtgggggatgctcgaggtctacctcatgggtatcctggtttccatcgtcaagctgatcgacatggccgacctcagcctgggcatcggcctggcctgtttcgtggcgctgctgttcacccaggtctggctggaggtcaccatgtcgccgcaccaggtatgggaagcgctgggcggcgaggacgacgatgcgcgcgcttga

SEQ ID NO: 323680 - DNA, 1083 bp, Pseudomonas aeruginosa
atggatacgctcgacgaactggttgaaggcatcgccgagcactccgaattcatcgcggctggtcacggcgaggcgcttggtcaggtcgccctcgccctgggcgatgtcctgcatggcacggcccatcaggtgcagcggctgcatcagcaggcggatcagcaggccgagcaggaccaggatggcgacgatggagatcagcgcggcggcgatggccgagacgcggaacttgctgagcatggcgtaggccttgtccttgtcgatggacagcgccaggtaccaggtcaccgaaggcaggcccttgataggggtaaaggcgaggatgcgggtatgcccgtgcaattcggcctcgctgaaaccggtggcgatcttcggcgtgttctgcgggtagacctcgctcagggtcttcatcacctgctctttgtccgggtgcaccaggatcttgccgtcgccgctgaccaggaaggcgtagcccatgccgctgaagtccagcgaattgatgatctgcaccagggtcttcaggctgaggtcgccgcctaccacgccgagggtgttgccagcggccttcaccggtgtcgccgcggtgatgatcaattcctgggtggcggcgtcgacgtagggttcggtcagggtcaggccgccggccgccacggcgtccttgtaccagggccggctgcgcggatcgtagccggccggcatcgggctgtccggacgcatgatgaagacgccgtcctgctggccgaggtaggtgaagctgaaggtcgaggtcagggccggctgttcgagcagggcgctgacggtttccgggctgtggtcgcgggccagggtctgggcggtctgctcgaccagcagcagacggccgccgagccagttctgaatgttgctggaagtcacgtcacccatttcccgcaggtagctttcgaggtcctcgcggatcgcgttgcgctgcaggtaatcgttgtagagggtgaacagtgcgaaagcggcgaacaccacgagggaggccgcgaggaggatcttgtggctgaacttcagacttttgatcatgttgtattgcgtccaggagtatgtagcgccagtctttga

SEQ ID NO: 323681 - DNA, 435 bp, Pseudomonas aeruginosa
atgaacatgtttgcaacccaaggcggcgtcgtcgaactgtgggtcaccaagaccgacacctatacctcgaccaagaccggggaaatctacgcctcggtccaatccatcgccccgatcccggaaggcgcccgtggcaacgccaagggattcgagatcagcgaatacaacatcgagccgaccctgctggacgccatcgtcttcgaaggtcagccggtgctctgcaagttcgccagcgtggtccgcccgacccaagaccgtttcggccggatcaccaatacccaagtccttgtggatctgctggccgtgggcggcaagccgatggcgccgaccgcccaagccccggcccgcccgcaagcacagtcccaagccccgcgcccggcccagcagccgcagggccaggacaaacaagacaagtccccggacgccaaggcgtaa

SEQ ID NO: 323682 - DNA, 975 bp, Pseudomonas aeruginosa
atgaacttcgacggcgctaccggttggctggtgggcgaggtcaacaagggcctggcggcgatgttcaccatgatgaactacgagcgccttggcgtcggcatccagggcctggccactggcgagcgctcctaccagagcgccatcgaatatgcccgcgagcgtatccagagccgcgcgccgaccggcccggtggccaaggacaaggccgccgacccgatcatcgtgcaccccgacgtgcgtcgcatgctgctcaccatgaaggcgctgaacgaaggcggccgcgccttctccagctacgtcgcgatgcagctggacaccgccaagtacagcgaagacgcggtcacccgcaagcgcgcggaagagctggtggcgctgctgaccccggtggccaaggcattcctcaccgacatggggctggaaaccaccatccatggccagcagatcttcggcggccacggcttcatccgcgaatggggccaggagcaactggtgcgcgactgtcgcatcacgcagatctacgaaggcaccaatggcatccaggcgctcgacctggtggggcgcaaggtgatcggcagcggcggcgccttctcccgtcacttcaccgacgagatcaaggccttcgtcgcttccgccgacgaggccctgggcgagttcagcaagccgctggcggccgccgtggagaacctggaagagctgaccgcctggctgctcgaccgcgccaagggcaatcccaacgagatcggcgcggcgtcggtcgaatacctgcatgtgttcggctacaccgcctatgcctacatgtgggcattgatggcgcgcaccgcgctggccaagcagggcgaggacgacttctacgccagcaagctgggtaccgcgcgcttctacttcgcccgcctgctgccgcgcatccattccctgagcgcctccgtgcgcgccggcagcgagtcgctgtacctgctggacgccgagcagttctga

SEQ ID NO: 323683 - DNA, 264 bp, Pseudomonas aeruginosa
ttgcaacaggtcgggctcgacgacaatttcttcgaactcggcggccactcgttgctggccacccaggtcattggccgcctacgcgaacgactgcacctggaggtgccgatcaagtcgatgttcaccgcggagacactgggtgagttctgccacggcgtcgagaccctcaaggccgagagcgcgccggtggaagatgccctggctaaatccctggaggcgctcaaacgtctatctgccgatgaacttgaaaaactgatttcctaa

SEQ ID NO: 323684 - DNA, 228 bp, Pseudomonas aeruginosa
atgctggaccagcaccagcacatggtcgtcctcggccagccgcaacaggctcacccgcagcagcggcccacgctccaggtcgaacggccgcgcgatcgtcgtctcgacctgccgagcgagggcgccctcctcgagcggccccaacgcgacgatatccaacggcaatgccatggatgcggcgatctcctggcgcgcctcgtcgccgtcgaggcgaaaacgggtgcgtag

SEQ ID NO: 323685 - DNA, 183 bp, Pseudomonas aeruginosa
atgcgccgcctggcgtcgcgcggcggcgaggatcgcctggtccagcgccggcgccggctgctgcggcgcgtgggcgcggaaatgagccagcatctgctcttcggcgacgctcgcggaatgcttctgtgggttcataccgccacctcctcggccagcagccggcgcagcttctgcaccgcgtag

SEQ ID NO: 323686 - DNA, 135 bp, Pseudomonas aeruginosa
atgcgcgcccacggcgaactggaactggccgagatcgccacgctcacccagtcgccgctggagacggtgaagagccgtttccgctacgcggtgcagaagctgcgccggctgctggccgaggaggtggcggtatga

SEQ ID NO: 323687 - DNA, 768 bp, Pseudomonas aeruginosa
atggatgccctcctcgcagcacaggcgctggacgaactgcaggtcgctctcgtcgtactgcacgcagtattcgcgctcggggtagcgggtgccgagctggaagcggtaggcgtcggcgaggatgccgtgttcctccagcacccggccgacgatctgcggcaccgtgaggtgctggaagatgcgctggttggtgcgctgggcgaggtaggccagttgcgggacgagggtgatgcggtagcgggtcaggcgcttgcccgagtcgccctgtccggcgctgcgcaccaggccgtggataccgttgccggcgggcccgagggtaaggaaggcgggtttgtgcagcaggctttcgaggtccggcacggggcgttcgccgaccagctccaggtcgaaggcgaacggctggctgatggcttcgcggccgctgaaggagagcacctgcaggtcgagggcgaggccgtcgatggcgaggctgaaatgggtctggttggctgctgcgaacatccgttgtccctcactggcgcaggcgaccgattcgattgtcctgcctggcgcgggcgagacaagggcgcgcaggctcgatcggaagctgcctacaacaaacaaagcggcatcgacccggcgcgggctttcctggccacggcgctatgggtcatcgagggcacgacggccagcgaggctggccgcgtgcggcggtcgcggctcagccggcgaccggggagcgccagtcgtcggagccggaggtgccggagacttcgtgggtccaggtga

SEQ ID NO: 323688 - DNA, 204 bp, Pseudomonas aeruginosa
gtgcaggtgaacctcgaggccgagcgcctcaaccgcgacgcccgccagcgcatcctcgccagtggcgccagcgagatccataccctgagcccgcagcagcgcgccgactggcgccaggcgatgcagccggtatggcagaaattccgcggcaatgtcggtgccgatctgctccaggccgccgaagcttccaaccgtcccgattga

SEQ ID NO: 323689 - DNA, 204 bp, Pseudomonas aeruginosa
gtggaggtgaacaagcaggccgaggcgctcaaccagggcgacaagcagcgcatcgtcgaggccaagaccagcgagatcatcgaactcactcccgaacagcgggccgaatggcgcaaggccatgcagccggtgtggaagaagttcgaaggcgagatcggcgccgacctgatcaaggccgccgaagccgccaaccaggcccaataa

SEQ ID NO: 323690 - DNA, 291 bp, Pseudomonas aeruginosa
gtggtgctggaccagcaccagcacatggtcgtcctcggccagttgcaacaggttcacccgcagcagcggcccccgttccaggtcgaatggctgcacaacgatggcctgtatccgttcgatcaggccttcttcaccgaactgttcccgctcgatggaaacgctaaccgcaggttgtacctgctggtacgaacgccctccctccagccggaagcgggtacgcaaggtttcatgccgcgcgaccaggctgtcgaagctgcgttgcaaggcatccacgtccagccgcccgcgtag

SEQ ID NO: 323691 - DNA, 267 bp, Pseudomonas aeruginosa
ttgaagtgctttcccgattgggagtggtacaacataaatatattcggaaccgacgaccccaatcatttctgggtcgaatgcgacggtcacggcaagattcttttccccggatatcccgaaggttattacgaaaatcacttcctgcattccttcgaacttgaagacggcaagatcaagcgcaaccgcgaattcatgaacgtcttccaacaattgcgcgccttgagcattccggtcccggaaataaaacgcgaaggcattcccacttga

SEQ ID NO: 323692 - DNA, 759 bp, Pseudomonas aeruginosa
atgggcgatggccgccagttgcgcggtgggcacgctggcggtgaagccctggacgctgtagttgctggtatgcacgcgcatcagcaggccgctgcgcgggccgatggcggcttcgtagtccctggcgtgggtgcggttggtggtgcccacctcgtgcaagcgcacgccggcgcgggccatgatgtcgggaatgcggaaggcaccgccgatctcgatcagctcgccgcgcgagatgatcccttccttgcgcgcccccaggctgttcagcgccagcagcaccgccgccgcgttgttgttgaccacggtgactgcctcggcgccggtgagttcgcggatcagcccggcgatcaggtcgtcgcggtcgccgcgcttgccgctggccaggtcgaactccaggttcagcgggtagcgcgcggccagggtgatcgcctcgacggcctcgtccggcagcagggcgcggccgaggttggtatgcaacaccgtgccggtcaggttgaacacccgccgcacgcggctggcatgctgcgcggcgaggcgttcgccggcgcgcccggcgagcaccgcctcgctcagttcgatctcggcgagggcaccgcgtcgggccggctcgcgcagttcgtcgagcaggtcgcggagggtcgccagcaacgcctcgcggccgtagcgctggtgcaggggagcggccgccgcgctgcgcagcaggcggtcgaccgaaggcaagcgaacggaactcatggagaaaccttatccacagggtag

SEQ ID NO: 323693 - DNA, 1080 bp, Pseudomonas aeruginosa
ttgaaccagccactcaccgtcaccctcgcccgccgggccggcggccgcgtcaccgctatcgcgctcggcgcagccttcgccacgctgctggccatgccgctgctgcacctgctgccggcggacagcgcgctgcacctctcggcctacagcctgaccctgaccggcaagatcctctgctacgccatcgtcgccctcgccctcgacctggtctggggctacgccggcctgctgtccctcggccacgggctgttcttcgccctcggcggctacgccatgggcatgtacctgatgcgccaggcctccggcgacagcctgccggcgttcatgaccttcctttcctggaacgaactgccctggtactgggccggcacccagcacttcctctgggcgctgtgcctggtggtgctggtgcccggcgcgctggccttcgccttcggctacttcgccttccgctcgcggatccgcggcgtgtacttctcgatcatgacccaggccctgaccttcgccggcatgctgctgttcttccgcaacgagaccggtttcggcggcaataacggcttcaccgacttccgcagcatcctcggcttcccgatcaccgcgccgggcacccgcgccgccctgttcctcgccaccgtcgcgctgctcgcggccagcctgctgctcggctggcgcctggcgcgaagcaagttcggccgggtcctcaccgcgctgcgcgacgccgagaaccgcctgatgttctgcggctacgacccgcgcggctacaagctcttcgtctggaccctgagcgcggtgctctgcggcctcgccggcgcgctgttcgtgccgcaggtggggatcatcaaccccagcgagatgtcgccgaccaactccatcgaggccgccgtctgggtcgccctcggcggacgcggcaccctgctcggcccgctgctcggcgccggcgtggtgaacggcgcgaagagctggttcaccgtggccttcccggaatactggctgttcttcctcggcgcgctgttcatcgtcgtcaccctgtacctgccgcgcggcctgctcggcctgctgcgcaaggagaaggagcaatga

SEQ ID NO: 323694 - DNA, 1203 bp, Pseudomonas aeruginosa
atggcttggaacgagccgggtgacaactcgaacaacaacgatcgagacccgtggggaggccgccgcggtggtggtggcggcggtggtgaccgcaaggggccgcccgacctggatgaggctttccgcaagcttcaggacagcctgaacgggctgttcggtggaaaaaaacgcagtggcaacggttccggctccggttccggcggcaagggcggtggcctgggcctgttcggcatcggcctggcgatcctcgccgtgctctggctgtacaacgccatctatgtggtggacgagcaggagcaggcggtcatcctgcgcttcggcaagtattacgagacggtcggtcccggcctgaacttctacttcccgccgatcgacaagcgcttccaggagaacgtcacccgcgagcgtgcgtacagcaagcaggggcagatgctcaccgaggacgagaacatcgtcgaagtgccgctgaccgtgcagtacaagatcagcaacctgcaggacttcgtgctcaacgtcgaccagcccgaggtcagcctgcagcaggcgaccgagagcgcgctgcggcatgtcgccggctccaccaccatggaccggatcctcaccgaaggtcgcgagcagatggcgaccgaggtgcgcgagcgcctgcaacgcttcctggatacctacaggaccggtatcaccgtgacccaggtgaacatccagagcgcccaggcaccgcgtgaggtgcaggaagcgttcgacgacgtgatccgggcccgcgaggacgagcagcgcgagaagaaccaggccgaagcctatgccaacggcgtggtgccggaggcacgtggccaggcccagcgcatcatcgaagaagccaacggttaccgcgacgaggtgatttcgcgcgcccagggcgaggcggatcgcttctccaagctgctggtggaatatcgcaaggctccggaagtgacgcgcgagcgtctgtacctggacaccatgcaggaagtcttcagccagaccagcaaggtgctggtgaccggtcagcaggggcagaacaacctgctctacctgccgctggacaagatgatcgatggtcgtaacgccgcgcccgctacgggggccggtgcttccgccggtggtggcagcgccagcgcttccgacctggggtcgcggatcgtcaacgatctgcgccagcaagacgcgcgtacgagggagagccgctga

SEQ ID NO: 323695 - DNA, 1260 bp, Pseudomonas aeruginosa
gtgcatctggaagggcagaaccccgaggcgcgtgaagacccgcaggagttccaggagctggtgcgttcggccggcgcggaaacggtggcattcgtcagcgtctcccgccaccagccgagcgccaaatatcttatcggcagtggcaaggtcgaggagttgcacgacctggtcaaggccgaaaacgtcgagctggtgattttcaaccacaccttgacgcccagccaggagcgcaacctcgagcgtgcgttcgagtgccgcgtactcgatcggaccgggctgatcctcgacatcttcgcccagcgcgcacgtacccacgaaggcaagttgcaggtggaactggcgcaactggagcacatgagcacgcggctggtacgcggctggacccacctcgaacggcagaaaggcggtatcggtctgcgcggtccgggcgagacccagctggaaaccgaccgacgcctgctgcgcgtgcgcatccgccagatcaagcagcgcctggagaaggtccgcagccagcgcgagcaggctcgacgcgggcgcaagcgcgcggatatcccggcggtctccctggtcggctataccaacgccggcaaatcgaccctgttcaatgcgctcaccgcctccgaggtgtatgccgccaaccagttgttcgccaccctcgaccccaccctgcgtcgcctgcaactggacgatctcgggccggtggtgctggccgacacggtgggcttcatccgccacctgccgcacaagctggtggaggccttccgcgctacgctggaagagtcgagcaacgccgacctcctgctgcacgtgatcgacgcctacgagcccgaacgggatgcgcaggtcgagcaggtgctggcggtgctcggcgagatcggcgccaacgaattgccgatgctcgaggtctataacaaggttgacctgctaccctcggtcgagccgcacatccagcgcgacgactccggcaagccggtgcgcgtctggctgtcggcgcagactggcgaaggcctcgacctgttgcgccaggccatcgccgagctgcttggcgaggacctgttcgtcggaaccttgcgcctgccccagcggctcgggcgcctgcgcgcccagttgttcgaactgggcgcggtgcagtccgaggcgcacgatgaggagggttgtaccctgctgcaggtgcgcctgccgcgggccgagttgaaccgcctggcgagccgcgctggctggcagccggcggagttcgttgcgcaacacactttgcaataa

SEQ ID NO: 323696 - DNA, 1509 bp, Pseudomonas aeruginosa
atgaccatgaccttccagcacgacgacctgccactcgccctctattccgccgcccaggtgcgcgacctcgatgcgcgcctgatcgccgccggcacgccgggcttcgaactcatgcagcgcgccgcccacgccgcctggcgtgccttgcgccgccgttggccggaggccgcggcgctgacggtgctcgccgggcacggcaacaatgccggcgacggctacctgatcgcggcgctggcgcaacgtgcgggttggcgagtgcgggtgctggcggtcgcggcgccgcagcggcttgccggcgacgcggcgcaggcgcatgccgccgcgctggcgaccggggtcgtggtggagccctggagtgagtgcgccgtgctcgagggcgtagtagtggatgcattgctcggcaccggcctggcaggtgccgtgcgcgagccctttgcgcaggccatccgcttggccaacgccgccgacctgccggtgctggcggtggatattccttccggcttgagcgccgacaccggtgcggtattgggggaagcgatcagggcggatctgacagtgactttcatcggcctgaagatcgggctgttcactggcgaggcgccggcacgggtcggcgagctggtgttcgacgaactcggcagcgacgccgtcgtgttgcaagggctccagccccgggcccaccgtttggcacgaaatgccctgccgagtctggcagcgcggccgcggaccgcgcacaaggggctgttcggccacctgctggtggtcggcggcgacaccggcatgggcggggccgtgctactggccgcggaaagcgccctgcgctgcggcgccgggctggtctcggcggcgacccgcgtcgaacatgtgccggcgttgctgagccgttgtcccgaggtcatggcccatggcgtggcgtcggcgaaccaactgctggcccttgccgaacgcgccagcgtgctggtgctcggtcccggtcttggccagcgcgcctgggggcgtagcctgctgagcgctgtccggtcgcgaccgttgccgcaggtctgggatgccgacgcgttgaacctgctggccctggaaccggtcggagcagggccgcggacatggattctgacgccgcatcccggcgaggccgcgcgcctgttgggtcgctcgaccgccgaggtgcaggcggatcgcccggcggcggcgctggaactggcgtgtcgctaccaggcggtggtggtgctgaagggcgccggcagcctggtcgccgcgccggacggacgacttgccgtctgttcccaggggcatccggcgatggctggtgccggcatgggtgacgtgctgtcgggcatcaccggtgccttgctggcccagcacgtggaggcgttcgaggcggcctgcctggcggtctggctgcatgccgccgccggtgagcggctcggcgcccaggggcgtggactggcggcgaccgatctcatacctaccgttcgtcagttgctcgaggagtgcagtccgtgtctgaagtga

SEQ ID NO: 323697 - DNA, 909 bp, Pseudomonas aeruginosa
atgaagctccgccatatcgaagtgttccaggcgatccgccaggctggctcggtcagcggcgccgcacagttgctgcatgtgtcccaaccggcggtgagcaaggtcctgcagcacgccgagcagcaactgggcttcccgctgttcttgcgagtgcgcggcaagctgctggcgactccggaagcgctggaactggagcgcgaagtggccaagctcagcgatagcctgcaggcggtgcggcgcctggcgcagaacctgcggcgccagccgggccacagcctgcgcatcggcgccaccccggccctggcgctgtcgctgctgccgcgggcgatcggcgaatggagcgcgcgctatccgcagagcggctgcgaactggccaccttgcattcgcgcgagctggtgcagggcctgctgatgcgcgaactggacctggccctgagcctgaagcagccggaacaccccggcctgcgcggcgaagccatcgccagcggcgtattggtggccctggcgccgcgcgaacactggcccgaagcggaacgccggcagccgctgagcctggccgggctggccggcgaagcgctgatcgggctgtccaccgccgacccgctgttcgcccgcctggaggattacctcagcgccgtggagccaccgccgcaggtgaagatcgccgtgcagacctacgccctcgcccgcgccctggtggaggctggggcgggcctggcgctggtcgatcccttcaccgccctcggcgccgacccgcacagcaccgcgatccgcccattaagcccggccttcccggtcaccctctacgccatcacccgcgccgacgaaaccccgccgcacaccctcgctccgctgctgcggatgctcgcccgccaggccgaggagcgtttgcgggccgtgcagatgtag

SEQ ID NO: 323698 - DNA, 879 bp, Pseudomonas aeruginosa
atgcggctgatggctattggactttgggccgtgctgtgtcttgcagccgtccccgtgatggccaacagcaaatcgtttgtctgcgttaatgaaaaaggccatctgccgccgttggattcgcaagccgatgtctggtaccgcgaagcagccgccttggccaagcccgatactctgcggccctggggccgtatcgtcgagctttacagcaaggcagtggagcgtggccactggaaggccatgcataacttggcgaacctctatcgtaccggttggccgggaggtgtggagaaggacactcagaaagctctagacctttaccagaaaatgatcgatctgaagattcctcaaggtttctataatatgggggcaatgatcggtaatcgtgccggggtcaagaatcctgcaactgacggacttacttttcttgataaggctgctagcctaggaaatccgccggcgctaaccgaactaggtaagctttatatatatgtggccaaaaaaaaggatttggggttggcgtatactcactgtgctgctagccagggctatgcgccggctaattatgagttgggagcgtattacaagatagtggagcacaatttcccaaaggcactggtttattatcaggcgtcagtctctcaggggggcaagagcgcggcttttttcctatcacgagtcttcggaagtgagactcctcctgcaagtgcaatgtggtacgcccccgacgaaaagttgcaagaagcgtattattcaatctacaaaaagcttgaggccgaccctgacttacgtttcccccatctgatagaagaccatcctctgcctcctcaccccacccagggctacgacgcggaccacccagactggaagccggagcggtaa

SEQ ID NO: 323699 - DNA, 333 bp, Pseudomonas aeruginosa
atgcctatttcatcctcttccgcccgccgcgccgagccggctccgcggcccctggcggagttccatcccgtcgtccgccagtggttcgaacgccacttcgccgcgcccacgccggcgcaggtggaggcctggccggcgatccgcgaggggctttcgaccctggtcgccgcgcccaccggttcgggcaagaccctgaccgccttcctcgccgccatcgatgccttggtggtggaggggctggccgccggcggcgagttggcggatgccacccaggtggtctatgtctcgccgctgaaagcgctgtccaacgacatccgcatcaacctggagtaa

SEQ ID NO: 323700 - DNA, 330 bp, Pseudomonas aeruginosa
gtgatcaactacctctggttcgtcctcgcggcgttctgcgagatcgccggctgctacgctttctatctctggctgcggctgggcaagagcgccctgtgggtgctgcccggcctgctcagcctgaccctgttcgccttgctgctgacccgcgtggaggccagctacgccggccgcgcctatgccgcctatggcggcatctacgtcgccgcgtcgctgttctggctggctttcgtcgagcgctcgcggccgctatggagcgactggctgggcgtggccttgtgcgtggtcggtgccagcgtcgtgctgttcggcccgcgcctgtctcagtga

SEQ ID NO: 323701 - DNA, 1317 bp, Pseudomonas aeruginosa
atgatccgtaagcactcgctcggcttcgttgccagcgctctggctctggccgtatctgcccaggcgttcgccggcaccgtgaccaccgacggcgccgatatcgtgatcaagaccaagggcggcctcgaagtcgccaccaccgacaaggaattcagcttcaagctgggcggtcgcctgcaggccgactacagccgtttcgacggtttctataccaagaatggcaacaccgccgacgccgcctacttccgccgcgccttcatcgaactcggcggaaccgcatacaaggactggaaataccagatcaacttcgacctgtcgcacaacaccggcagctccgacaacggctatttcgacgaagcttcggtcacctacaccggcttcaacccggtcaacctgaagttcggtcgcttcgaccccgacttcggcctggaaaaggccaccagctccaagtgggtgaccgctcccgagcgtaacgccgcctacgaactggccgactggatcaacacccaccaggacggcatgggcgcccaggtcaactcgaccctcgccgacatggcctacctgtccgccggcgtatccgccaaggacgccgacgacagcgacggcgacagcgtcaagcagttcaacttccgcggcgtgttcgcgccgatgcacgaagccggcaatgttctgcatgtcggcgtgaactatgcctaccgcgacctcgacgacaccgccttcgactcgcgcatccgtccgcgcctgggcatgcgcggcatcgccaccagcggcggcaacgacgccggtgacaacggcaaccgcgcgaccttcggcggtgtctccaactcgccggccggttcctacaaggacgatagcgtctggggcctggaaggcgcctgggcaatgggcccgttctcggcccaggccgaatacctggcacgcaagctgaaggccgatgacaacgcctacaaggacatcaaggccaagggttactacgcgcaactggcctacaccctgaccggcgagtcccgccagtacaagctggaaggtgccaagttcgactccgtcaagccggaaaacaaggaaatcggcgcctgggaagtgttctaccgctacgacaacatcaaggtggaagacgacaacgtggtcgccgataccgccactcgcgaagtcggcgacaccaaggccaaggcccacaacctgggcgtgaactggtacgtcaacgatgcggtgaagatcagcgcggcctacgtcaaggcgaagaccgacaagatcaccaacaacaatggcgacgatgacggcgacggcttcgtgacccgtttgcagtacgtgttctaa

SEQ ID NO: 323702 - DNA, 735 bp, Pseudomonas aeruginosa
atgaaccacacgaccttgcaacggcgtttcgccgcacgtatccgcgatccgcagcaggccttgccgcccggcatcgcgacggagcgcatggcgatctacgaggaactgttcttcaacaacctggacggtttcatcagcagcggtttcccggtcctgcgccagttgttcgacgagccgcgctggcatcgcctggtgcgtgccttcatgcgcgagcatcgctgccgcacaccgtacttcagccaattgggcgaggagttcatcggctggctgcaggacggctaccgcgcggaggagggcgatccgcccttcctgctggagctggctcactacgagtgggtcgagctggccctgtcgctggccgaggcgcctgtcgagacgctgccgcaggcctggtcgtggtcgccactggcctggccgctggcctatcgctggccggtccatcgcctggggccgagccatcggccgatggagccgccggccgagccgacctgcctgctggtctggcgcgatccggcggagcgggtgcgcttcctgcacctgtcgccattcgcctatcgcctcgcgcagcgcctgagcgaggagggcgaggcgccggtggcgctgctgccgttgttgcgcgagttggccggaagctgcggcctgagcgccgacgtggagtatttcgaaaatgccttcgccttgctggaggactggcacgcccagggcatcctcatgggcgagggcgctctggagtga

SEQ ID NO: 323703 - DNA, 438 bp, Pseudomonas aeruginosa
atgagtctgcacggcgtttacgattcccagaacatcttcgccaagatcattcgcggcgaagctccctgctacaaggtctacgaagacgaggacgtgctcgccttcctcgatctgttcccgcagtcctacgggcataccctggtgattcccaagcacgccgaggcgcgcaacctgctcgagatcgatgcgcagaacctggccaaggtcatggccgtggtccagcgcctgacccgcgccctggtcgaggaggtgcagccggacggcgtgcagatcgcccagttcaatggcgcccccgccgggcagacggtcttccacatccatttccacgtcatcccgcgcttcagcggcgagaatctcggcatccatgcggcgaagcagggcgaccctgaagtgctcgcacaacttcaggagcgtttggcgcagcgtctgcaaggctga

SEQ ID NO: 323704 - DNA, 1431 bp, Pseudomonas aeruginosa
atgaccccaggttatcccctcgccctctctcttgccgtctccatggccgtgctcggcagcgccttgccggcccaggcgcgccaggacgatccgtcgctgttcaaccgccaggcccgtggcgaactcagcgagtacggcggcgcacggcgcgtcgagcaggacctgacccaggccctgaagcagtcgctgtcgaagaagaaggcgaagaacgtgatcctgctgatcggcgacggcatgggcgactccgagatcaccgtggcgcgcaactacgcgcgcggcgcgggcggctacttcaagggtatcgatgcgctgccgctgaccggccagtacacccactactccctgcacaaggacagcggcctgccggactacgtgaccgattccgccgcctccgccaccgcctggaccaccggggtcaagtcgtacaacggcgcgatcggcgtggatatccacgaacagccgcaccgcaacctgctggagctggccaagctcaacggcaaggccaccggcaacgtctccaccgccgagctgcaggacgccacccccgccgccctgctcgcccacgtcaccgctcgcaagtgctacggtcccgaggccaccagcaagcagtgcccgagcaatgccctggagaacggcggcgccggctcgatcaccgagcagtggctgaagacccgccctgacgtggttctcggcggcggcgccgcgaccttcgcggaaaccgccaaggctggccgctatgccggcaagaccctccgcgcccaggccgaagcccgcggctaccggatcgtcgagaacctcgacgagctgaaagccgtgcgccgcgccaaccagaagcagccgctgatcggcctgttcgcgccgggcaacatgccagtgcgctggctcggtccgaccgccacctaccacggcaacctgaaccagccggcggtgagctgcgaggcgaacccgaagcgcaccgccgacatcccgaccctggcgcaaatgaccagcaaggccatcgagctgctgaaggacaatccgaacggcttcttcctgcaggtcgagggcgcgtccatcgacaagcaggaccatgccgcgaatccgtgcggccagatcggcgagaccgtcgacctcgacgaagccgtgcagaaggccctggccttcgccaaggccgatggcgagaccctggtgatcgtcaccgccgaccacgcccactccagccagatcatcccgccggaaaccgccgcgccggggctgacccaactgctcacgaccaaggacggcgcgccgctggcgatcagctacggcaactccgaggaaggctcccaggagcacaccggcacccagctgcgcatcgccgcctacggcccgcaggcggccaatgtcaccggcctgaccgaccagaccgacctgttcttcaccatccgtcgcgcactgaacctgcgcgactga

SEQ ID NO: 323705 - DNA, 3981 bp, Pseudomonas aeruginosa
atgaccgaccagactccttcccttgaccaactcgtccggcgcctcgaccaggcccagatcagcgaccgccaccgcttgcgccggcagctccacgaactgcgcaagcagcccgacgacgcgcgcctggcgcagtgggtcgagcgcttccagacctcctgcgccaaggtcgaggcgcggcgcgccagcgttccggcgatccgctacgacgacagcctgccgatcgccgccaagcgcgacgagatcaaggccgctatcgccgcccatcaggtggtggtgatcgccggcgagaccggctcgggcaagaccacccagttgccgaagatctgtctggagctgggtcgcggcatccacggcctgatcggccatacccagccgcgtcggctggcggcgcgcagcgtggcgacgcgggtcgcggaagagattggtacgccgctgggcgcgctggtcggctaccaggtgcgcttcgaggaccagagcgacgacagcaccctggtcaagctgatgaccgacggcatcctcctggccgagacccagcacgaccgctacctggagcgctacgacacgctgatcgtcgacgaagcccacgagcgcagcctgaacatcgacttcctcctcggctacctgaagaccctgttgcaccggcgtccggacctgaagctgatcatcacctcggcgaccatcgacctggagcgtttctcccggcatttcgacggcgccccggtgatcgaggtttccggccgcacctatccggtggagacctggtaccggccgctggcggcggaaaccgacgaggagggcaaccgggtcgaggacgacctgtcggtggaccagggcatcctcgccgccctcgacgagatcgccgcccacgaacgcgaggtcggcaagcggcccggcgacgtgctggtgttcctccccggcgagcgggagatccgcgacgccgcggagatgctgcgcaaggccaacctgcgccacaccgaggtgctgccgctgtacgcgcgactgaccccggccgagcagcagaagatcttccagccgcgcccgggacgcaagatcgtgctgtccaccaacgtcgcggaaacctcgctgacggtgccgggcatccgttacgtgatcgacagcggcaccgcgcggatcagccgctacagctaccgcgccaaggtccagcggctgcccatcgaggcggtgtcgcaggccagcgccaaccagcgcaagggccgttgcggacgggtcgagccgggcatatgcgtgcgtctctacagcgaggaggacttcaacgcgcgtccggccttcaccgacccggaaatcctccgcaccaacctggccgcggtgatcctgcagatgctgcacctgcgcctcggcgacatcgaggcgttccccttcatcgagccgccggacggcaaggcgatcaaggacggcttcacccttctgcaggaactgtcggcggtcaaccgcgaaggccagctgaccccgctggggcgccaactggcgcgcctgccgatcgacccgaggctgggccgcatgctgctggaggcggcccagcagggtagcctcgaggaagtgttgacggtggccagcgcgctgtccgtgcaggatccgcgcgagcgtccggtggagcggcagcaggccgccgaccaggcgcacgcgcaatggaaggacccggattccgacttcgccgcgctgatcaatctctggcgtggcttcgaggagcagcgccaggcgctgggttccaatgccctgcgcagctggtgccggaagaacttcctcaactacctgcgcctgcgtgagtggcgcgacgcccaccgccaactgaccctgatctgccgcgaactgaagctgccgttcgggcgtccggccaaggccgaggcgcgcaagccggaggcgaagaaaggcgcgtcggccgacaacgaacgcgaggtaccggggatcgattacgcggcggtccacaaagcgatcctgtccggcctgctcagccagatcgggcagaaggccgaggaaggcgactacctcggcgctcgccagcgacgtttctggatccatccgtccagcggcatcgctcgcaagcgcccgcaatggatcatggccgcggaactggtggagaccaccaagctgttcgcccgaatggtcgcgaagatcgagccggactggctggagccgctggctgggcacctgatcaagaccaaccacttcgagccgcactgggagaagcgtcgcggccaggtggtggcgttcgagcaggtcaccctctacggcctcatcgtcatcggtcgacgtccggtgcactacggtccgatcgacccgccggtggcgcgcgagctgttcatccgcgaaggcctggtgcgcggcgagatcaacagccgcgccaagtgcctgagcgccaaccggcagttgctggaaaagctcgacgagctggaagccaaggcacgccggcgcgacatcctggccgacgaggaaaccctgttcgcctattacgacgcgcgcctgccggcggatatctaccagaccgccagtttcgagaaatggtacgcccgcgagcggcagaaccagccggacctgctgctgatgcgcgaggaagacgtgctggcccgcgaagccagcgaagtcactgcggcgcagtacccggatcgcctgcgcctgggcgatctgcacctgtcgctgagctaccagttcgagcccggcaccgcgcgcgacggcgtcaccgtgcgggtaccggcgccgctgctgccgcaattgccggccgaacgcatcgactggctggtgcccggcctgctctacgacaaggcggtggcgttggtgcgcaacctgccgaaggcgatccgcaagagcttcgtgccggtaccggacttcgtccgcgccgccctggagcgcatcaccttcggcgaaggttcgctgccgcaggtgctgggccgcgagcttcagcgcatgaccggcgtgcgggtagccgacgaggcctgggccgaggcggcgacgcagttggacgatcacctgcggatgaacattgaggtggtcgacgcccagggcaagttcctcggcgagggccgcgacctggccgaactcaccgcgcgtttcgccgaagccagccaggcggcgctggcgataccccaggccgacaaggaacagcagcgtccggtggaggccaaggccttcgccagcgtcgccgagaaggcccagcagaaggtcgccggattgtcgatgacggtatacccggcgctggtggaggagcagggcgaggtcaaggaagggcgcttcccgacccaggccgaggccgactaccaacaccgccgtgccctgcaacgactgctgttgcagcaactggccgagccggccaagtacctgcgcgccaagctgccggggcagaccgagatgggcctgctgtaccgcgagctgggacgggtcgaggcgctggtcgaggacatcctcctggccagtctcgacagttgcgtgctgcagggcgaaagcctgccgcgcgacggcgccgccctggccgcgctggccgagcgcaagcgcgctgcctggaacgagcacgccgagcgcctggcacgcctggtgctggatatcctcaagctctggcacggcctgcagaagcgcttcaagggcaaggtcgagctggccatgaccgtgccgctgaacgacgtcaagggccaactggccaatctggtgtatccggggttcgtccgcgccaccccgctggagtggttgaaggagtatccgcgttacctcaaggccatcgagcagcgcctggacaaggtcgccggccaggtccagcgcgaccgggtgtggagcggcgagctgggcgaactctgggcgcaataccaggcgcgcctcgccaagcacgcccaggaaggcaagcgcgacgccgagttgcaggtgtatcgctggatgctggaggagtaccgggtctcgctgttcgcccagcaactgggaacccggctgccggtctcggacaagcgcctggccaagcagtggagccaggtcgagggctag

SEQ ID NO: 323706 - DNA, 210 bp, Pseudomonas aeruginosa
atggcccgcctcgatcctgccctggccgaagaaatacgccgtctgccgatcagtcggcgtctggaactgacccaggcattgctgcatcgcgccggccccgaggtggagcgccaatggccgccagtggccgaggatcgcctcgccgactgccgggcgggcaccgccgatgcgctgccgctggccgagatgctcaagcgactggggcgctga

SEQ ID NO: 323707 - DNA, 1689 bp, Pseudomonas aeruginosa; identical to SEQ ID NO: 319448

SEQ ID NO: 323708 - DNA, 1158 bp, Pseudomonas aeruginosa
atgggatcgcaccaggagcggccgctgatcggcctgctgttctccgaaaccggcgtcaccgccgatatcgagcgctcgcagcgctatggcgcattgcttgcggtcgagcaactgaaccgcgagggcggcgtcggcggtcgcccgatcgaaacgctgtcccaggaccctggcggcgacccggaccgctatcggctgtgcgccgaggacttcattcgcaaccggggggtacggttcctcgtgggctgctacatgtcgcacacgcgcaaggcggtgatgccggtggtcgagcgcgccgacgcgctgctctgctacccgaccccctacgagggcttcgagtattcgccgaacatcgtctacggcggtccggcgccgaaccagaacagtgcgccgctggcggcgtacctgattcgccactacggcgagcgggtggtgttcatcggctcggactacatctatccgcgggaaagcaaccatgtgatgcgccacctgtaccgccagcacggcggcacggtgctcgaggaaatctacattccgctgtatccctccgacgacgacgtgcagcgcgccgtcgagcgcatctaccaggcgcgcgccgacgtggtcttctccaccgtggtgggcaccggcaccgccgagctgtatcgcgccatcgcccgtcgctacggcgatggcaggcggccgccgatcgccagcctgaccaccagcgaggcggaggtggcgaagatggagagcgacgtggcagaggggcaggtggtggtcgcgccttacttctccagcatcgatacgcccgccagccgagccttcgtccaggcctgccatggtttcttcccggagaacgcgaccatcaccgcctgggccgaggcggcctactggcagaccttgttgctcggccgcgccgcgcaggccgcaggcagctggcgggtggaagacgtgcagcggcacctgtacgacatcgacatcgacgcgccccaggggccggtccgggtggagcgccagaacaaccacagccgcctgtcttcgcgcatcgcggaaatcgatgcgcgcggcgtgttccaggtccgctggcagtcgcccgaaccgattcgccccgatccttatgtcgtcgtgcataacctcgacgactggtccgccagcatgggcgggggagcgctcccatga

SEQ ID NO: 323709 - DNA, 1041 bp, Pseudomonas aeruginosa
atgcgtcacggtgatatttccagcagcaacgacaccgtcggagtggcggtggtcaactacaagatgccgcgcctgcacaccgcggcggaggtcctggacaacgcccggaagatcgccgacatgatcgttggcatgaagcagggcctgcccggcatggacctggtggtgttccccgagtacagcctgcagggcatcatgtacgatccggcggagatgatggaaaccgcggtggcgatccccggcgaggaaaccgagatattctcccgcgcctgccgcaaggccaacgtctggggcgtattctccctcaccggcgaacggcacgaggagcatccgcgcaaggcgccgtacaacaccctggtgctgatcgacaacaacggcgagatcgtccagaagtaccgcaagatcattccctggtgccccatcgagggctggtatcccggtggccagacctacgtcagcgaagggccgaagggcatgaagatcagcctgatcatctgcgacgacggcaactacccggaaatctggcgcgactgcgcgatgaagggcgccgagctgatcgtgcgctgccagggctacatgtatccggccaaggaccagcaggtgatgatggccaaggccatggcctgggccaacaactgctatgtggcggtggccaacgccgccggcttcgacggcgtgtattcctacttcggccactcggcgatcatcggcttcgacggtcgtaccctcggtgagtgcggcgaggaggaaatgggtatccagtacgcccagctgtcgctttcgcagatccgcgatgcgcgcgccaacgatcagtcgcagaaccacctgttcaagatcctccaccgcggctacagcggcttgcaggcgtccggcgatggcgaccggggcctggcggagtgtccgttcgagttctaccgcacctgggtcaccgacgccgagaaggcgcgcgagaatgtcgagcgactgacccgctcgactaccggtgtggcgcaatgcccggtcggccggctgccctacgagggactggagaaggaggcctga

SEQ ID NO: 323710 - DNA, 1254 bp, Pseudomonas aeruginosa
atgtacgcgatgctcaccggtgcaaccctgctcatatttgcagtggctgcgaggcttctagcgcgtagcgccatacacccctcggtcgctatgcctatcacctgggggctaggtctcatcggtgtcagtctagcatcgttgatagggttctaccgtgtcgagtctgatgcactgctaatttttctgtttggtgtgatgtcattctccctctccgctgggtgtttctcgtttctttacaacggttactttcgtgcgccgagttcaaattttctgttcgatagcgaacttcggaccagggcgctcgtaatctttttctgcttggcgcacatcgtatttcttacggtaatttatagagacttgtcttctatagctccaacactgcgcgaggctgcgtatatggcgcgcgcccagtctgtatccggtgagcccgttttaagctcgctctcaatgaactatttacagcttggacagaccgtcataccacttgtggttttactatacttgcgcggtaagtgtggagtcctaggcttcttggctatatctgttccatggatgggggttatcttgctcgcaagtggtcgagcatcacttatgcagatgcttgtcgggttattctttatctacatacttgtcaaggggagtccttctttaaaaagccttcttgtaataggtttggcaatgtttttagttattgctgttggcgctgtcgctacatccaagattcaatttcatgaaggtgatgggatctcgactcttttcatagagctctatcgtcatgtggcgggatatgctttgcaagggcctgttctcttcgataggtactatcagggctcaatacatttagagccatattggtcgccgctaaatggcttttgcagcatattggctacagttggtctctgccagaaaccccctcttcatcttgacttctatgagtatgcgcctggtgaactcggcaacgtttactcgatgttcttctcaatgtatccgcactatggcgctttgggcgtaataggagtgatggctctgtatggaatgctttgctcttatgcatactgtaaagcgaagaaaggtagcctatactttacagtcctttcctcgtacctcttttctgccattgtcttttccctgttcagtgaccagatatccacctcctggtggttctacgtcaagatgacaataattcttggaattctgtgcttcgtattcaggcgagatcgaatgttcgtgatccgccttccacaagctgggtaa

SEQ ID NO: 323711 - DNA, 2742 bp, Pseudomonas aeruginosa
atgcgcatccccccatacttcccccgtctcggcgccctcgccctggcctgcgccctggccctgcccgcgcaggcggccgagcgcgcctggagctacagctacaacgccctcggcctgatcgagcgcgccgacggtccgcgcaccgatgtgcaggacgtcaccctctatgcctacgacagtcgcggcaacctgacccaggtgaccaacgccctcggccaggtcacccgcctcggcgactatgacgagcgcggcaagcccggcagcatcaccgatgccaacggcgtcaccagcagcctcgcctacaccggcgtcgacggctggctggcctccgtcagcaccgccggcagcaccacccgcttcgactatgacgcagtcggccagatcacccgcgtcacccgtggcgacggcagttggctgagctacgaatacgacgacgcacggcgcctggtggcgatcggcaacaacctcggcgaacgcctcgaatacgacgtcgacaccaagggcaatcgcaccgcccagcgcatcaaggacgccagcggcagcctggtgcgccagcagcaatgggcctacgacgagcttggccggctgctccgtgcggtcggcgccggcggccagacacgcagcttcgcctacgacctcaacgacaatccggtcggcgaaaccaacccgcgccagttcgcccacagccaggccttcgacgccctcgaccggctggtcggccagagcgatcccctcggcggcaagacccaactcgcctacgacgcccaggacaacctcaccgaggtcaaggacccgcgcggcgtcaccacccgctacgaatacgacggcctcggcaacctgacccgactggtcagcccggacagcggcaccaccaccttcgagcacgacgccgccggcaacgtcatccgccgcaccgacgctcgcggtacggtcaccgagtatcgctacgacgccctcaatcgcctgatcgagcgccactcgccgagcgacccgagcctcgacgtacagtaccgctacgatctcaccgccgacggcaacaagggcatcggccgcctgggcgccatcgaaggtgcccgcgacagcctggtgtaccgctacgacgagcgcggcaacctggtcgagcaggtacgcagcatccgcctcgaccagcagaccctgctcgaccgcgtgacctaccgctacgacgcggccaaccaactgctggagatcggctacccctccggcctcgccatcggctacccgcgcaacgccggcggccaggtcgccagcgtgaccctggcagtgggcgacaaggcgccgagcaccctggtcgggcagatcgcctacctgcccttcggcccgctgctgcgcctgacctggggcaacggcatcactctcagccgcgagtacgaccaggactaccaactgctgcggcagaaggtcggcccctggcagagcgactaccagcacgatgccaatggcaatatccagcagcaccgccacagcctctggggcaccctggactaccagtacgacccgctggaccgcctgaccgaggaacgcggcgtccagggcgggcgcagctatgcctacgacgcggtcggcaaccgcacccaacgcagcgacaaccccgcctcaggcggcaccgccagcagccaggactaccagtacgcgcccgacagcaaccgattgacctccatcggcgcgcaagcggtgaccagcgacgccgccggcaacctcacccaggaccgcgccgcacgcaaactggcctacgacgcccagggccgcctgcaaagcgtcagcctcgacggccagcaggtcgccgaataccgctacaacgccctcggccaacgcatcgtcaagctcacccccgagagcatcaccacctacctctacggtcccgacggccagttgctcggcgaagccgaacacgacggcagcggccggaaactgcgagcccagtactacctgtggctggacagcctgccgctggccaccatcgacgccgactacgacgcccagggcaaggtcggcaacccgtccctgctctacctccatggcgaccacctcgacaccccgcgcctggccaccgatgccagcggccagatcgcctggcagtggcagtccgacgccttcggccgcggcgaagcgctgagccagggcagcacccaggtcaacctgcgcttccccgggcagtactacgatgcggagagcgggctgcactacaactacttccgcgactatgatccggagactgggcggtatgtggagagtgatccgattggactaagtgggggagtgaacacatacggatatgtacagggagcccccctcaaccgtattgatcctttaggtctagcagcaatagagattgatattcctaaatcagcatacgattggatacccggaaatattcgattacctgcgggaagactgttagggggagtattgctggtggctagtatttccggagctacgccacaagctgacagcgatacaaaagagcaaaactgcccaaaagactgcccgccgtgcaagacaattagcggcaggatcattcctgttggaaccttgggctatagaccattagacattattccagacgacgaaatgcaacacggggtttatggatctcatcacaacatgtttgttgccaatcagaaccccaacaattgccgatgcttctggcagaagaaaaactacgtattaaaacctgagcagctaccgaaaaacgcagttccagtagagccgtttataaactga

SEQ ID NO: 323712 - DNA, 1149 bp, Pseudomonas aeruginosa
atgaatgacggtggctgtaagcttccagataaaaatggccccgacaagggggctccgccgccggagggttgcgcaggaaacccggtcaacatcaccaatggcaacaaatatcaggtcgagcatgacttaataaccccgattccgcttgcccgacactacaatggcctggacggattatggcgtcattcgttctctgcgcgcataacacgcaaggatgatagctacctactttaccgcgaagacggaaaggtttcggagttcagtggggccgggagagatctaacttccctcacggatctgggaaagcttagccgactagcaggaagatttttctatacctcggagctcaacgaaactatagagtttgacccgtatggaaaactcgccaggctcaagaccaaggagggtcgaaagtatcgtgtagagcgaggcgctaatcttacgattagcgacgaacgtggcaacaaactcgttctctcggagggagccaaccatcaactccttcgcgctcagatagggggtatatccattgagtacacatacgacaaggaacagcgactcacttcggtaacacgaacagatgggcaatacaacacgaaaacacagtacctctatgacgacccgaggaacataaaactacttacaggcatccaggataacaataatcgccgcttcgccacctgggcctacgacaaccaaggccgcgccatctccagcgaacacgccaacggcgccgaaaaggtctccctcgcctacaacgatgacgcctccaccaccgtcaccaacgaatacggcaagcaggccacctaccgcttccaggtgatccagggcatcaaacgcatcgtcgccatcgaaggcgaaccctctcccaactgccccagcagcaattccaccttcacctacgatgaccagggcctgctcaccagcaaacgcgacaacaacggcaacctgaccacctaccagtacaacgcccgtggcctggagacctcgcgcaccgaggccgccggcactgcgcaggcgcgcaccatcacaaccgactggcacccgaccctgttcctcccggtgcaggtcagcgagcccggccggatcacccgctaccagtacgacgccgagggacgcaagaccggcgagaccgtcaccacccgctga

SEQ ID NO: 323713 - DNA, 2676 bp, Pseudomonas aeruginosa
atgaaacatcgtggatggagtgccgtgcgaggcggtcgcaagggggcgcaactggccctggggctgggcctggtcctgctgggaacggccgcgctaccgctgcatgcgcaagacggggcggactcggcgagccagcagcagaccgcgctgcgccgggtccggctggacatcccggcacaaccgctgaaccgcgccctgctgcgattcgccgagcaggccggggtccaggtgttcttcgacagccagcgtttcgccggtctcggcagcgcggcggtgcacggcgaatacgtgctggccgacggcctgagccagatgctccagggcagcccggtggaataccgcttctccggcaaggaccaattgagcctgatccgcgtcagccaggacgacctggtgcagatgtcgccctcggtgatctccgccgcgcgtccggacgactgggtctaccagacgccgcattcggtcagcgtgatcggccgcgagcagatcgagcgcaacccgccgcggcatgccgccgacatgctcgaggaaacccccggggtgtactcctcggtgagccagcaggaccccggcctgtcggtgaacatccgtggcatccaggactacgggcgggtcaacatgtcggtcgacggcatgcgccagaactaccagcagagcggccaccagcagcgcaacgggacgctctacgtcgatcccgagctgctcagcgaggtggtcatcgacaagggcgccagctcggccatgggcggcgccggggtgatcggcgggatcgccaacttccgcaccctggaggcccgcgacctggtcaggccgggcaagcaggtcggtggccgggtgcgcctcaccagcggcctgggcggcgacgccaatggcacccacttcatcggcagcgcggccttcgccatcggcaccgaggtctgggacatgctggtcgccgccagcgagcgccacctgggcgactacgacccggggaccaagggcagcattggcgagctgcgcaccggcgcctggttcaatcccgaggccgggcagcgggtcaagcattcgccggtggcctactccggctacgtgatgcgctcgcgactggccaagcttggcgtcgccctgccgcaggagcagcgcctgcagttcagctacctgaccacccaggtgtcctacgacgacgccaacatgctcaacaccgagaaccaggcgctctgggaaaagctcggcagcagcgacgtgcgtgcgcagaacttcgccatcgactacggctacgcgccggacaacccgttggtggacttcaaggccaagctctactacgtcgacaaccgcaaccgccagcagaccctgcaacgcggtatcacccccggctactcgatcacctaccagaccgacacctacggcgcgcaggcgcagaacacctcgaccttcgctctcgacgatctctccacgctgcgcgccaactatggcctggagttcttctacgacaaggtgcggccggactccagccagccgcgggcgagcacctcggcggtcggcttccctgcggccgaaggcatgacccccaagggcgaccgcgccctcggtagcctgttcgcccgtctcgactacgactacgacgactggctcaacctcaacgccgggctgcgttacgaccgctaccgcctgcgcggcgacaccggcttcaacgcgcgcaccttcatccttggcaccacccggcagaccgacatgccgctgcaatacgccgtcgaccgcgaggaggggcgcttctcgccgaccttcggcctgtcggtcaagcccggcgtcgactggttgcagttgttcgccacctacggcaagggctggcgcccgccggcggtgaccgagagcctgatcaccggccgcccccacggcggcggcgcggaaaacatgtaccccaacccgttcctcagtccggagcgctcgaaggcctgggaagtcggtttcaacgtgctgaaggagaacctctggttcagcgacgaccgcctgggcctgaaggtcgcctacttcgacacccgggtcgacgacttcatcttcatgggcatgggcatgcagccgccgggctacggcatggccgggatcggcaacagcgcctacgtcaacaacctcgacagcacgcgcttccgtggcgtcgagtaccagctcgactacgatgccgggctggcctacgggcagctctcctacacgcacatgatcggcagcaacgacttctgttcgaagaccgcctggctcggtggcgtcacccagacggtgaagggcagcggtcgccgcccgccggtgatcgacatgcggccggacgagcaggccaacgccgccacccattgcagcgcggtgctcggctccgccgaacacatgccgatggaccgcggctcgctgaccctgggcatgcgcttcttcgaccgcaggctggacgtcggcgcccgtgcccgctacagcgaaggctactcggtggctggcggcgccacggtgtcgcaggccggcgtgtacccggcggactggaaggaatacaccgtctacgacctgtacggcagctaccgggtgagcgatgaactgaccctgcgcctggccatggagaacgtcaccgaccgcgcctacctggtgccgctgggcgacgtgctggccttcaccctcggtcgcgggcggaccctgcaaggcaccctcgaataccagttctga

SEQ ID NO: 323714 - DNA, 585 bp, Pseudomonas aeruginosa
atgccgcgacaacttgccggcctgctgtgcgtcctcctcggcctcgccggtgcccctgccctcgcctgcccgttccgggccacggacgccgagacaccggcagcctctgccggcgccgcgcaggtcctggccctgggcggcgccggcaggctgcaactcgacctgcaacgggcccccgccactctgctgcacagcggcgacctgctgatcgcccgctacgccgagggtcactacctcgcccaccgcctgctcgaaggcaacgagatgggcgcggacgagggcgaacggctcgaccttccgcgacaggttcgcctgctgttcggagccctgccgctggacggcctgcccgacgccgagcgcgagcgtctccaggcgcagcgccaggccctcggcctgtgcgaccggcgcgccagcgccagccgctaccgcgtggccggcaccgaggtctatcgcctgcgcggcagccaggccggcaagccctaccacgcgctctacctgctcgatggtccccaggtgcactacctcgacagctccggcagcgacgccttcgtcgaacaactgctcgccagcctgcgacgccgctga

SEQ ID NO: 323715 - DNA, 312 bp, Pseudomonas aeruginosa
atgaccgcagccaacctcaccgaacagcaacgcctggaactcgaagccgccgccttccgcaccctggtccatcatttgcagacccgcaaggacgtgcagaacatcgacctgatgaacctcgccggtttctgccgcaactgcctgtccaagtggtacaaggccgccgccgacgacctcggggtggaagtcagcaatgaccaggcccgcgaagagatctacggcatgccctatgccgagtggaaagccaagtaccagaaagaagcgagcccggaacaacaggccgccttcgccaagagccagggcaacgcctga

SEQ ID NO: 323716 - DNA, 1149 bp, Pseudomonas aeruginosa
atgagcctcgagattttctggttccttcccacccacggcgacggccactacctgggcaccacccagggcgcccgtgccgtcgaccacggctacctgcagcagatcgcccaggccgccgaccgcctgggcttcggcggcgtactgatccccaccggacgttcctgcgaggactcctggctggtcgccgcctcgctgatcccggtaacccagcgcctgaagttcctcgtcgcgctgcgtcccgggatcatttcgccgaccgtcgccgcgcgccaggcggcgaccctggaccggctgtccaacggccgcgcgctgttcaacctggtcaccggcggcgatcccgacgaactggctggcgacggcctgcacctgagccacgccgaacgctacgaggcgtcggtcgaattcacccgcatctggcgtcgtgtgctggagggcgagaccgtcgactacgccggcaagcacatccaggtgaagggcgccaaactgctctatccgccgttgcagcagccgcgtccgccgctgtacttcggcggctcctcggaggccgcccaggacctcgccgccgagcaggtcgagttgtacctgacctggggcgagccgccggcggcggttgccgagaagatcgcccaggtacgcgagaaggccgcccgccagggccgccaggtgcgcttcgggatccgcctgcatgtgatcgtccgcgagaccagtgaggaagcctggcaggccgccgatcgcctgatcgcgcacctcgacgacgacaccatcgcccgcgcccaggcctccctggcgcgcttcgactcggtcggccagcaacgcatggccgcgctgcacggcggttcgcgcgacaacctggaagtcagccccaatctctgggccggcgtcggcctggtgcgcggcggcgccggcaccgcgctggtcggcgacgggccgacggtggcggcgcgggtcagggagtacgccgagctgggcatcgataccttcatcttctccggctatccgcacctggaagagtcctaccgggtcgccgaactgctgttcccgcacctcgacgtgcagcgcccggcgcagcccgagggacgcggctatgtcagcccgttcggcgagatggtggccaacgacatcctgccccggcaggccgcgcagagttga

SEQ ID NO: 323717 - DNA, 750 bp, Pseudomonas aeruginosa
atgagcggcctgctcgacctgctggagattcgcaaggcctatggcgatacgcgggtgctggagggcgtggcgctgtcgctggcgcccggcgaggtggtcagcctgctcggccccagtggttgcggcaagagcaccctgctgcggatcgccgccggactggacgatgacttccagggcactgtcgaacgcaacccgatcctcggcttcggcccggacggcgagaacggccgcagcggcggaatcggcgtggtgttccaggagccgcgcctgttgccctggctgacggtggcgcagaacgtcggtttcgccgacggctggctggaggacgagcactgggtcgagcgcctgctcgccgatgtcggactggccggctgcggaggattgctgcccaagcaactgtccggcggcatggcgcagcgcgcggcgatcgcccgcggtctctacggacggccgcaggtgctgttgctcgacgagccgttcagcgcggtcgacgccttcacccgcatgcgcctccaggacctgctgcaggacgtggtgcagaactacgagatcagcgtcctgctggtcacccacgatctcgacgaggcgttctatctcgccgaccgcgtgctgctgatgggcggccgtcccggacacatccgccgcgagttccacgtaccgctggcgcgtccccgcgatcgccgggcggtggagctggcctacttgcgcggcgaggccctgaccgaaatgcagcgggcgcacgtgctctga

SEQ ID NO: 323718 - DNA, 2757 bp, Pseudomonas aeruginosa
atgtctcgactctgcctggtcctgctgttgctctgctgcgcgctgccggcccgggcgcagccgcccgcgccgctggacggagaggacctgcgcctgtccctgggcgagtacgccgagtactaccgcgacgccggcggcaaggcgcgtctgggcgacatcctcgccttgccggcgcaggccttcgccgccctgcgcggcgaccacgcgaacttcggcaagaacgccgcagcctggtggttcagggtgcgcctggacaaccgcaacggcaccgacctggccggtttcctggagatcaactacccgctgctggacgacctcaaggtctacctgctgaccgccgatgggcgcatcgaacagcaggagagcggcgacctgttcgccttctcccagcgcccggtgcaagtgcgcaacttctggttcccgctgcgactgccgcccggcgagagcaccctgctgctgcgcgtgcagagcaccagcaccgtctacgtgccgctgtacttcagcacctacgcggccagcgcggccagccaggaaaccctgatgggcttcaacggggccttctacggggtgctgttcgggttgttctgctacaacctgttcctcttcgtctcgctacgcgaggccacctatgcctggtacctgctgtacaacctcagcctcggcctgttttccgccagcttcgacggcctgctgttcaagctgctgcccggacacgtggcgctggagtcggccggcatctacctgctgatgtacctgagctgcctggtgtcgatccagttcagccgcggctacctctacacccgccgcgacttcccgcgcctcgaccgcttcctccgcggcctgctgctggcctgcgtggtcctgttggccagcgagccgctggtggggctgcgcgcctggaacgtcctcgccagcctgacggtgatgctggtctccctcagcctgctgctggccggcgtccacgtctggcgccagggcctgcgctacggcctctactacatcctggcctggggcgcgctgctgctgtcgttcctggtcaccaccgccgcctcgctgggcttcgaactgttcggcctgttcggcagcagcgtggtcaagatcggcatgaccgtggaactggtgaccctgtccatcggcctcgccgaccgcatcaatgcgctcaaggaggaaggcttccgctcgcgccaggcggccgagcaggcgcgggtggagaacgaggcgaagagccgcttcctggcgaagatgagccatgagattcgcaccccgctgaacggcgtgctgggcatgctgcaactgctccgcgacaccccgctggaccgcggccaggcggcctacgtggagaccatcgccagctccggcagcgcgctgatgtcggtgatcaacgatatcctcgactacgctcgcatcgagtccggcaagctgcacctggagcgcatcgacttcgacctggaggaactgctctccgacaccctggcgctgttcagcgcccaggccgtggaaaaacgcctgcgcctgcatctcggcctggacaggggcgtgccgcgccgcctcaacggcgacccgacgcggttgcgccaggtactgatgaacctgctcagcaatgccctcaagttcaccgccgaaggccatgtcgccgtgcgcgtgcagcggcgcttcgacgagggcggacacgagcgcctgctgtacagcgtcagcgacagcggcatcgggatatccgcccaggcgcagaagaccctgttcgaatccttctcccaggccgactccagcaccacccgccgctacggcggcagcggcctgggcctggcgatcagccgggagctggtgcagatgatgggcgggcgcatcgaggtgagcagcgagccgggcaagggcacccggttcagcgtcgacctgccgctcagccccgccctcgacgccggcgaagcggatgaactggcgcaactgctgcaacaccgcccggccctgctggccagcgaggacaacctgaccctggactgcctgcaggcattgctggagcgttgggggctgcgggtcgaacgctgcctgcagccgagacggctgaacgcctacctggaggacttcagcgcaccgcccctgctggtcctggcggcgccctggccggggccgccgtcgatctggctggacaccctctatgcgcaactggagcaaggccagcgcatcctcctgctatgcccgccgcagcactgccaggacctgccgccgcacgaaggcctgcgcctgctggccctggcccagccggtggcggtgaaggccctgcgcgaagccctgctggaactgtaccgggagcggcgccgacagccagggcggagcagcgaggcggccccggacgaacgcctggacgccccatgcatcctggtcgccgaggacaacccggtgaaccagctggtggtgcgcggcttcctcgccaagcgcggctacgcggtgcgcctggccggcaacggacggctcgcgctggacgagtacctgcgcgatccgaacggcatccagttgatcctgatggatggcgagatgccggaaatggacggcttcgaggcgacccgcctgatccgccgggaggagcgtgcccagggctggccacgcgtaccgatcgtcgccctgaccgcgcacatcctcgacgaacaccgccgggccggaatcgaggctggcatggacgcctacctcggcaagccggtggaccgggcggaactctatgccaccctcgaacgcctgctcggccagccttcgcgacaggcatga

SEQ ID NO: 323719 - DNA, 666 bp, Pseudomonas aeruginosa
atgctgcgcgaagagggcgtgaccatcggccgtttccgagtgcgtcggttgatgcgtgagctgggcctggttagcaagcaaccgggctcgcacgcctacaaacaggccatggttgagcggccggatatcccgaatcggctgaaccgcgaattcgcgaccgagcatcccaatcaggtgtggtgtggcgacatcacctacgtctgggcgcaaggccgttggcactacctggccgcggtgctggatctgcatacccggcgggtgatcggctgggcgttctcggccaagccggatgccgaactggtgatcaaggccctggacatggcctacgaacagcgcggcaagccacagcaggtgctgttccattcagatcagggcagccagtacgccagccgcctgtttcggcaacggctctggcgctatcggatgcagcagagcatgagtcgccgagggaattgctgggataactcggcgatggagcgcctgttccgcagtctgaagtcggagtgggtcccgtcaacgggttacctgacggcgcaggaggcccaacgggacatcagtcattacttgatgcaccgctacaactggatcaggccgcatcaattcaacgacgggttaccacctgcggtggccgaagaaaaactcaacccactgtccgggatgggttga

SEQ ID NO: 323720 - DNA, 534 bp, Pseudomonas aeruginosa
atgccaagctaccgacgaacctgggtccccggcggcacctatttcttcaccgtcactctgcatgaccgccgctccaacctgctgacccgcgaaatcgacctgctgcgccgcgtggtcgcccagaccaggcgccggcatcccttccgcatcgatgcctgggtcgtgctgccggagcacatgcattgcctctggaccctgccgcccgacgacgccgatttcgccacccgctggaaggtcatcaagtccggcttcgcacggcgcatcccctgccacgaatcacgtaccttcgcgcaacggcggcgaggacaacgcgccatctggcagcagcgctactgggaacacctgattcgcaatgacacggactaccggcgccatttcgactacatccatctcaaccctgtgaaacacgggctggttacggcggtcaaggattggcccttctccaccttccaccgggccgtggctgatgggctttatcccgaggattgggccggtgatccttccttggaggtccgggcggccgagcgggtttga

SEQ ID NO: 323721 - DNA, 879 bp, Pseudomonas aeruginosa
atgaaacactatcggcaggtggtatccccgcaattgcgccaacaggcgctggactggatcctcgccgcggcgcagcggccggacccggcgctggaaccggaattcgacatcgccgacgacgagcgccgcgaggcgaagaaggtgcgcaacctgcaccgccacgacccgctcttctgggacgactggttcgcccgctccgggctcgacgcgctggtccgcgaccatctgcgcaagccgcgcctgctgcgccacgcggcgttcatcaagcgccacgccgacgagtcctacatcccgctgcaccaggacatcgcgctatgggagaagcgctacgaaagcgcgcagaccttctgggtcgccctgaccccgtcgcggaacgacaacggtgggatgttctattaccccgacgaccgcacgatcttcccccacgagttcgacctcgcctacccgatgttcaagtgcatcgacctccaggccaacggcatttcccgcgagcaactggtggatgccgagctggacgccggcgacgtcctggtctggcccgcccgcaccgcacatggcagccacaacaaccgcagcggcgagctgcgcatcggcatgccgatcgtcttcgtcgaggacgacgaattccaccaactgaatcgagaggacagcatgaaaacctggatcgcttccaacctgaaaagcgtgttcccggacgaagcaatcaccgaggacaacctcgaccactatcttccgcagctgtgcgactactcgctgaagatggtcaccttcctcgcccgtttctcccgccagttcggccatgcgccgaagatccacgacttcatcagggagccgcggctggcgacgctgtcggcctcggacgcgggagcgagacgatga

SEQ ID NO: 323722 - DNA, 1263 bp, Pseudomonas aeruginosa
atgaacgtcggtctctccgcggaggtgcgctaccactggttccgcgagcacctggtggtggtcggcgattggcaccgcctgtccccctccgagcgcgaccgcctgcggcaccaaccgatgccggatgaggccgcgcagtccttgcgcgtcgacctgtcgccctggtcctgcgggatggtcttcagcgagctgctcggcgccgacctgacccgcttcggcctctgctacctggctccggccgaggtgccggcatccgacctgacgcgcctggggcggcgcctgcgcgaagagttcccgttgctcgacagccaggtggacagcggcgcggaaggtttcgaactggtcgtccacgggcagcccgaggagagcccggcgctggaagtcggccccttcgccgacgaaaacacgctcatcgcagcgctgctgcaacgcccgcattccctgttcgagcgcggcctgctgcgactgttccacgggcgctgcggaggacgtgcgcgctggggcgtctggctgcatcacctggtcgccgacgccgacttcgccagcgtgctgctggcccgcctggccgtgctcaacgccgaccccacgaccgaagcggcggcccccgagttcggcttcctccagcagcaatggcgcctggagcgccagctgcgcgagcgcaggaccaggctggaagactactggagcgagcgcggcgaggcgttccgtgaactggcgagcctgccctgggcggagctcgccagccattgcgaggatttccgcttggctgccacgccaggaggcggcgaagccgccctgctgacccggctcgcctgcgccctggctctcgccctggccagccagggcgccaccggcaaggtcctggcgctgaccccggtcagcctgcgcagtcgccgaggcacggcggtttccggttgctggctgaacctggtgccgctgttgctggacgccgcgaccgccgaggacaccttcgaacgacacaggctcgaggccttcgagcacagcctgctgccggcggaggccatcgccgaacgggccgggctgcgctatgccgacgcccaggtgatgatcaatgtcatcgaccagccattccgcagcgccgggttcatccaccggccgacactgaagagccgcctgccgctgaccctgaccctggtccggcgcgacgacggcggctgggacgccagcctggccagccgcttcggccgcgaacggaccctggcgctggcggcggccatggccgaggcgctacgcccatgctga

SEQ ID NO: 323723 - DNA, 894 bp, Pseudomonas aeruginosa
atgattaatctccggcgactggacctgaacctgctggtgaccctcgacgtgctgctcaccgaacacaatgtgacgcgcgcggcggaacgcctgaatttttcccaaccctcggtgagcgtgcacctggccaagctgcgggcgatcttcgacgatcccttgctgcttcccggcccgcgcgggatgcgcccgacggcgcgggcggaggagctgcgcgagccgttacgcctggccctggaagccctggagcaggcggtggcgccggccgcgccgttcgatccgacgcagtcacggcatacctggcgcgtcgccgccaccgactacgccgagtcggcgatcctcctgccgatcctcgccagtcttcgccgccaggcgccgggcagccgcctggcggtgctggagctggcgccgacgcgaatcgtcaggcaggcggaacgcggcgagatcgacctggccttccacaccctcgaagaagcgccgccgggactgcgctgtcgccggctgttcagcgagcgctatgtgctggccgggcgcgccgggcatccggggctgcgtcggcgaccgacgctgaagcagttctgccgcctcgagcaggcgatcgtctcgcccgacggcggcggcttcctaggtcccaccgaccaggcgctcgccgaactcggcgcggaacgccgggtggcgttgtcggtgccgcacttcctgttcctccgcgcggtgctggaaagcaccgacctggtggcgctgctgccgtcgcgactggtacgcgagcgcgacaggttgcgggtggtcgaggcgcccctggaggtgcccggctacgacctggccatgctctggcacgagcgctcgcaccgcgatccggcccatcgctggctgcgcgaactcatcgccgcctcggtgtaa

SEQ ID NO: 323724 - DNA, 780 bp, Pseudomonas aeruginosa
atgaacgtactcatcgtctatgcccatcccgagccgcggtccctcaacggtgcgctcaaggacttcgcggtcgcccgcctcgaggcggccggccatgcggtgcaggtttcggacctctacgcgatgggctggaaggccgtgctcgatgccggcgacagcctcgagcgcgaggccagcgaacgcttcgatccttccgcaacttccctgcgcgccttcgagaacggttggcagagcgtcgacatcgccggtgagcaggacaagctgcgctgggccgatacgctgatcctgcaattcccgctctggtggttcagcatgccggcgatcctcaagggttggatcgatcgcgtctatgcctgcggcttcgcctacggggtcggcgaacattccgacagccactggggcgaccgctacggcgagggccggatgcagggcaagcgggcgatgctggtagtcaccgccggcggctgggagtcgcactacgccgcgcgcggtatcaacggaccgatggacgacctgctgttccccatccatcacggcatcctgcattaccccggcttcgaggtattgccgccgttcgtcgtctatcgcagcggccggatcgacgcggagcgtttcgccgcgctgagcgagcagttgggccggcgcctcgatgacctgcagcgcactgcgccgatcccgttccgccggcagaacggcggcgactacctgatcccggcgctgaccctgcgcgacgaacttgccccgcagcgggccggtttcgccatgcacctggccgaatga

SEQ ID NO: 323725 - DNA, 891 bp, Pseudomonas aeruginosa
gtgaaggaaccgcgtgccctggaggaatatcgccgggcgatagtggcggcctgtccggagctggcggacgccactttcgccatcctggcctcgggctggcattccacggcggtggaggtcggagggcgctgggtgttcaagtttccgcgcggcgcggaggccgaggcggcgctgctgcgcgaggccgccgtgctacgcctggtgcgtccggcggtgagcctgccggtgccggcgccgcaggtgtttgcgggaccgccgctgttttcccgccacgagaaactgcctggcggttacctcctgggcgaggactaccggcgcctggacgaacccgcacggcaggcggtcggcgatgcgttggggcgcttctacgccgagctgcatcgactgccaccggcgcgcatgcgggcggttggagccttgccggtgcgtccctgggagtcgcctgcggcgatgcgcaggcgcgccttgccgctgctgcctgcggcctggcgcgaacgcgcggaacgcttggtgcgggaatatgccaagctgcctgccgatccgctgggttcgatcttcggcttcttcgacggccatggctggaacatggcattcgatagcgaggccgggcggctgaacggtgtgtacgacttcgccgacgcgggcatcggtccgctgcaccaggaattcatctattccgcgttcatcgatgccgacctcaccgagcgcatcgtcgccgcctacgagcgcttcagcggtcggcgcctggagcgtcggcggatcgccttgctgacggcggcgcatcggttgtcggagctggccgagctggccgacgagccgcgccatctgccggagatgctcgccggcgccctcgacggcctggccctggcggaggcgcagggcctggcctga

SEQ ID NO: 323726 - DNA, 351 bp, Pseudomonas aeruginosa
atggttacgcacttcttgagcgaatccggccaggcagcctgcgggcgcggcgacagcaacgtgaacggctcgagcgacgtcggccaggtcagttgcaagacctgccggcgcaccaacgccttcgcccaggcccaggaaaacgccgctccggccagtgcccctgtcacccccaccgccgctgcgccagtgatcgacaaggccgcgccgcggccgaaagccgaggccaggctcgccgccgcgcagcgccaggaccgcgatgccgcccgcaaggcctggcaggcgcgtctcaacgaattgtccgggaagaaccgcatgccgcgctcgcggcgccgcgcgcaagcctatctctga

SEQ ID NO: 323727 - DNA, 1773 bp, Pseudomonas aeruginosa
atgccgctgcgccgtgccgttttcgccatccttttcgcgtccctgggcagtcctttggtcgccgccgaaacacccctgcgcctggagcgcctggagcgctgcggcgatctcctggccagcgagcggcaggagtggtgcctgcgcgtgcgcggcctgggcgccggcctgccgcgcctgttgctggacggccgtgaactgccggccaccgccctgcggcgcgagggcgacggcctgcggctccgcctggaccgccgtggccacgccagcggtccgctttggctggagcagggcgggcgcagcagcaatccggtatggctgaccctgaacggcagtcatgtgctcgccgccggtcccgacgaggtggcgaagaacatggatggcctgaccacctacgtcgacctggtcagcctgttgatcgaggagaaccacgacggtcgccgggaggccgaacgcctggccgataaatatggcgcgcgggtggtcggcgcgatcccgccgttgaacctctaccagttgcgcctgccggcgcgcgacctcgtccagcgcgacgcgctggtcctccgcatcggcagcgagaccagcgtggacgccgtggtggtggaggagtccgcgccggagaagggcgaggaaaccgaggcggcgcgccggcccgtggacaagccggacagcgactccgacgagtgggcggccaatcgtttcatggacgcggtgaactattaccagcgtcgggtccgcgcccgccaggcgccgctggagacccgcccggtgcgcatcggggtgatcgagcgcgacgtcgacttcgacgctcccgacttcgccgactacctcggcccctgcaaggcgcccgcaccgcgtacctgcctctacgcgcgcgatgccgaacgtcccgacaaccacggttcgacggtcgccggcatcctcgccgcgcgctgggaccagggcggcaacagtggtttcctgcgtgggttggaccgcgccagccagggtttcgaagtgatcgtcgagcgcaattcggatgctggcatcacggccaacgtcgccgcctcggtgaacctggtggaggatggcgtgcgggtgctcaactggagctggggcatccaccgcgtcggcgctcgcgacgtcgatggcgacgaggtggattcgctggtgcgctcggggatcgccatgagcggctacgaggagttgctcgaggagttcttcctctggctgcgcaaggagcatccggacgtgctggtggtcaactccgccggcaacggctcgtcctactccggtaccgacgaataccgcctgccgtcctccttcgttaccgagcagttgctggtggtgggcggccaccagcgcagcgagcgccaaggcctggcggtggacgacccggcctacgcggtcaagcgcagcacctcgaacgtcgacatgcgggtggatgtcaccgccgccgcctgtacccatgcctcgaccctggagcgggacgcgcggggcgaggtgcactgcggcacctcctatgccacgccgatggtcgccggcacggtcgccgccatgctttccctcaacccgcggctgcgacccgaggagatccgcatgctgctccggcgcagcgccatgaccatcggcggcgactacgatttcgagccggccgatgccgaggacctcaccgcaccgatcctgccctcggagcgcggctaccgcctggaccaccgcgacgtcggccgctcggcgcggctggacatgcagaaagccctggacctggcggtgaagagccgcgagcgcgtgcgctga

SEQ ID NO: 323728 - DNA, 1782 bp, Pseudomonas aeruginosa
atggcaaggctcggttccagcgttaccaacgaaatcaaacaggccctggcggccagccgcggcgcattgcgcagcgtggcggcgttctccggggtgatcaacctgctgatgctggtgccctcgctgtacatgctgcaggtgtacgaccgcgtgctgtcctcggccaacgaagtcaccctgttgatgctgaccctgatggcgcttggcgtgttcgtcttcatgggcgcgctggaggcgctgcgcagcttcgtcctggtgcgggtcagcgaacgcttcgacggccagttgcacgggcggatctacgccgccgccttcgaacgcaacctgcgcgccggcggccaggaggccagccaggcgctgcacgacctgaccaccctgcgccagttcatcaccggccaggcgctgttcgccttcttcgacgcaccctggttcccggtctacctgctggtgatcttcctcttcgacccctggctcggcctgctctcgctggtcggcgcgctggccctgatggccctcgcctggttcaacgaacgcgccacccgtgcgccgctggccaaggccggcgagttgtcgatcaagtccggccaactggccagcaacaacctgcgcaacgccgaggtgatcgaggcgatgggcatgctcggcagcatgcgcgggcgctgggaacggctgcaccaggcgttcctcgaccagcagagcctggccagcgagcgcgcggcgcggatcaacgcgctgagcaaatacctgcgcatcgccctgcaatccctggtgctcggcctcggcgcctggctggcggtggagggacgcatcaccccggggatgatgatcgccggctcgatcctgatgggacgtgcgctggggcctatcgaccaactgatcggcgtgtggaagcagtggggcgcggcgcgcgatgcctatcgccggctgagcggcctgctcgacgaattccccgcccgcgagcggcgcatggaattgcccgagccgcgtggccacctgctgctggaatcgctggacgcggcgccgcccggcagcgaggcgcgcaccctgcgtggcctgaccctggcgatcccggccggctcggtggtcggcgtgatcggtccgtccggctccggcaagtcgagcctggcgcgggtagtgctgggcatctggccgaccctgcacggcagcgtgcgcctggacggcgccgagatccgccagtacgagcgcgagaccctcggcccgcgcatcggctacctgccgcaggacatcgaactgttcgccggcacggtggcggaaaacatcgcccgcttcggcgaggtgcaggccgacaaggtggtggaggcggcgcgcctggccggggtccatgaactggtcctgcgcctgccgcagggctacgacaccgtgctcggcgtcggcggcgccgggctttccggcggccagcgccagcgcatcgccctggcccgggcgctgtacggtgcgccgaccctggtggtgctcgacgaacccaactcgaacctcgacgacagcggcgagcaggcgctgctggcggcgatccaggcgctcaaggcgcgtggctgcacggtgctgctgatcacccaccgggccggcgtgctgggttgcgccgaccgcctgctggcgctgaacgccggccagttgcacttgtacggcgagcgcgaccaggtgctcgccgccttgaacaaccagcgcgccgcgtcggcgtcgcagcagcgcgcggactaccgggtggccggctacggcgcgccgcaggtggtggccgcgccgcgccagggaggtgtggaatga

SEQ ID NO: 323729 - DNA, 1440 bp, Pseudomonas aeruginosa
atgtccagcaattctcttgcattgaaaggtcgtagcgatgcgtatacccaggtagacaacttcctgcatgcctatgcgcggggcggggacgaattggtcaatggccatccgtcctataccgtcgaccaggcggcggagcagatcctccgcgaacaggcgtcttggcagaaagcgccgggcgactcggtgctgaccctgtcctattcgttcctgaccaaaccgaacgacttcttcaatacgccgtggaagtatgtcagcgatatctactcgctgggcaagttcagcgccttttccgcgcagcagcaggcccaggccaagttgtcgctgcaatcctggtcggacgtcaccaatatccacttcgtcgacgccggccagggcgatcagggcgacctgaccttcggcaactttagcagtagtgtcggcggtgcggcgttcgccttcctgccggatgtaccggatgcgctcaaggggcaatcctggtacctgatcaacagcagctacagcgccaacgtcaatccggccaacggcaactacggacgccagaccctgacccacgagatcggccataccctgggcctgagccaccccggcgactacaacgccggcgagggcgatcccacctacgccgacgctacctacgccgaggacacccgcgcctattcggtgatgagctactgggaagagcagaacaccggccaggacttcaagggcgcctattcctcggcaccgctgctggacgacatcgcggcgatccagaagctctacggggccaacctgaccacccgcaccggcgacacggtgtacggcttcaactccaacaccgagcgcgacttctacagcgccacctcgtccagttccaagctggtgttctcggtgtgggacgccggcggcaacgacaccctggacttctccggcttcagccagaaccagaagatcaacctcaacgagaaggcgctgtccgatgtcggcgggttgaagggcaatgtgtcgatcgctgccggggtcaccgtggaaaacgccatcggcggctcgggtagcgacctgttgatcggcaacgacgtggccaacgtgctcaagggcggcgccggcaacgacatcctctacggcggcctcggcgcggaccagttgtggggcggcgcgggggccgacaccttcgtctacggcgatatcgccgagtcctccgcggcggcgccggataccctgcgcgacttcgtcagcggccaggacaagatcgacctgtccgggctggacgccttcgtcaacggcgggctggtgctgcaatacgtcgacgccttcgccggcaaggccggccaggcgatcctgtcctacgacgcggcgagcaaggccggcagcctggcgatcgacttcagcggggacgcccatgccgatttcgcgatcaatctgatcggccaggcgacccaggccgacatcgtcgtctga

SEQ ID NO: 323730 - DNA, 1035 bp, Pseudomonas aeruginosa
atgcgttcgcagcggatcgtccacatcgtcagttgccatgccgaaggcgaggtcggcgacgtgatcgtcggcggcgtcgccgcgccgcccggcgccaccctctgggaacagtcgcgctggatcgccagagaccaggacctgcgcaacttcgtcctcaacgaaccgcgcggcggagtgttccgccacgccaatctgctggtgccggccaaggacccgcgcgcgcagatgggctggatcatcatggagccggccgacaccccgccgatgtccggttccaattcgctgtgcgtggccaccgtactgctcgacagcggcatcctgccgatgcgcgaaccgctgacccggctgctgctggaagcgccgggcgggctgatcgaggcccgcgcggaatgccgcgacggcaaggccgagcgggtggaaatccgcaacgtgccgtcgttcgccgaccgcctcgacgcctggatcgaagtcgagggcctcggctcgctacaggtcgacaccgcctacggcggcgacagcttcgtcatcgccgacgcccggcgcctgggcttcgccctgcgcgccgacgaggccgccgagctggtcgccaccggcttgaagatcacccacgcggccaacgaacaactgggcttccgccacccgaccaacccggactgggaccatctgtccttctgccagttggccgcgccgccggagcgccgcgacggtgtcctcggcgcgagcaacgcggtggtcatccgccccggcaagatcgaccgctcaccctgcggcaccggctgctcggcgcggatggcggtgctccaggcgaaaggccagctgcgggtcggcgaacgcttcgtcgggcgctccatcatcggttcggaattccactgccacatcgagtcgctgaccgaactcggcggccgtccggcgatcctcccgtgcctgtccgggcgggcctggatcaccggcatccaccagtacctgctcgacccggacgatccctggccgcaaggctatcggctgtccgacacctggcccggcggccactgctga

SEQ ID NO: 323731 - DNA, 1743 bp, Pseudomonas aeruginosa
atgaagcacgcacacctcatcgttccccgtaccctggtcgccggcagcgcgtccggcgaactgctgtacgcaccgaccggcctgagcttctggggcggcgtcgacccgcgcagcgcggaagtgatcgaccgtcaccacccgctcagcggccgccatctacacggcaggctgctggcgattcccggtgggcgcggctcctgtaccggcagcagcgtactgctggaactgatcctcggcggacgtgcgccggcggcgatcctcctgcgcgaaccggacgaaatcctcgccctcggcgcgatcgtcgccgaggaactgttcggccgctcgctacccatcgcctgtctcggcgagcgcttcgacgaactcgccgcctatccctgggcgcgcctggccgacggacgcctggaactccaccgcgatgccccgccgccgctggaggcccgacccgccgaagcgctggcgaccgatgccggcccgcgactggacgccttcgaccaggccctgctcgccggcgaacacggcgaagccgcacgcctggcgatgcgcatcgtcctgcgcatggcggcgttgcagggcgcgcaacggctgatcgacatccagcgcgcgcacatcgacgcttgcatctacaccggcccggccggcctgcgcttcgccgagaccctgcgcgacctcggtgcccgggtgcgggtaccgaccaccctcaacgccatctccgtggaccagcgccgttggcgcgaacagggcgtacccgccgccctcggcgagccagccgtggccctggcccaggcctatctcgacatgggcgcgcagcccagcttcacctgcgcgccctacctgctcgacgacagcgcgcgggccggcgaacagatcgtctgggccgagtccaacgcggtgctcttcgccaacagcgtactcggcgcacgcaccaacaagtacgccgacttcatggacatctgctgcgccctcaccggtcgcgcgccgctggccggctgccacctcgacgagcagcgccaggcgcgggtactgatcgaagtggaagacctcggcagcgtcgacgatgccttctacccgaccctcggctacctctgcggcctgctctgcgacgggcagatcccggcgatcgacggcctgcggcagcggcagccggaccacgacgcgctcaaggccttcggcgcggcgctgggcaccagttcctcggtgccgatgttccacgtcatcggcgtcaccccggaagcccctgacctggccagcgccttcggcggccgcgcgccgcggcggaccctgcgggtcggacgcgagcgcctgcgcgacgcctggcgcgagctggacagcgccggcgagacgcggatcgacctggtggcgctgggcaacccgcacttctccgccagcgaattcgcccagctcgccgcgctctgccacggccgccgcagacacccggaggtagcgctggtgatcaccagcagccggcaggccgtcgcccaggccgaagcggccgggcacctggcgacgctgcaggcgttcggcgcgcggctggtcaccgacacctgctggtgcatgctcgacgaaccgctggtgccgccgggcgcgcgcaccctgatgaccaactccgccaagtatgcccactacgcccccggactggtcagccgccaggtgcgcttcgccggcctcgccggctgcgtcgaggccgccgtcggcggacgggcccccgccgggctgcccgcctggctgagcgaggactgctga

SEQ ID NO: 323732 - DNA, 1254 bp, Pseudomonas aeruginosa
atgagcgccgactacgacctgctgatcgtcggcgccggccccgccggcctggccgcagcgctggccgccgcgccgagcggcgcgcgcatcgccctggtcgacgacaacccggccgccggcggacagatctggcgcgacggcccgcgtgccaacctgccgccgcgtgcccatcagatgcgtcaacgcctggccgggcaggccaatgtcgagcacttcccggcgacccgggtggtcgcctgcggtcccggcaggcgcctgttgctggaagacccgcaacgtggctggcaggtcggctaccgacgcctggtcctctgcaccggcgcccgcgaactgctgctgccgtttcccggctggaccctccccggcgtcaccggcgccggcggcctgcaggcgttggccaagggcggcctgccactggccggccagcgcctggtggtggctggctccggcccgctgctgctggccagcgccgccagcgccagccagtgcggggcgcgcctgctgcgcgtcgccgaacaggcgccggcgagaaccctggccgccttcgccgtacgcctgccgcgctggcccggtaagctgtggcaggccgccggcctgttcgcccgtagctaccgcgccgacagctacgtgctcgccgccctcggcgaggagcgcctggaagccgtgcgcctgcgcgaaggcggtcgggtccgcgagatcgcctgcgaacgcctggcctgcggcttcggcctggtgcccaacgtgcaactcggccaggccctcggctatcgcctcgacggccaggcgctcgccgtcgacgaatggcaggccggcagcctgcccgaccactacgccgccggcgaatgcaccggcttcggcggcagcgaactggccctggtggaaggcgccatcgccggccatgccgccgtcgacgagcgcgacgcggctcgccgcctgtggccacgacggcgacgctggcagggcttcgccgacaccctggcgcgacacttcgccctgcgtgccgaactgcgtgaactggcggaggcggataccctggtctgccgttgcgaagacgtccccttggccgcgctggccgggcatgccggctggaccgaggccaagctgcacagccgttgcggcatgggcgcctgccaggggcggatatgcggcagcgccgcgcaattcctgttcggctggacgcctccggcgccgcgtccgccgttcagcccggcgcgcctggagaccctggcccgctggcagggcgacgccggctag

SEQ ID NO: 323733 - DNA, 945 bp, Pseudomonas aeruginosa
atgcaacgcatccgcatcatcgattcgcataccggcggcgagcccacccgcctggtcatcggcggctttcccgatctcggccagggcgacatggccgagcgccggcgcctgctcggcgagcgccacgacgcctggcgcgccgcctgcatcctcgaaccgcgcggcagcgacgtactggtcggcgccctgctctgcgcaccggtcgatcccgaagcctgtgccggagtgatcttcttcaacaacagtggctacctcggcatgtgcggccacggcaccatcggcctggtcgcctcgctggcacacctcgggcggatcggtcccggcgtgcaccgcatcgagacgccggtcggcgaggtcgaggcgaccctccacgaggacggctcggtcagcgtgcgcaacgtgccggcctaccgctaccgtcgccaggtcagcgtcgaagtgcccggcatcggccgggtcagcggcgacatcgcctggggcggcaactggttcttcctggtcgccggacacggccagcgcatcgccggcgacaacctcgacgccctcaccgcctacaccgtcgccgtccagcaggcgctggaagaccagggcatccgcggcgaggacggcggcgccatcgatcacatcgaactgttcgccgacgatccccacgccgacagccgcaacttcgtgctctgtcccggcaaggcctacgaccgctcgccctgcggcaccggcaccagcgccaagctggcctgcctggccgccgacggcaagctgctgcccggccagccctggcgccaggcgagcgtgatcggcagccagttcgaggggcgttacgaatggctcgacggccagcccggcgggcccatcgtgccgaccatccgcggccgcgcccacgtcagcgcggaagccaccctgctgctggcggacgacgatccgttcgcctggggcatccgccggtga

SEQ ID NO: 323734 - DNA, 168 bp, Pseudomonas aeruginosa
atgtatttcggggcgtccgcgatggccaagccttccttcttttcctccgacctggtgcaggtgctgctgtgcccgcgtctgcacgaactgcagttcgccgtgaaggccctgctggccggcgggttggccctgtacctggccttcggcctggagctggagcagccgtaa

SEQ ID NO: 323735 - DNA, 1641 bp, Pseudomonas aeruginosa
atgcatggcatcaagggggtatccatgacgaatacgtcgaccctgacgctcgatggcgtctctttccagctgccggacggcagccttctgttttccgatctcgacgaaaccttcgacacccggcacaccgggctggtgggacgcaacggcgtcggcaagtcgctgctcgcgcgcctgctcgccggacacttgcagccgtccagcggcagcgtccggcgccaggggcgcgtgcgctacctggcgcagcagctcgaaccggccgactacccgaccgtcgccgatctggccggcgtccgcccatggctggaggcgctggcgcggatcgaggcgggtagcctcgacgccgccgactacgaatgcctgggcgagcgctgggacatccgccaacgcctggccgacgccctggccgccgaggggctcggccatctccgcgcggacaccccgagcgaacgcctgagcggcggcgaatgcatgcgcgtagcgctgctcggcgcattcctcgacgacgccgactttctcatcctcgacgaaccgagcaaccctctcgacgggccggcacgcgctttgctgcgggcgcgcctggcggcatgggacggcggcctgctgctggtcagccatgaccgcgaactgctggagggcatgcagcggatcgtcgagctgtcgaccctcggcctgcgcagctatggcggcggctattccttctacgcgcagagccgggaggaggcgcgcgaggccgccgaacgtcgcctggaccagcgtcgtctggagcgcaagcggcagaccctggccatgcgcgaacagcagcagcgccaggagcggcgccaggccagcggccggcgcgaaggcaagacggcgaaccaggcgaagatcctgctcggtgggttcagggaacgtagcgaggtcagcgccggcaagctgcgcaacgcccaccaggcggagcgcgagcgtctcgaccgcgaggtgcgcgaggctgcccgggaggtcgaggaggcgtcgccgctgctgctcgattcgcccgatgccgaactggcggcacagcgccggatcgtcgagttgaagggcgcggtcctgccgcatttgcgcgggccgttgcgcgaaatcgacctgctcctgagcggtccgcgacggctggcactggtcggcccgaactgcagcggcaagtcgaccctgctgcggctgctggccgggcaacgggcgccgctggcggggacctgcgcggtgacggtgggcgccgcctatctcgaccagcggctgagcgtgctggaccacgggcgaggcgtgctggagcagttgctggaggtcaatcgcagtcgcggcgaaagctggctgcgcacgcgcctggcgcaactcggcttgccggctgaacggctcgcccagccgtgcgcgacgctgagcggcggcgaacgcctgaaggcggccctggccctggtgctctacgccgaccggccggcgcagctgctactgctcgacgaaccggacaaccacctcgacctggctgcgcgccaggccctggaaagcatgctcgggcagtaccgtggggccttgctggtggtgtcccacgacccggtgtttctccggcgactggcgctggatggcgaactgcgggctactgccgcgggttggcgcctggaggaccgatga

SEQ ID NO: 323736 - DNA, 1590 bp, Pseudomonas aeruginosa
atgcccaactccccgcttccttccggccgcaggctgcccgcttgcgccttcgccgacatcggcgagccctacgccgtgttccaggctcccggcggcgcgctccttgcggtggccagcgcctttcatgggcaacacccgggccgacagctcgacgtctacgaacagagcctgcgcctgtaccgcggcggcgacctcgaatgcatcgccgtcctgccggacctgggctttccgctcaacgccatcgcctggcacccgagccggcccgtactggtgatcggcggcggacgctacgacggcggcgccttcttcgaaggcggtctgctggcctgggactacgcgagcggcaagacccaatcgctgctcgccgacaaccgcgaagtgctcgcctgcgacttcgaggacgacggccggcgcctgaccttcaccgtcgcccccagcgacgacctggaggaccgaccgttgttccgccagcgccattcgctagcctttccggtcgacgccccactggtgctggacgacctgcccggcacccgcctgcccttcgactgggccctctaccctgcctcgacacaacgcgaagcagcgctgccgatcctggaaaacctcgccctgggcaaagatcggcggttcctgcatcgtccaccggtgtgggacctgtgctttctcgacggccaacgcctggccatcgcccgcgccaacccccggctcgagctctggaatctggccgacgacagcctgcgcagcttcgaactggccgaacggggccagtgcctgcaggtcttccataacgccacggacgacagcctgctggtcaatctgcaactcgggtatgccgcccagcgactgttcaaggtgccgctgacaccgggacaaccgctgctcctgagcgactgccgccatctgctggcgcaatccgcccaaggcggttttctcgcccgccagaccgccctcgagggcaaagacctggaagacctcgtgctcgacccggccggccggatcatccacaggcgccgtctcggacactacgacctgttcaaccaccatctgcgcatcgaccgtggcgaagccttcttctacctggccggcaatccgccggagcagcaccaggacaagggcctgttccgcctcgacccgcagaccttcaagacccgcgaagtgctacgcctggagcgccacccggagcacttcaacaacctgcacggctgcctgctgggcaatcgcctgctgctcaacgccaaggtctacaactcgccgcatcacgcctacggtacccagcgcctgacctgctacgacctggagagccgcggcacgctctggggcgcgaccctgtccgcccaggtcagcgccttcgcgccgttgcccggcggacaatggatcgcactggcgctggtcgatggtcaggtcgaggtacgcgacctcgccagcggcgaatgtcgctggcgctaccgcacggcagacgccataccgctgtgcctggcagtcagcgacaaactcctcgccatcggtttcagccacggcggagtcagcctcctgcaggtcgcggcggatggccagctcatcggtcctccaggcgccaacccgcggcagtag

SEQ ID NO: 323737 - DNA, 234 bp, Pseudomonas aeruginosa
atgcgtagtttccttcgcggcgcccgggaaagcgtccgccggctggtggccttcgctcaagccgaaggctggagcgtcgaccgctccgccggcggccacttgaagctcagcaagatcggctgcgcctcgatcttcatctcttccacgccaagcgacgcgcgcggcgagctcaatgcccgcgccctgctccgtcgagccgacaggcagcgttccctgaaccaggagtctttctga

SEQ ID NO: 323738 - DNA, 240 bp, Pseudomonas aeruginosa
atgcctgacgtcaccgcttaccggccggctgaggacgagctcgctcaactgcgcacagaggtccgcatgctgcgttccgcgcatgacgacctggcctgcagccgacagagcgatcgtcgcagccttcaggcgctggtgaaacgtctcctggatgccgccgccaccgatagccttccccgctcccttgcagagatggagacctggctgcagctcaacagtgaggagaccacggatgcgtag

SEQ ID NO: 323739 - DNA, 258 bp, Pseudomonas aeruginosa
atgaaggcatcccagacctatcagtgcatcgtcaagttcgatggcgccggcttctggaccaataccattcagaagcagcgtgcgacctgcacctggagcgacaaggtggcagcctcccgccttgccgaacggctgttcggcgaggacaacgcctacatcacccgtatgccggcacaggcaggcgaccacgaaaagcgcatcgagagccgctgggaactgtcctgtagaaatcccaaggaggtagcgcacgatgcctga

SEQ ID NO: 323740 - DNA, 528 bp, Pseudomonas aeruginosa
atgaacactgaagcccgttttccgagcatccacgcctcggccgcgttcaccgactcggcggtggttcatgccaatcacgttggggtcaacccgatcgagctggacgccctcagccaagtgatctcgcgcctttctcgtgacgagagcacggtcgcacccagctcgatggagcgagagcttcgtgagctggaggaactggggtacatcgaaatctcgaccactcaggccgggaccctggtggtcactacgcgcgctccagggcaactgctttcggcttacttctggtcggtatggatcccgcgatacctgttcagttgctcgctgaaagtgagcctggtgccgcacctctgctgcggcactcaggactcccagcacctcaccgcggtgttccgcattgcaggcagcaaggacgccgcacgtgagttcctgcatcagttggccaacaactatcccgggcatgagccggagttgcccgaactggtggccgttcaggtcggtgatgcactcagcaaggaggccgaatcatga

SEQ ID NO: 323741 - DNA, 186 bp, Pseudomonas aeruginosa
atgaacgcttcccagcacctggtcacccacgagtgcatgaattgcggtcagcaccaccctctccacctggtgcgccaaatcctccccgcagagaacaccccggaaggtgaagctgaggtcttggtctgcccctgctgcgggagctacgacgtccatcagttggaggctgtccgtgatgaacactga

SEQ ID NO: 323742 - DNA, 681 bp, Pseudomonas aeruginosa
atgagccccttcattgaacttccgatctctcgccggcgggagccggcaaggagtctagtcatgcgtgaccagcagcccgctaacaatctcctttcgatagcgagcgccgaatggatacaagccttgcagaacttctgccaccacggacgagtgtatgacgggtccgccgccaatgcctggctattggatgcctgcctacttgttcccagcgctgccctcatccacggtgtcatcgagtacgttcttaacagccgtgaggacataccatacggagggctacgcccaagctgggtggctcagcggctcgagcaggagggattgattagtcaccggtgcggggcagtcttgcactggcaggagcacggctatcgcttttccacggtggtcaggatcgaccccgaacagatttggcccgataagcgctcgagacccgaagcattcgttaccggaccactagatagccaggagcttggggtaattgaaatcctggcgcatccgaacgccagacgtcgtagtccgtccccggtgcgcctggcagcactggttcgatcttcgctagccatacctgctgagcctcttcatcccattgcaaatccgccagttcttcatgcagtgctagccacctatcccgaattggcatctcccgaatggtttccagtggccaggagtagcgacgcatga

SEQ ID NO: 323743 - DNA, 1344 bp, Pseudomonas aeruginosa
gtgagtgttctggaacttacgccgccgcactccgtcgaggcggagcaaggggtactcggcggtctgatgctggacaacgcggcatgggacattgtcggcgatcaactgcagaaggaggacttcttccggcatgagcatcggctgatattcaccgccatcagcgagttggccgcgaaggacgccccgtttgacgtcgtgacggtgtcggaagcgatcgaagaccttccagaagccggcgggctggcctacctcggccagctcgccgacaacacgccctccgtggccaatatcgaggcttacgcgcagatcgttcgcgatcgggcgcacctgcggcagttgatgtctctcgggcaccactgcaccagaaccgcctcgaaccaccaggcgaatccctgtgaggttcaggaggagatcgagcagaagctgttcgccctcggccaagatcagcacaagtccgactttatcgatatcaacaagggcctcgcgaagatcgtcgacaccatcgattaccgcttcaacaacaacgtgacggtaacgggggtcccgacaggcctgaaggatctcgacgagctctccggcggactacagaagtcggatctcatcatcgtcggtgcccgtccctcgatgggcaaaacgtcgtttgccctcaacttgatcgacgccgcgctgcagagcgaccaacagaagtctgtccaggtttacagcatggaaatgccagcagagcagctgctgttcaggcttgctgccctgctcggccacctggaccttggcaagctgatgaagggccaactgcaagaagaggattggcccaggctgaccgtcgcgatccagcgcataaacgactatggcagccgactggtcatcaacgaccagggcaacctgacgccgacagagctgcgcgccaaggttcgccgtgcagccaggaagtacggccaccccgtactgatcctggtcgactacctgcagctgatgcgctgcccaggcctggaaaaccgagccaccgagatctcggagatctcccgctcgctgaaagcgctggccaaggagatggactgccccgtcgtggccctatcccagctcaatcgcagcctggagaaccggccgaacaagcgaccgaacaacgcagacctgcgtgagagcggcgcaatcgagcaggacgcggacgtgatcatgttcgtgtaccgcgacgaggtctaccaccccaacaccgaggccaagggcatcgccgaaatcatcatcggcaagtaccgcaacggcccgatcggcaccgtccgcgccgccttcatcgccaaccagacccgcttcgccgaccttgcaccaacttggcagggagctcttgcatga

SEQ ID NO: 323744 - DNA, 219 bp, Pseudomonas aeruginosa
atgaaaaacaagattgaggatctgcgtaatcacctctttgccaccatcgaaggcctgctggacgaagagaagcctctggatatcgaacgcgcgaaagcggtggctcatgtgagttcggtgatcatcgagtccgccaaggtggaggtgaaagcgctggagatcatcggcgccccgggcggaagcacgttcatgcagatcggccgggaggactcgaagtga

SEQ ID NO: 323745 - DNA, 708 bp, Pseudomonas aeruginosa
atgactcgctctgctctctcgaacatcgcctacgaggctctggtgcgtgcccgccgcaaattcagcaaccgaaaggagcgctgcatccgcgaaacctggaccgccgaacaggaactggtgctgctgcgcctgtatccggatatgccgaacgaggtcctggcagccaggttgaacaaaacgctccagcagatctgctccaaagcgtatcggctcgggctgaaaaaaagccccgagttctccaagaagatccggcaggactggggcagcgcaactcggttcaagaagggaaacaccccatggaactgcggcatgaaggggcttcccgcgcgaggacgctcatcggaaacgcagttcaagaaggggcagaagccccacacatggctcccagtcggcagtacacgggtcagcgctgatggctacctgcaacgaaagatctcggataccggttatcccccccgggactggaagggcatgcacatcctgctctgggaagaacacttcggccccatcccaaccggccattgcgtctgcttcaaggacaacaacaagcagaacgtcgtcatcgacaacctggagctcatcacccgggccgaacgcatgcgccgcaactccatccatcgctatccacctgagctgaagagcgcaatccgcgtcatcagcaagctcaagcgcaccattcaggaggtcgagcatgaaaaacaagattga

SEQ ID NO: 323746 - DNA, 702 bp, Pseudomonas aeruginosa
atggacaagcaaaaagtcctcgccaaggtcgagaagctgatggccctggcgaatgccaagggggccacgccgaacgaggcggaaaccgcattgcgccaggccgcgatcctgaagcgccagttcgacctcagcgatgcggatatctcggcccacacggtggaaaccgcgtgcattcccactcgaaccaggcgctctcctgccccatggctgcatgaactggccgggatctgcgccagttccttcggctgcgactacctggccgcttacgcgatgccagcgggctggacgttcaagttcatgggtcgtgggatcggccctgagctagccgctcacgcctactctacgctccaccaccaactggtggcggcgcgctcagctcatgtcgcccaacagaagcgctgcaagctgtcgaccaagcgccgtcgcagcaagctcttcgtcgaaggctggcttctcgcagtgcgttcgctggtacgtgactttgccggcaggccggacgagtcgactcaagcagccatcaaggcctacctcgaactacaccatccggagctgaaactcctggagccggcagcgccgacgaagcccctggcctatgaccaggcttcgctgcacgcaggctgggagcacggcaaaaacactcgcctgcaccgcggcgtcagccggcgagttcagggcgcgctcgagcagggaggttcccgatga

SEQ ID NO: 323747 - DNA, 684 bp, Pseudomonas aeruginosa
atgagtgaccccaagctcaagccctgcccgctctgcggcagcacgaacattcgaatgctggaacccgagctgctcgacaccgatgcctggaactctgccattgaatgccaggactgccaggttcacatcgggccgtcctactgcgagccagacccggtaacagcgaggtattcagcacaggtcgactggaacaggcgcccaaacgcaaaaagccacgcggacgagcgtgagcagttcttgatggccaacctgctcgccgccctggaggtcgcactgggcgacgtagcagccctggctattgtcgaccgggtaaggcaggtcgcagaccgaatttaccccacctcgagcctatcccctgttccccaagcatggctcgatgtccaagccgagcgccgccggcagatcgaggccgaaggctggacgccagagcacgacgacgagcacagccacggccagatggcccgagccgccgcctgctacgccctggccggctccagcgctccgaacgatggaaccgccgccctgctggtgtcgctggcatggccttgggatgagcagtggtggaagccaaccacggtgcgacgagatatggtcaaggcctgcgccctggcgctggctgagatcgagcgcctggaccgcaccgcgcccgtgcagggctcaacctgctgcaagggggacgcgtaa

SEQ ID NO: 323748 - DNA, 663 bp, Pseudomonas aeruginosa
atgaagcctatgattcaagcccacctggtcgagcgcgaccagttcggcttctggacccatccgaactatccggatctggccgacaactgctcttccaacgaagcgcaggaaacgctgcgtcggcttggccttgagttgcagaccgtcttcatggagtcggatgcgcctcgcctctacgactctgcccgttcggaccaacgatacagcgagtggatcccaacgcggcccgaaggcgccggttggttcgtgctgtcgatccacgataccgataacggcccggtgtgccagtacgtgcgaccgctcggagaacacctgagtccaatcgatctcgatgcggcagcagaacagcatgagcgcctgctcagcgaggcttgtgccaaggccttgaatcagcgcgacgccgccctggccgaaatcaagcgcaacaagctcaccatcgcggccatgaacgaggtgcacgcgaaactcgccgcagatctggaggccgtccaagccagggttgcggggttgcatcgcgctctaaaggtgatcgttgacgctgcagaacacggttcttggccgacaaccgtcctgcacgggattgataaagcacgtgccatgctcgccgccgccccttcccaagctaagcccagcaccgacgacgggcagggaggcaggccatga

SEQ ID NO: 323749 - DNA, 492 bp, Pseudomonas aeruginosa
atgaacctccagaaccgcaacaacctcatcctgagcttgatcgccgagacccagttcgacgcctacgtgcaaggctacatggccaaagcaggcgccgccgccggtgcttccgacaatctgctggtcgaggctgaaggtgctgcgatgctgcagggccttgtcgctccggttcgcgctcagcagcgtgcctgtggacagcccctgcagaacgccctgctccaaatcgcccacgacctactgttgcagacgaagtcgcaactggccatcgcggccaatgccagctcgatccacgtgatccagcgggacatgaacagggctatctggaatatcgcgactgccatcgatcacctggccgagttcgcccaaccctcccaggacactgtgaaggtcatcgagcggctgatgctcttcgtcggcagtagcccggaaggtcagcaactggccgcagaggcaagtgcggtgcttggcattagcgaggggggcctggcatga

SEQ ID NO: 323750 - DNA, 738 bp, Pseudomonas aeruginosa
atggcgaagcctccaatcacccaagcccgcgacgtcgacgcagaacttgtgctgcaactgaacaagttcggcagcgccgccgaccttcggagccaacaggccaagttgaccggcgctgcgcgagaaatacgcaagctgactggtggcggtactgacctgttcgggaagctgggttgctacttgagcttcgagcaaaagcagctcctacaagacgctgcgcgcttgctcgactcggtgaaccagcaggtcgagcatgcgaaggaaaagcgtgatcgcgacgagaaacaggccaagaagcggcgtgagctgcgcgggcgcctggccaagcaactggtcgcctcgaactacccgcttccgggaaatacgctcgaagagcggctggaaatcctgcagatcgcgttgatctacaaccgggccaaggtgttcgatcccctgtactccacgcaccagctccactcaaaactcaaacgctggctggagcgtcccaagcagctcatcgggtggcgcagtgaagccgagtatttcgctagtcaggtggggagcctgcgatgtgacttcattagccacctgactaacgaaatcgcctacgacgatggcagtgaagtcgaggagcgcctgcgcgtcatcaagcagacggtcgctgactgcaccgcacagatcgctctgaccagcgaggagcaggaaacccttcggctctggaaagacgctctgcaatcggctccggagggcctcatatga

SEQ ID NO: 323751 - DNA, 867 bp, Pseudomonas aeruginosa
atgaatgcgaaagcgacttcggttgtatccaccaagggtggtgtagggaaatccaccaccgccgccaacctcggtgcattttgcgccgatgctggcctgaaaaccctcctcatcgacctggaccccgtccagccctccctatcctcgtactacgagcttcctgaagtcgcccagggcggcatctacgacctgctcgccgccaacataactgacccagcgaggatcatctccaggacgattatccccaacctggacgtcgtgatttccaacgaccagaacaaccagctcaacaacctactgctccaggcgcccgatggccggcttcggctggcaaacctcatgccgtccctgaagcagggctacgacctggtgctgatcgacacccaaggtgcgcgctccgctttactcgaaatggtcgtgctcgcatcggatctggttgtttcccccctgcagcccaacatgctcactgcccgcgagttcaaccgcggcacaatgcaaatgctcgatggactacgtccctacgagcgcctcggcatgcggatccccaatgttcagatcgtcatcaactgcctggaccagaccaatgactcccgggcgattcacgagaatgtgcgtgccatcttcgatgagcatcaggacatttctgtgctcgaaacgactgtcccggatgccgtcgtgtttcgcaacgcagcatcgcgcgggctaccagcgcaccgcctcgaaacgcggcaaccctcgaatcgcacatccgcgcccgcgctggaaatcatccgtaacctggccatcgaggtctttcccgagtggactgaccgcttcctcgcgctgacgccggaggcggtagcagcactggtcaagggagggcgctga

SEQ ID NO: 323752 - DNA, 4200 bp, Pseudomonas aeruginosa
atgaacaagagctatacgctggtctggaaccaggccacaggctgttggaacgtcgcaagcgaaggtacccgtcggcgcagcaagagcggacgcggcaaggcgctcgtagtcgccggagcgtcactgctcggcctgttctgccaggcccccgccttcgccctgcccagcggcgccacggtcgtttcaggcgatgccggattccagacatccaccgatggccggcatatggtcatcgaccagcagagccacaagctgatcactaattggaacgagttcagcgtccgtgccgatgagcgggtcagcttccaccagccgggccaggacgccgtcgccctgaaccgggtgatcggccgcaacggcagcgatatccaggggcggatagatgccaacggcaaggtcttcctggtcaatcccaacggcgtggtcttcggcaagtccgcccaggtcaacgtaggcggcctggtggcttccaccctggacctggccgacagggacttcctcgccggcaactaccagttctccggcgactccggcgcaaccgtaagcaatgccggcagcctgcaagccagcgaaggcggcagcatcgccctgctgggcgcccgggtcagcaacgacggcgtgatccaggcgcaactcggcgacgtggccctgggcgcaggccagggcatcaacctcaatttcgacggcgacggcctgctcaacctgcaggtggacaagggctcggtcgacgctctcgcacacaacggcggcctcatccgcgccgatggcggccaggtgctgatgagcgcccgcagcgccgacagcctgctcaagaccgtcgtcaacaaccagggcactctcgaggccaggacgctacgcagcgcggaaggacgcatcgtcctcgacggcggcgaacagggtaccgtgcgggtggccggcaagcaggacgccagcgccatcggcggaggcaatggcggcctggtgctgaaccagggcgcgaacgtcgagatacagcgaaccgcgcaggtggacacccatgccgaccagggcgcaaccggcacctggaggattctctcgcacgaggtcagcgtagccgctgtcggccaggcaaacgctgccggtgatggttccggccaggtccatgtagcgcagggcccagccggggccaatgcgtccgatagcaacggcgtgaccatcgttcagcagcagccggccgtcgacctcgccgccggcgccaacggtacctccgcagtgcagagccagagcggcgccaacatcggctcgggcgccagtggcatcagcgtcgtgcaaagccagaatggcgccaatatcggcgccggcgcgagtggcatcagcgtcgtgcagagccagaacagccccaatatcggctcgggcgtcaatggcgtgactgtcgtgcagagccagaacggtgccaatatcggttctggcgcaagtggcatcaccgttgtgcaaagccagaatggcgcaaatatcggttcaggcgcgagtggcatcagcgtcgtgcagagccagagcggccccagcatcggctcgggcgtcaatggcgtcacaatcgtgcagagccagagcggtgccaacatcggccccggcgtcagcggaatcgatgtcgtccagacccagactctcaccaacctgagcccaggcgccaatggctccagcatcgtccaggtccagacgctacccgatatcgccgccgacgccggcaatgtgcatgtcgtgcaggtccagaccggcggtaacaaggtcttcggcaactccgccaccaacgtcaggtcacgtaccgttcaggcccggagtagcgagaatgtcggttccggcctggcgaatccaagcagcgcgggaaaaggcccgacgttgcatgccgataccctggcccgcaacctttccacaagcaacgtcgaagtggtcgccacccggggcaacgcgcatgtcggcgcgccgctgtcctgggacagcggcaacggcctgacgctaaccgccgagcgcggggacctcaggatcaatggcgcgctgacggcccagggagaaaacgccagccttactctcaatgccgggcagcgccctctccgtatcgacgacagcctctctctcaccggccagggagcccgggtcgaattcaattcggacaagggttatgccctggccgaaggcgcccggatcaccctgtccggcaagaacgcaggattccgcgccaatgggcgggactacagcgtgatccaggacctgcagcagttgcgcggcatcgatagggacctgggcggcagctatgtcctcggcaatcgaatcgcaggcggccattccagcttcctgtcgataggcaacgccagcgccttcggcggtaccttcgacggcctgggcaacaccatcgataatctcgccgtctacggcaccggcgcctactccggcctgttcagcgtcaaccggggcaccctccgcaacctgaacctggaacgcatttccgccgatggagcacaggccacccactacaacgtccaggtcggtagcctggccgccgtcaacctcggtcgcatcgacaatgtgaacgccagcgacatccgtatcgccgcggcctcgcagctgaacagcctcggcgggctggtcgcgctgaacctgggcagcatcgacaacgccagcgccagcggcacgctggtcggcaaccgccacacctatgctctgggcggactcgcagccgaaaacatcagcacagccaggggcgtggccagcatctccaacagccgggccgattttgccatctccggccagttgaaggaccatgccagccactacggcgcggggggcctggtaggcaggaaccgcggcggcctcatccgcagcagcggcagtcagggaacgctgtcgctgagcggtcacgggatgaacctgggaggactggtcggatacagctccgccggcggactggcggacgtatccgcctccgtcgacgtctcaggcaacggacagcacggcctgtacggagggctcatcggcctcaacgtaaacagtggtatcgcccacgccacggccagcggcaaggtccggggcacagacgcggaagcactgggcgggctgatcggccggaacctgaacgcggccatcaacaacgccagcgcccatggcgatgtcagcctgcaagccggtcgctacctgggaggcctgatcggccacaaccaggcaggcaacctggccaacgtcagtgccagcggcaacctgagtggtgggtcgctgctccaggccggcggcctgatcggtctcaacgccaatgcctcgctggtcaatgcctccgccaagggcaatgtcgctacccgcggagcagaagcggttggcggtctgctcggagaaaacctgtacggctccgtcatcaacggttccgccagtggcgaagtcaccgacggcagcggcaaaaccctgggtggcctgatagggtccaacctcggcggcaatcattccaacctgaaggcctccgggtgggtaaacgcaggggcgaacagtgacgtgggagggctgatcggccacaaccggggcggcaaccacagcaccctggcggcatccggcaatgtcaccgggggcaagggcagtcgcgtcggcggactcgtcggctataacgatgccgcctcgctgacgaacgtctcggcttcgggcaacgtcagcgccagtggttccagggccatcggcgggttgatcggcagtgacctgcgaggttcgctgatgctcgccagcagtcatggaatcgtgaacgacaagaccggccacaacctgggagggttggtcggccgcggtgaaaacacctcgatccgctccgccaaggccagcggtgcggtgagcggaggcgccgggatcagggccggcggactggtcggctccctggagggctggcaggctctcatcctgggggcctcggccggcggcgatgtgacggcgggctacgacagctatattggcgggctggtgggcttcagcaccgccaccatcagcggcgcttccgcttccggcaaggtcggaggctcgggtctgctgggcggcctggtcgcctggaaccaggggaatgtcatgggttcttcggccagcggcaggctggagccacaaatccccaaccagatccatggcggactgatcggcatcaattttggctggcagtcctggaactcggtatacggggctgcggcgaccgttccaatgataggtcgccactacaacctgtga

SEQ ID NO: 323753 - DNA, 1059 bp, Pseudomonas aeruginosa
atgaccggcaccaagcccacaacgcccgtagcccgctatttccaccaagaggcgcaacggcgcggctatgtgctggacgcagcccagggcaatgccattcttcatctcgatcgattggcggagcgcttgcgtcgaggtccgtcgctattccggcaagcgccgcgcagcctctacctgtgggggccggtcgggcgcggtaagagctggctgatggatggcttctttcgcagcgccgatttgcagggcctgcgccggacgcatttccatgcgttctttcgccggcttcatgacggcatgttccgccgccaggggcggcccgatgccctgggcggtgcgctcgacgaactgctaggagattgccggctgctttgcttcgacgaattccatgtccacgacattggcgacgcgatgctgataacacgcctgttcagggagctgttccgcaggaagatcaccctggtctgcacctccaactacgcgccgcggcaactgctgcccaatccgctctaccacgaacgcttcctgccggcgatccggttgatcgagacgcgcatggaagtgctggaagtagccggcgcccgggactaccggacgatttcgccgcggcaggagatcgcttccggttatgccagcggcgggtattgctggccagcctcatgcgcttgcctggacgagctgggcttgtccgcgcccgagccctcgcaacgcgtgaccctgcaaagcggcgcgaggacgttgcaggcgcgcgcggtgtgcggcgacctggtgtggttcgccttcgccgacctttgcgaggcgccaaccgcggtgatggactaccttgccctcggcgaacgcttctctacctgggtgctggagggcgtaccgccgatggcgcgctgttcggtcgccgcccagcagcgcttcatcaatctcgtcgacgtcctttacgacaatgaccggcgttttttcctgagtgccgaaaaggcgctgccggacctggtcgagggcagcgacctgcctgcggacatgcagcgtaccgccagtcggctggcgcagttgcgccagcttcgctgttga

SEQ ID NO: 323754 - DNA, 1308 bp, Pseudomonas aeruginosa
atgtcccatcgcatcgtgatcgtcggcggcggcgccggcgggctggagctcgccacccgtctcggccgcaccctgggtaaacgcggcaaggcccaggtcaccctggtcgacgccaacctcacccacatctggaaacccctgctgcacgaagtcgctgccggctcgctcaactcctccgaggacgagctgaactacgtcgcccaggcgaagtggaaccacttcgaattccagctcggccgcatgcagggcctggatcgcgccggcaagcgggtccgcctggccgcactggtggacgagaatggcgttgaactggttcccgagcgcgacatcgcctacgacaccctggtgatcgccgtcggcagcaccaccaacgacttcggcaccgagggcgctgcggaacactgcattttcctcgatacccgcgcccaggccgaacgcttccaccgacaactactcggccagtacctgcgtgcgcataccgggcacgacgcgaacaacaacgcagtgagtatcgccatcatcggcgccggcgccaccggcgtcgaattggctgcggaactgcaccacgccgcgcagatgctggccgcctacgggctcgaccggatccgcccggaagacctgcacatcagcctggtcgaagccggcccgcgggtgctgccggcgctgcccgagcgtatcagccagccggtacaccagaccctgagcaagctcggcgtacgggtgatgaccggctccgcggtgagcaaggtagatgcggacggcctctggaccggcgacggcgaattcgtcccggcgacgctcaaggtgtgggcggcgggcatccgggctccggccttcctcaaggaactcgacggcctggaaagcaaccgtatcaaccaactggtggtccgcccgaccctgcagaccacccgcgacgacgacatcttcgccttcggcgactgcgccgcctgtccccagccggcgcaaccgggagagcaaccgcgcaacgtgccgccacgcgcccaggccgcgcaccagcaggcctcgctgctggtgaaatcgctgcgtgcccgtctcgaaggcaagccgctgggcgaatatcactaccgcgactacggttcgctgatctcgctgtcgcgcttcagcgcggtcggcaacctgatgggcaatctgatgggtagcgtcatgctcgaaggctggctggcgcggatgttctacgtatcgctataccgcatgcaccagatggcgttgtacggtccgctgcgcactgcgatgctgatgcttagcggccgcctgcgcagcaccgagccacgcctcaagctgcactga

SEQ ID NO: 323755 - DNA, 1218 bp, Pseudomonas aeruginosa
atggcggacaaagcgttaaagaccagtgtcttcgtatgggaaggcactgacaagaaaggcaccaaggtcaagggcgagctgtccagccagaacccgaccctggtcaaggcgcaactgcgcaagcagggcatcacgccggtcaaggtccgcaagaaaggcatctccctgctgggggcggggaagaagatcaagcctatggacatcgccctgttcacccgccagatgtccaccatgatggccgccggcgtgccgctgctgcagtcgttcgacatcatcagcgaaggcttcgacaatccgaacatgcgcaagctggtggaggagatcaagcaggaagtcgccggcggcaacagcctggccaactcgctgcgcaagaagccgcagtacttcgactcgctctactgcaacctggtggacgccggcgaacaatccggcgccctggaaaccctgctcgaccgggtcgccacctacaaggaaaagaccgaggcgctgaaggccaagatcaagaaggccatgacctacccgatcgcggtgatcgtcgtcgccatcatcgtttcggcgatcctactgatcaaggtggtgccgcagttccagtcggtgttcgagggcttcggcgccgaactgccagccttcaccatgatggtcatcaacatttccaacgtactccaggaatggtggctcctggtactgctgatgatgggcggcgccggcttcctgctgaaccacgcctacaagcgttcggagaagttccgcgacgccaccgaccgcacggtactgaagctgcctatcgtcggcgccatcctctacaaatccgccgtggcacgctacgcgcggacgctgtcgaccaccttcgccgccggcgtgccattggtggaagccctcgactcggtttccggcgccaccggcaacgtggtgttcagggacgcggtgggcaagatcaagcaggacgtgtccaccggcatgcagctgaacttctccatgcgcaccaccaacatcttccccagcatggccatccagatgaccgccatcggcgaggagtcgggcgcgctggacgacatgctggccaaggtcgctggcttctacgagcaggaagtggataatgccgtggacaacctgaccgccctgatggaaccgatgatcatggcggtcctcggggtcctggtcggtggcctgatcatcgccatgtacctgccgatcttccagctgggcaacgtcgtctaa

SEQ ID NO: 323756 - DNA, 1179 bp, Pseudomonas aeruginosa
atggttcaggtaacactgttggttatcttgggtctaggcagcgtttccgcatttctctccgccaatccttcctgggcattcaaggaatggtcggtattcgccggcctgatgctgttttccttcaatatatccgccagcccagagtgggttcgccgtatcgccctctggggggtggtcgtgttgggagggttcttctgctaccagttcctgctttcctatctcgcggccttcgtcagcgggctccgtgagttgaatcccagggttctgctcagcggcttttccaacgtccggaccatggggcagttccaggccatgctgctgccgctgatggctgcgctggggttgtacctgcgagagaccgggcggttcagattgtcctggcttgtcatgctgctgctggccatccaatggtgcatctccttcgccttggctggacgcgggctctggttgggtttcgccgtcgcgcatctcgcgctttgctggatcggccccgtggggcgccgctttttgatcgtccagttgtccgcggcattcgtcgggttggcgctctatttcctgttaatggttgccttgccgacctggctaggtatcgacatgaccctcatgtccggtatgcgcagtggtctgtctctgcgcgacgtgttgtggcgagatgcctggggcatgttcgtagcccatcctttgcttggggtcgggcccatgcatttctcggcggtgccgaacagcgtcggtgcccacccgcaccagatgctgctgcagtggttcgctgaatggggcggggtcgctggccttctggtggttggactgatgacccttggtctgcttcgcggcgcgcgttacctgcgtgaacagggcgatccgatggatgccggactgtggctggccctcgtttcggtcctggtcctggcccaggtggacggcgtgttcgtcatgcccttcacccagaccgtattggccttgctggtaggcatcgccatggcacgctggtcgaagccggtcgcgccgtcccccgcacagcgctggctctgtcggggcctggctgtcgttgtcattgtcgtgctggggcgcgtgctgctgctcgaggtgccggggctgaccgcggccgaggagcgctacctggaaatccacggcggcggtgaggcgccacgtttctggattcagggttggattcccatgtga

SEQ ID NO: 323757 - DNA, 849 bp, Pseudomonas aeruginosa
atgcctaacctcacccttgccgacctccaaggcgaaatccaggccaacgtccgcaccgccctggcggaagacgtcggcggcggcgaccttaccgctcatttgatcgatccacagcgcgaggccgaggcccgggtgattacccgcgagcacgcgacgatcgcgggccgcgcctgggtcgacgaggtcttccgccaggtcgatccccgagtgctggtgacctggcaggtggaggacggccagcgagtcgagccgaaccagatgctgttccagctaaaaggtccggcccgcgccctgctcaccggcgagcgcagcgcgctgaacttcctccagctgctttccggtaccgccacccgcagccagcactacgccgacctggtcgccggcaccgcggtgaagctcctcgacacgcgcaagaccctgcccggcctgcgcctggcgcagaagtacgcggtcacctgcggcggttgccacaaccatcgcatcggcctctacgatgccttcctgatcaaggaaaaccacatcgccgcctgcggcggtatcgatcgggcaatcgccgaagcccggcgcatagcacccggcaagccggtggaagtggaagtggagaacctcgatgaactgcgccaggcgctggaggccggcgccgatatcgtcatgctcgacgaactcagcctggacgacatgcgcaccgccgtcgccctcaccgccggccgtgccaagctggaagcttccggcggaatcaacgagggcaccctgcgcaacatcgccgagaccggcgtcgactacatctccatcggcaccctgaccaaggatgtcagggccgtcgacctgtccatgcgcctcaccctctga

SEQ ID NO: 323758 - DNA, 2022 bp, Pseudomonas aeruginosa
gtgaagaccgtactctatcccgccatcgcgctgatgaaccggctcagcttcggcatgaagttcggcctgatcagcgtgctgttcttcctgccgctgctgatcaccagcttctatctggtgcgcgatgcctatcgccagttcagcgacacccggatcgaactgcagagcttgacgctgctgggtagcggacttcagatccggcgtggcctggagtccctcaacgatctgttgcagatcaatgcggtcatcggccagtccggcaaggccggcgatctggaagcgcgcatcgcggacgtccagaaggggctgcgcgggcggctcgaggcgctggcgccgctcagcgaggatggtgcggcggtagccgaattcgaggcccagcgcgaccggttgctcaacggcttgcaggccgtggaggccgaagggtccctgcagggcaagggcgcacgggcggagaagctgctcggtagcgcacaggtattcatcaagttgctcatcgcccaggccgggctcagccaggacagccagcgccaggtgcgccagctcagcgagctggtcggttcgataacgccggaggtgacggcggccatcagcaaggggcgcgccatcggcgcctactccctgggccagggtttcctcaattcgtcctccagcgcgcggctcgacgaactgctgctggagttcgagaaactgcatggcgagtatggcctgaagctgcaggagtccctggccggcagcccacagctgctcgaggaggccgcccaggccagtcgcgagaccctgaagagcctggggcagttgttcgaggaccgggtgatcgtggccgagacgctggataccccgtggacgcagttctacgatcaggtcagcgcggcgatggacaagacctaccagctcgacgacgccgttctcggctatctcgatacccagttgcaaaagcgcctgcaacaggtgcgcacgcagatgctgttgctagtcgccgcgctggccgtggttttcgccgcgatcctatacctctacggcggtttctacgtttccacccgcgccaccctgaaggatctcgggcgaatgatggagcgcgtcgccggcggcgacatgacggtcagcttccaggcccgcagccgtgacgagctgggcgagctgggacaatcgttcaacgaatcggtggcgaagatccacgacctgatcgagcgggtcagccagaccgtcggcgaggtcgagcggcagaccctgcgcgtcgagtcggtgtcggccgaaagcaaccaggcggtagccgggcaacgcagccagatcgagcaggtggccacggcgatgaaccagatggccgctaccgcccaggaagtggcgcgcagcgcggcgatggcggtgagcagcgcgaacagcgtgaaccaggaaaccctcagcgggcgcagcctggtcgagtcgcaggtgggtagcatccagcgcctggccggcgagatcgaccagtcggtggcggcgatcaatcgcctggccagtgacagcgcctcgatcagccaggtgctggatgtgatcaagggcatcgccgaacagaccaacctgctggcgctcaatgcggcgatcgaggccgctcgtgccggggagcaggggcgcggtttcgcggtggtggccgacgaggtgcgcacgctggccaagcgcacccagcagtccaccgccgagatcgaacagatgatcctgcgcctgcagggcggcgtcgatgcggcggtgaaggcgatgggcagcagccaccataccgccgatggcacggtcaacgagtcggcgcaggtgcagcaggcactggagaatatcctcggcgcggtgggcatgatcgtcgaccagaaccagcagatcgccgccgccgccgagcaacagaccgccgtggcccacgatatcgaccagaacatcgtcgagatcaaccaggccggcgagcgcaccgcggaaggcgccagccagaccgaacgggccagccgcgaactgggcgcccaggtgacccagctgaaacgcctgatcggcgcgttccgggtgtag

SEQ ID NO: 323759 - DNA, 2262 bp, Pseudomonas aeruginosa
atgtcgcgtcagtccacggataccgccgtttcttcgcaacgtctgctggcttcggccatcggtgtggccatcaccgccatcgccgcaccgcaggcagcccacgccgacgaggccgggcagaaaaagaccgacaaggaccgcgtactgtcgctggatgcggccaccatcgtcggcgagcagcaggacgaaaccacctacaacgtcgaccgctcggcgtcgaagaagtacaccgcgccgctcttggatacgccgaagaccgtcaccgtgatcccgcagcaggtgatcaaggacactggcgccctgaccctggccgacgcactgcgcaccaccccgggtatcaccttcggcgcgggcgagggcggcaaccccgcaggcgaccggccattcatccgtggcttcaacgccgagagcgatacgttcctcgacggtatgcgcgacgtcgcctcgcaaacccgcgaggtgttcaacgtcgagcagatcgaggtcagcaagggcccgggctcggcctacaccggcgccggctccaccggtggcagcctgaacctgatcagcaagaccgccaagcaggacaacttcaccgacgccggcttcacctggggctcagaccagactcgccgcactactctcgacgtgaaccggatgattggcgacaacgccgccttccgcctcaacctgatgaagcacgatgcccacgtcgcagggcgcgacgaagtcagcgtcagccgctggggcgtggctccgaccgttaccttcggcttcgacacgccgacccgcgccaccctgtcctattaccatctcagcaccgatgacatgccggactacggcctgccgctgaccaacgtcaaccgcagcaaagccaatccgagcaagccggcctcggtggatcgcgataacttctatggcctgaaggaccgcgactaccgcaagagcaccaccgacagcggcaccttccgcatcgagcatgacctgaacgacaacctgaccctgtcgaatagcacccgcctggtgcgcacgacgctcgactacatcgtcagcaaccccgacgacagccgtggcaacgttgccaacggctacgtctaccgttcggcgaaaagccgcaattcgacctcgaagggctgggtcaaccagaccgacctgaaggccaacttcgaaaccggcttcatcaagcacaccctggtgaccggcctggagttcagctacgaggacgtgcacaaccgtccgtacgccattacttccggtggcggcgccggcaacacctgcaatgcacgattgctcgccagtggcgactgcaccagcctgaatcgcccgactccgggcgacaactggaccggcagcatcaccgacggcctggcctataccgataccgacaccaagaccagcgcggcttatgtgttcgataccctgaagctaagcgaacaatgggagctgaatctcggcctgcgctacgacgacttcgataccaagtccagcggctaccagacggctggccgcaacggtcccgccggctacttcaagcgcgagaacaacagccacttctggaactaccagaccggtctggtctacaaaccggcgcccaacggcagcatctacctggcctggtcgacctcgagcaaccccaccggcgagaccggcggcgagggccaggcggacatcagcgtaggcaacaacgggttggatccggagcgtaaccgcaacctcgaactgggtaccaagtgggccttcttcgacgatgctctgtcgctgaacgccgcgcttttccgcaccgacaagaccaatgcccgggtcgcttcgccggatgtttccactcttcaggtactggacggcgagcagcgggtgcagggcgtcgagctgggcttcaatggcaagctgaccgagaagtggaaggtcttcggcggctacacctacctcgacagcgaaatccgcaagtcgacggtgaagagcgacgaaggcaataagatgccgcagaccgcgcagaacaacttcactctgtggaccacctacgatctgttgcagaacttcactatcggcggtggtaccacctatgtggacaagcagtacggcaacactgcgaactctacctatatcccgtcctactggcgctatgacgccatggccagctacaaggtgagcaagaacgtcgacctgcaactgaacgtgcagaacctgaccgacaagcgctacttcgaccaggtctacagcacgcacatggcccacgtcgctccgggccgcacggcattgctcggggtgaacttccacttctga

SEQ ID NO: 323760 - DNA, 756 bp, Pseudomonas aeruginosa
atgaacgacaccggccggcgtatcctgctcaactgcgacatgggcgaaagctttggcgcctggcgcatgggcgacgatgtccacagcatgccgctggttgaccaggccaacctggcttgcggcttccacgctggcgacccgctcaccatgcggcgcgcggtggagctggcggtacgccatggcgtgagcatcggcgcgcacccggcctatcctgacctgagcggcttcggccggcgctcgctggcctgctctgccgaagaggtgcatgccatggtgctgtaccagatcggcgcgctggacgctttctgccgttccctcggtacccaggtggcctacgtcaagccgcatggcgcgctgtacaacgacctggtcggcgacgatgagctgctgcgcgccgtgctcgacgcctgcgccgcctatcgcaagggcctgccgctgatggtgctggccctggccgacaacggccgcgagctggaactggccgacgaggccgacgtgccgctgctgttcgaggccttcgccgatcgcgcctacctgccggacggtcggctggcgccgcggcggcttggcggcgcggtgcatcacgatccgcagcggatcatcgaacaggccctggccatcgcccgcggcgaagccttccccgactacgacggcaacccgctgcgcctgaccgccgacagtctttgcgtgcatggcgacaacccgcagtcgctggcggtcctccggcgcctgcgcgcggccctggacagcctgtga

SEQ ID NO: 323761 - DNA, 603 bp, Pseudomonas aeruginosa
atgtggcagagctatctcaacggcatcctggtggctgccggcctgatcatcgccatcggcgcgcagaatgccttcgtcctcgcgcagagcctgcgccgcgagcatcacctctcggtagccgcgctctgcgtgttctgcgacgcggtgctggtcagcctcggcgtgttcggcctggccaagctgctgctggaaaacccgacgctgctggccatcgcccgctggggcgggatcgccttcctgacctggtacgggctcaaggcgctgcttcgcgcgttgcgcccggacgccctcggcaacgccgcggaaaccgggccacgctcgcgcaaggcggtgcttctggcggcactggcggtcaccctgctcaacccccacgtctatctcgataccgtacttcttatcggttcgctcggcgcccagcaggccgcgccgggcgcctatgccctcggcgcggccagcgcctcgctgatgtggttcttcgccctcgccctcggcgcggcatggctggccccctggctggcgcgcccggccacctggcgcctgctcgacctgatggtggcggccatgatgctgggcatggccgcgcaactgctgttccggggataa

SEQ ID NO: 323762 - DNA, 1053 bp, Pseudomonas aeruginosa
atggctactctgttcgatcccatcgtgctcggcgacctcgagctgcccaaccgcatcgtcatggcgccgctgacccgctgccgcgccgatgaaggccgcgtgcccaacgccctgatggccgagtactacgcccagcgcgccgatgccggcctgatcctcagcgaggccaccgcggtcacgccgatgggcgtgggctaccccgacacccccggcatctggtccgatgaccaggtccgtggctggagcaacgtgaccaaggcggtgcacgccgccggcgggcgcatcttcctgcaactctggcacgtcgggcggatttccgatccgctctacctgaatggcgagctgccggtggcgccgagcgccatcgccgccgaggggcacgtcagcctggtgcgcccgaagcgtccctacgtcaccccgcgcgcgctggacaccgaggagatcgccgacatcgtcgaggcctaccgccagggcgccgagcgggccaaggccgccggcttcgacggcgtggagatccacggcgccaacggctacctgctcgaccagttcctccaggacagcaccaacaagcgcaccgaccgctacggcggctccatcgagaaccgcgcgcgcctgctgctggaggtcaccgacgcggcgatctccgtatggggcgcccagcgcgtcggcgtacacctggcgccgcgtgccgactcccacgacatgggcgattccaaccgcctggaaaccttcagccatgtcgcccgtgagctgggcaagcgcggcatcgccttcatctgcgcccgcgaagcgcaggccgacgacagcatcggcgtagccctgaagaaagccttcggcggaccctacatcgccaacgagcagttcaccctcgacagcgccaacgccatcctggccaagggcgacgccgatgcggtggccttcggcgtccccttcatcgccaacccggacctggtcgaacgcctgcgccagggcgccgaactgaacccgccgcgcccggaaaccttctataccggcggtaccgaaggctacctggactatccgaccctggcctga

SEQ ID NO: 323763 - DNA, 1158 bp, Pseudomonas aeruginosa
gtgagcggcccggtctttccctggcgcagcgacaaccgcttcgccctgctcaatgacggcgtgcggttcttcccgcgcatgctgctggccatcgaggcggcgcagcggagcatcgagctggagctgtacctggtggaagacgggcattgcgccgaactgtttctcgtcgccctgctggatgcccgccgccggggcgtcgccgtgcgctgcctgttcgacggcttcggctgcctcggcctgggcagcgcctggatccagcgcctgcgcgaggccggcggcgaactgcggctgtacaacccgctgcgctggaagctgactggcggcaatctctaccgcgaccatcgcaagctgctgctggtggacgggcgcctcggttatgtcggcggcgccgggatcaccgacgaattctgggaaccggtcagcgacgtcagcgcctggcgcgaggtgatggtcgagatggacggcccggtggtggcggactgggcggcgctgttcgagcggcaatggctggcctgtctcgaagagaaagcctggaagccccgcgagggcatgacccttacccgccttccgccgcagccgggggcggcccgtgggttgggccgggtggcctacgccgacgcccgccagcaccgcgacatcctgcaatcgctggtccgcgcgctgaacggctcgcgccgacggatctggctggcgacgccgtacttcctgccgacctggaaggttcgccgggccctgcgcaaggccgcccagcgcggcgtggaggtgcgcctgctgctggccgggcggctcaccgaccacgccccggtgcgctatgccgggcagcgctactacccgcgcctgctgcgcgccggcgtgcgcatccacgaataccagccgcgcttcctgcacctgaagatggtcatggtcgacgattgggtgagcgtcggctcctgcaacttcgatcattggaatctacgcttcaacctcgacgccaatctcgaggccctcgacccggacttcaccaatgaggcggcggcgagcctgctggcggacttcgccgacagccgcgaggtgaccctggcgatgtggcgcgcgcgacccctgtggatgcgcctgcaccagcgcctgtggggttggcttgaccgggtagtggtgaatttcctcgaccgccggcgctag

SEQ ID NO: 323764 - DNA, 1287 bp, Pseudomonas aeruginosa
gtggcaacgcccgactccaaggaacgtttcatcggactggaatggttgcgcttcctgctcggcctgtacgtggtggtgtaccacaccctgcatacctatccgaaagagcagaagtttcccggtctcgacgaactgaccagcctggggttcttcgccaccagtaccttcttcgtgctttccggcttcctcctggcccatgtctacgcacgcagcggccggttgcgcgaaagcgcccgcagtttctggaccaagcgactgtccaatctctatccgttgcacctgttctccctgctgctgtcgatcctggtgttgctggccctcagccacctgggaatcggtcccgagctggacaaggccaccccgcgcttcgtcatctacgacaccaacgaagtgctcggccgcacccacccggaactcttcctgcactggatgagcaacaccgaactgttcgtcaacagcatcctgcagatcctcctgctgcaggcctggaatccctattacctgaccttcaacgcgccgttgtggtcgctgtcgacgctgatgttcttctacctggcgtttcccttcgtcgccccgcggctgatgcgcagccggcacaagtggaaggtgctggcgctggtctggctggtctacctgatcccgccggcgctggtagtggccagcgagagctacgggatcccctggaccggcctgctgcaccgcaatccgttgctgcgcctgccggaattccttggcggcatcctggcctacgggttgttccgcggctaccgcgaccgtggcatggtgccgggacgcggcctgctggccgcgctggtggcgctggtggtggcggccttcctggtggccgactacctgttcacccagggcgccaaacattggtacttcctgctgcacaacggcctgctgctaccggcccagttgctgctggtgtgcctttgcgcgctgcccgccgacccgaagagcgctttcgtccgccactggtcgccgcgcctgggggccgcctcgctgtcgctgttcgccctgcatgtgccgatgttcaccctgttctcccgtagcgagcgccttatcgccgtgccggggcgttgtctcgacgactggcgcgcctgcaccgaggcggcggccgcgctgccatcgtcgctgctctactacccgctgttcctggtcctgctggtggcgttctgcgtgctgttccaggagcgcggcgtggtgccggtgcgcaagtggctggtgcgccggctgatgccggcgccggcgccggcgctggccaaggtgccgcgcccggcctga

SEQ ID NO: 323765 - DNA, 1491 bp, Pseudomonas aeruginosa
atgtcgcaagcgaatgagttgttgatcggcgctggccccgatggccagccggtagggcaggcctggcgcctggccaaccgtcatggattgatcgccggcgccaccggtaccggcaagacggtgaccttgcagcacctcgccgaatccttcagcgatgccggtgtcgcggtattcgccgccgacatcaagggcgacctgtgcggcatcgccgcgccgggcaacccgcagggcaaggtcgccgaacgcatcgccagcatgccgtggctgaactaccagccgaaggcctacccgaccacgctctgggacatcgccgggaagaccggccacccgttgcgcaccaccatcagcgagatgggcccgctgctgctggccaacctcctggagttgaccgatagccagcaggccgcgctgttcgccgccttccaggtggccgaccgggaaggcctgctgctgctcgacctgaaggacctgaaggcgctgctcaaccacctgaaggacaatccggagatcctcggcgaggaccgggcgctgttcaccggcgcttccgggcaggcgctgctgcgccgcctggccactctggagcagcagggcgccgaggccttcttcggcgagcctgccctgcaactggaagacatcctccgccccgagccggacgggcgcgggcgcatccacctgctcgacgccagccgcctggtgcacgaggcgccgaaggtctacgcgactttcctgctctggctgctggccgagctgttcgagcaactgccggagcgcggcgatgccgacaagccggtgctggcactgttcttcgacgaggcccacctgctgttcaacggcacgccgaaagccttgcgcgaccgcctggaacaggtggtccggctgatccgctcgaaaggcgtcggggtgtacttcgtcacccagtcgccgggcgacctgccggacgatgtcctggcccagctcggcctgcgtatccagcatggcctgcgcgccttcaccgccaaggagcagaaatcgctgcgcgcggtggccgacggtttccgcccgaacccggcgttcgacaccctgggggtgctgaccgaactgggtatcggcgaggcgttggtcggcaccctggaggaaaagggcacgccggccatggtccagcgcgtcgcggtggcgccgccctattcgcggatcggcccgctgagcgacagcgagcgcgctgaactggtccagcggtcgccgttgaagggtcgctacgaccagccgatcgatcgcgagtcggcctacgaggtgctggcgaacaaggcgggcgccaagcccgaggtccagggccaggcgactgctcagcaggaaagctcgtccggcgtcggcggcatggccgggcagattctcggcagcctgctgtccaattcgacggtgaagagcgccatgcgccaggcggccaaccagttgagccgggagctggtgcgtggcctgctcggctcgttgatgggcgggaagaagcggcgctga

SEQ ID NO: 323766 - DNA, 225 bp, Pseudomonas aeruginosa
gtgcggaacgcaaaggtcaattcccaggtgaagcaactggtggccgccctcggcgccgaggcgcctgcggtggcggcgttcttcgtcgggctggatgacaagttcctggtcgacagttgccatgagttcgggttgctactggccaaggctggcgcttaccggacgaagtgggcgacagccggttccgcgccgtcgaccgattggactgaccaggtgcagctatga

SEQ ID NO: 323767 - DNA, 684 bp, Pseudomonas aeruginosa
atgacccgcaggcagttcgaaccgcaatcggtcggtgctgtgctggcgcatgtgaatcagggcgcggggctgcgccccttgtcccagccggcggtgaaggtcgatccccagacgagaggcgaggtcgaccggttgttcttgcggatcaaggcgatctgccctggatggcgaagctcctggcccagcgatgaggtcgagaacgccgcgaaggcggagtggctggcagagatcgtccggcaacaggttgcgcgccgcgagcaactgcaggccggggtaagagcgttgagcgcgcaggccaggccgcttgttccgtctgccggccagttctgcgcctggtgctgggctcctgaggtcttcggcctgccatccctcgatgacgcatatcgcgaggcgctggccaatacccacccagccatggtcggagccgcgaaatggagttgccctgcggtgtattgggcagccgctggcgctggattcagccggctgcaggctctggcaagaaaggatgggctggcggcgctggagatctcgtaccgacagatcatcaagaagctggcgcgcggcgaggcgctcgggaaggctccggagggagaggtcacccaccagaaagcgcgaacccaatccgttggaattgctgcccttgcgcagcttcgaaaacaactcaaaggaggagatcgctcatga

SEQ ID NO: 323768 - DNA, 207 bp, Pseudomonas aeruginosa
atgaagtggagtgtactcaacgactatctgatggttagcgacacccagccgccctacaaggtctgcaagctcctggtcgccggcgaggctcactaccgggccagcgtacagggtgagttcatttgcaccccggttgcgactgcgaaggaggcgtgcggtgtttgcgagcgccatcaccagatcacctatccgcgggaggtggcatga

SEQ ID NO: 323769 - DNA, 582 bp, Pseudomonas aeruginosa
atgacgttgtccgcacggaagccccggccgaagaagtgcgcagtgtcgacgtgccgcgcgcccttcgtcccggtgaagtcgtttcagacgtggtgcagcccagagtgcggaattgtcatcgctcggcagaagcaggagaaggagcgcaaatcgatccagcagcgcgagcgccgcgaggtcaaggttcggaaagagaagttgaagagccgtgcagaccacttgagagaggctcaggccgcattcaacgagttcatccgctggcgcgactgggaccgcccctgcattagttgtgggcgctttcatgacgggcagtatcacgccgggcattaccgctccgtcggctcccatcccgagttgaggttcgacgaggacaacgtccacaagcaatgcgccccatgcaacaaccacaagtcgggagacgtcgtgaactaccggatcaacctggtggcgaagatcggcgctgcggctgtagcgcgcctggagggtccgcacgatgcaaggaagtggactgtggaagagatcaaggcaatcaaggccctgtatcgaaccaaggccagggacgcgaagagggctgccgcatga

SEQ ID NO: 323770 - DNA, 297 bp, Pseudomonas aeruginosa
atgaagaagcatggtccggatcttacgaacaagccgcgtcacctggttccgtgccccgcatgcaatggccacggtcagcaccggggagtgttctacgacattgattgcgacgcgtgcggcgccgctggcttcgtcgacggggcgacggggctggcgctggagcagcgggatgcggttgtgcaactgcggatgtgggttaagcggttgcttgaagaacagcgacgccaggcgagcaggctggcgcgagaagagaacaaccagaggggcgccggcggctcccacttcagaggcgactga

SEQ ID NO: 323771 - DNA, 375 bp, Pseudomonas aeruginosa
atgaacatcaaggcgttggaatttctgatggagcaatacgggctttgggtttggtccgacaatgggacgcctcgcggctcttcgcccatgctggcgctgatgaaacggaacccggcgaacgaaaaacggtttgctgctgtgatcccctgcatcagtgatgatcgggcgttgcaagtagaccggtttctcgcacgcctctacgacgaagacccggatgccatccgcagcctgatcctctacttcatccatggcatgtcgtaccgagatatccaggaccggatggggatcagctacgcggacgcacgcatgctggttcgagcaggcctgtcggctctgctggcgtgcttcgtgatggaggataaaaaggctgcctga

SEQ ID NO: 323772 - DNA, 333 bp, Pseudomonas aeruginosa
atgaagatgcctgacaaacccgacacttgggcggctctgttcgcctggctgagccagcatgcgccgatcatctacgcctccctgctgtcgtgggccatggctatggccaggatcatctacggcggcggcactcgccggcaggccctcttggagggcgcgctgtgtggtgggctggcgctgacgatcatcagcggcttcgagttctttggcgtgccgcagagcatggccaccttcattggtggctggatcggcttcctgggcgtcgagaagatccgcgacctggccgaccgttacgctgggatcaagctgccgcgtcgagggtctggcgaatga

SEQ ID NO: 323773 - DNA, 618 bp, Pseudomonas aeruginosa
atgaagatcactgccgatcagctcgaccgcgctaccggctgcggtgctgctactgcctcgacttgggtcgaacacatcaacggcgccatggctcggttcgagatcaacacgcccgagcgcgtggcgatgttcctggctcaggtcgggcacgaaagccagagcctcaagcgcctggtcgagaacctgaactactccgccgaggggctgctcaagacctggccgaagcggttcacgccggtagaggcgaagcagtacgcacgccagccagagcgcatcgcgaaccgcgtctatgccaacaggatgggcaatgggtcgccagatacgggcgatgggtatcgataccgtggtcgcggcctgatcatgatcaccggccacgacaactacgccgaagccgcccgcgccctggcgctgccactggtggcgcaaccggagttgcttgagcaacggacctgggctgccatcgcgtcggcatggtggtggaagtcgaggggtttaaacgaactggccgatcagggtcgcttcgagcggatcaccctcaagatcaacagtggctacaacggcgcagacgaccgtgcggctcgcctcgaatgggcgcgtgctgcgctcaagggggaatga

SEQ ID NO: 323774 - DNA, 240 bp, Pseudomonas aeruginosa
atgctcgggttcacgacgaaagacgaagctcgacagctcggcgtctcgcaccatggcagctattacggcattccgatgtggctgggggatgtcgatagcgattgcccgctggcgttcgccaagtgggcgccgcttgagatggtcgtctccctgctctcggtcatcgaaggcatcgtcaactcgatgctcaatcaagagccgacgttcatgttcaaggttggtcggaggatcgaccagtga

SEQ ID NO: 323775 - DNA, 198 bp, Pseudomonas aeruginosa
atgaagaaaaccaattgcgccgcgatgctatcggcactggtgctcgcgtcgtgtacgtcaaagcccgctgccccgcagatggagtgcaccaggctcccggagcctccggcagcgctgatgcaggaagagccgtccttgctgccgctgatggacaagttgtttctgatctccgagccggagtcgagcgacgcgaactga

SEQ ID NO: 323776 - DNA, 744 bp, Pseudomonas aeruginosa
atgatcagcatcaagccggaagggttccagcagcagctcgccgacctgactgagcttgagcagcggcagattccttacgcgacagccacggcccttacgcggaccgcgcaagggctgatggatcgcttgcgcgatgagatgcgtgtcgtattcgaccgcccgaccccgtacaccctgaacagcctccgcatggtgccggccaggaaagaccggctggaagcgcgtgtttggttcaaggacgaagcggacggtgcgcagcctgcatcggtgtggattgcccccgaggtctacggtggcccgcgtcggaataagccggccgagcttcagcttagggccaaggggatactgcccgaaggcaagtacgtggtgcccggcgccggcgcggacctggatcgctacgggaacatcaggcgcggccaggtcaccagggcattgagcggcatccgcggcttcagccaggccgggtacaacgcgaacgctaccgatagcagacggagccgagcgaagggtaatgctcgccgctacttcgtcatgacccgtaagggccagcccataggcattgctgagcgcacaggccgaggccgggatgctgtctcggtcatcatggccttcgtgtctcgcccttcgtaccgccgccggctgagcttcttcgagatcgcgcagcagtacgccgacgagaacctgccacgcgagttcgaggtggcgatgcgcggcgttgctgctcggttcgctgcgaggcgctga

SEQ ID NO: 323777 - DNA, 546 bp, Pseudomonas aeruginosa
atgagcacagaagacctccaaaaaaagcgcggatggctgaacaagtccgagatggccgcgagcctcgggatttctccgcaagcctttgataaatggggcgttgagcctgccgccaagatcggccgcgaggtgttctataccgcccaggcggtgctacagaatcgcctcgatcatgtgacccagaaacaacaacctgagggcctagatgcggaaggtctcgacccgctcgctgaaaagaaattgctacaggagcgcctgcgactgacgactgctcaggctgacgcccaggagcagaagaaccaggtccaagcgaagacccttgttccaactccgttcgccaccttcgctcttgccaggatcgcgtccaagatcggctcgaaactggagacggtctgcaagacggtccgcagccaaatacccgatacaccgccgttggtgctggaggcctttgagcgcgagatagcgctggcccgaaatctggccgtggagtttgctgaagacctaccggaaatccttgatgagtactctgccaccctggatgaatga

SEQ ID NO: 323778 - DNA, 1980 bp, Pseudomonas aeruginosa
atgagtactctgccaccctggatgaatgacctacggaaagcggtcgatctaggtttgcaggggctgtacaagtcgccgccgatgacggcggtggagtgggcggaagatcccgacgacggtttctacatgtcggcggaatcctcgtacaacgagggcaagtggaagacggcgccatttcaggtcgccatcctgaacgccatgggtaacgacctgattcgggtcgtaaacttcgtgaagtcggcacgcatcggctacacgaaaatgctgatggccaacatcggctacaagattcagcacaagcgccgtaatgtgctgatgtggagcccgactgacccagacgccgaggggatcagcaagagccacgttaatggcctgattcgcgatgttccggtgctgctggcgctggccccatggtatggccgcaagcatagcgacaacacgctcgacaccaaggtgtttgcaaaccggcggaccctttggacgctcggcggcaaggctgctcgcaactaccgtgagagatctgccgacgaggtgatctatgacgagctgtcgaagttcgacgccgatattgaaggtgaaggttccccaacgttccttggcgaccaacgtctgcgcggtgctgtttacccgaagtccatccgtggatcgacgcctggtaccgagggccaatgccagatcacgaaggcggccgatgagtctccgcgtcgcctgcggtactacatcccgtgcccgcattgtgggcatgagcagacgctgaagtggggcggtaaagattgcgcctttggggtgaagtacatcgcgaacgatctaggcgaggcctcttcagtttggtacgcctgcgagaacgagcggtgcagcgggacgtttgagcaccacgaaatggtggttgcctccgagcgaggccgctggaagtgcgaagtgtcgggggtctggacgcgggacgctatggagtggttcggcccggatgaccagccgataaggacgccgcgttccgtcgcattctactgctgggccgtgtacagcacgtggaccagctggcttgacctgatcgacgaatggctgaaggtcaagggtgatcgcgagaagctgaagaccttcaccaacaccatcctcggcgaggtatgggttgaggacgagggggagcgggtggagtggcagacactctatgcccgccgcgagaactacccgaaggtgccgccgcaagcgcttgtcctgatgggcggaatcgacacccaggacgaccgctacgagggccgcgtttgggctttcggcctgggcgaggaggcatggcttgttcaccgtttcattctgaccggcgatccggccagcgaggaactgcggcgcaaggtgggcttggaaattcatcggcagttcactcgggctgatggcgttccaatgcgtgtcgagcgttggtgctgggatgctggcggccactattccgatgaggtagaggccgagagcatcaagcatggcgtgcactgggtggttccgactttcggggccagcacatacggcaagccaatcgccaacttcccgaagcgccgcaagcgcaaggtctacaagaccgaactgggcaccgataacgcgaaggagctgatctacagccgcctgcgcattgatgtgcccatcccgtggcaaccgacgccgggctgtgtgcacttcccgatcgacagcgacatctgcgacgaagacgaactgaagcagatcaccgccgagaagaagaagccggtgatggcgaagggtgttcgcgtcctgcgctgggattccggcgggcggcgaaacgaggcgttggattgcttcgtttacgcccttgccgcgctgcgcatcagccagcaacgcttcggcctcgacctcgaccagctggagcgcgtgcgcgttgatcccgtgccggagccggtcgcccaacagcaaccttcgaacgataaccatgccagcacctcccagggctggctcaacactggaagcggaccatggctctga

SEQ ID NO: 323779 - DNA, 216 bp, Pseudomonas aeruginosa
atggctctgacagcgcagcagatgctcgacaaatacctggaggccgaggccgccgtgctggaagggcggacagtgatcttcaacggacgcacccacaccatggaggatatcgagaagatccgcgccggacgccaggagtgggagcgccgcgcagccgcagagcgggaccgcgccgccggtcgccgtcctggcccggcactggcggagttctgctga

SEQ ID NO: 323780 - DNA, 1647 bp, Pseudomonas aeruginosa
atgaacctgatcgatcgactactggaacccttggcccccgagctggtggctcggcgcttggccgctcgcgaggcaatccaggcgtatgaggctgccaggccagggcgaacccacaaggccaagcgtcagccgctgggcgccgacacctcgctacagaagtctgcggtctctatgcgagagcagtgccggaaactggacgaagatcacgatctggttaccggcctgctcgatcgcctcgaggagagggtggtgggcggcagtggtatcggcgtggaaccgctgccgctgcgcctggatggctcggtgcatgctgagttggccatggagatccgcagcgcgtgggccgagtggtcactctcgccggagacctctggtgagctgacgaggccccaggtagagcgtctgatgtgccgaacctggctgcgcgatggcgagggattggcgcagaagctgatgggacgagtcccgaactacacgtttgccacgtcggtgccttttgccctggagctgctggagcccgactacttgcccttcagctacaacaacctgtcgaaaggcattgtccagggtatcgagcgtgacacctggcgccggaaaagggcctatcacctgctcaaggatcaccccggcaacctgcagacgctgggcggcagcctggcggtgaagcgcgtcgaagcggaacggatcatccacatcgcctaccgcaagcggatcggccagaaccgaggcgtgccgatgttgcacgcagtgctgatccgccttgccgacttgaaggactacgaggagagcgagcgggtggcggcgcgcatcagtgctgccctggcgatgtatatcaagaagggcaaccccgacagctacacggtggagcccgggaaggaccggaagaaccgaacgatccccatcgcccccggcatggtcttcgacgacctcgagccaggtgaagacgtcgggatgatcgagagcaaccggccgaaccccttccttgaaggtttccgcaacggccagctgcggatgatcggcgctggcactcgcagcacctactcctcggtgtccagggcctacgacggcacctactcggcacagcgccaggaactggtcgagggctggctgggctacgacctgttgcagcacgagttcatcgactactggtgccggcctgtctatcggtcctggctgcagatgtacctgttggctcggaaggagcgcctgcccgccgacgttgatcaccgcactctctacgcggcggtctaccaggggccggtcatgccatggattaacccgatgcatgaggccaacgcatgggagttgctggtcaaggccggcttcgccgatgaggcggaagttgcccgcgctcgtggtcgagatccgcgcgagctgaagaagtcgcgtgagacggagatcaaggcgaaccgggcagccggcctggtcttcagttcggatgcctaccaccaactggtcaagtccgggatggacccggttgaggcggtgcagaaagtgtatctgggcgtcgggaagatgcttaccgccgacgaggctcgcgagctcgtcaacagatacggcgccggcctacccgtgcctgggccggatttccccaacgagagcaacaatggaggcgccgatgggcagccatcaaaccctgatccataa

SEQ ID NO: 323781 - DNA, 2082 bp, Pseudomonas aeruginosa
atgggcagccatcaaaccctgatccataaaagcctgatgctgccgatggcggcggcgttgactgaggccaacgccccgcatgagtcctggtacagcatcaaggctgccggtcgcggcgtcgccgaggtgctgttgtacgacgagatcggcgtctggggcatcaccgcgctgcagttcgctcgagacctcaaggcaatgggcgacctgaacaagatcaacctgcacatccactccccgggcggcgacgtcttcgaggggacggcgatctataacctgctgcgcaaccacccggccagcgtcgacgtgtacatcgatggcttggcggcctcgatggcctcggtcatcgccatggccggagacaccatctacatgcccgagaacgccatgatgatggtgcataagccctggggcatccagggcggagatgcggacgacatgcgccgctatgccgaactgctcgacaaggtcgaggacaccctggtcatggcctacgccaacaagaccgggaagtccgccgacgacatcaaggcgctcctcaaggaggagacctggatgaatggccgagaggccgtcgctgccggtttcgccgaccagctcactgagccgctgcaagcggccgctcacctttcctccaaacgcatgcaggagttcgcccacatgcccgaagctctgaaaactctactggccccgcgcgcccagacccccgccgcgccgaccaacactcccgcgccgactccggcaccggccgtgccggcggctcccgtggccgccgccccaaccgaggccgatattcgcgcccgcatcctcgccgaggaatctggtcgccgcagcgcaatcactgctgccttcggcgcgtttgccagcgggcacgccgaactgctcgccacctgcctgaacgacatgaccatcaccgtcgaccaggcacgcgagaagctgctggctgccattggcgccgataccaagccggccgccacccctggcgctggcgcccacatccatgccggcaacggcaacctggtgggcgactcggtgcgcgcgagcgtgctggcccgcatcggtcgcggcgagcgccaggccgataacgcctacaacggcatgacgctccgcgaactggcccgtgcctcgctggtcgatcgcgggatcggcgtggcctcgctcaacgccccgcaaatggtcggcttggccttcacccacacttccagcgacttcggcctgatccttctggacgtcgccaacaagtcggtgctggcgggctgggaagaggccgaagaaaccttcccgctgtggaccaagcccggcattctcactgacttcaagccggcgcgccgcgtcggtctgggcgagttttcctcgctgcgtcaggtgcgtgagggcgccgagtacaagtacgtcacccttggcgagcgcggcgagcagatcatcctggctacctacggagagctgttcagcatcacccgtcaggcgatcatcaacgacgacctgcagatgctctcggatatcccgttcaagctgggccaggcggccaaggccaccatcggcgacctggtctatgcggttctgaccggtaacccggcgatgagcgatggcaaggccctgttccatgccgaccacagcaacctgctcactggcgcggcttcggcgctttccatcgacagcctgagcaaggccaagacccagatggccacccagaaagcccaggtagagaagggcaaggggcgcaccctcaacatccgtccgggcttcgttctgactccggtggcactcgaggacaaggccaaccagatcatcaactccgagtccgtgccgggcgccgacgtcaatagcggcatcgttaacccgattcgcgcattcgcgcaggtgatcggcgagccgcgcctggacgatgcctcggcgaccgcctggtacatggctgccaagaaaggctctgacaccatcgaagtggcctacctggacggcgtcgataccccgtacctggagcaacaggaaggcttcactgtcgacggcgtggccagcaaggtgcgcatcgacgctggcgtggcgccgctggacttccgcgggctgcagaaatccaacggtgcctga

SEQ ID NO: 323782 - DNA, 318 bp, Pseudomonas aeruginosa
atggcgaagaactatgtggaggacggcaacgtcctgactctcattgcgcccgctggcggcgttcagtccggcgtacctgcggtgatcggagacctggtggtggtgccgctggtagatgccgccgcgggcgagccgttcgccggaaaaactggcggcgtctggagcctgcctgctgccgcaggcctgacccagggtgccaagtgcagcgtgctcgatggggagctggttgctgctgccactgccgactcggtggcgttcggcaagatcaccgagcccaccgttgacggcttcgcgtcggcgatgctgatccaacaatga

SEQ ID NO: 323783 - DNA, 330 bp, Pseudomonas aeruginosa
atgagcgcgccgggccgttttggccggctgatccaacggctccacgagcgtgggcaagagcggttatctgatgccgtgggcgagttccgcggcatcggtcgccccccgatcaaggggatacctctgcaggtcgatcgaaacctcagttacgacgggcctgatggggttttcatcacggacaaggttgggatcagttggctggcgaaagatgttcccacggcatcgcgtggcgacctcttcgttatcgggtcgtcgcgctatctcgtcgaaaagctcattgcgaacgacggttggttgctgacggcagcaacgatcgaggaggaagcatga

SEQ ID NO: 323784 - DNA, 471 bp, Pseudomonas aeruginosa
atgaagccgaacgtgctcacgatcggccgcttggccttgctggcgcgcctgcaaaccatcacgccaaaccagggataccggacggacgcgggcactcgcgtgctctctgggtggtttaacgagctggtcaaggagcggcatgagggctttccgctgattgtcgtccagccgggcaaggagcagccgccggagcatcttgatgccgccgttcgcttccatcgtggcttcgacgtggtaggtgcggtgcaaggtgggtatgaccactatgaggaggctctggaggacctacagctagaccttctggcgtgtctgatgcctgcccccaagggtcagttcctgcgctggctgccccgagagcgcggcattaccggggtgacgttgggggcgcctgagccgtacccgccgggcgatggagtggccgctgccgtgattcgaatccctgtgtatctgaaaaccatcatcgaggcgtaa

SEQ ID NO: 323785 - DNA, 195 bp, Pseudomonas aeruginosa
atgaagagcgatccccaggtgccggccgcggtcgacgccgcgccgccggctgcgctgaacaaggccgtcgaggtcaccctggccaaggtgcattggcaccagggcaaggagaaggcggccggcgaaaagatcaacgtcagccctgaccaggttgaattcctgcgccgcgaaggcgtgatcaagaaggaggcctga

SEQ ID NO: 323786 - DNA, 753 bp, Pseudomonas aeruginosa
atggctatcgagaaagagacgtacgtgatcggcggacccttcaagatccgcgagtccggcgctaccacccccttccagttcgctggcctggtgtccactatccaacagaccatcgagaccaacgagatcactctgccggataccaccaccccgcagggcggtgagtacgatgccgtttcgcgcatcacttcggtcggtttgtcgatcaacttccgcgagctcaagaccagcatcctggctgccttggtgtggggtgacgccaccaacgttccttctgccacccacaccgacgaagcgcacaccgccgttccaggaggcacgatcgcgctcgacttcatgccgctggagatcaccagcgtgaagagtgatgacggcaccacgacctacgaagagttcgacgactggaacatgaccggcgccggtatcgaaatcgttgaagggggtgcgatctctgcggccacgccgatcaaggtgacttacaagtccgccaccgttgatgtgatcgaagcgctgaccaacagcggcaagacgttcgaatgcctcttcgagggtgagaacgcagccggtacccagcgccgtatccaggcgcgctatttccggtgccgcctgaacccgtcgagccaacaggactggctcaataccgaagacttcctcgctgccgaggccactgccaaggttctgatggacccgaccaaggtcggcgctggaaagtcgaagtacttcaacatcaagaaggaactggcgacggtgtga

SEQ ID NO: 323787 - DNA, 2484 bp, Pseudomonas aeruginosa
atggctgacgtaaagatccggctgaccgctgacctcgatgatgcgctgcgcgaggtgtcaggcttccgcaaggaatatgccgaactggtcaggcaggtcgcgcaacctctcaagcgtttaaacgatttcactgctctcgaaagcaccctcgaggacacgcaacgccaggcgcgttcggcgcgcgagcagatccgtacgctcggcaacgagctggcatcgacgatcaggccgagtcgcgaattgcagcaggcttaccgggactccatttcggacctgcgaagcctggagcgggcagagaccgtccaggtagccaagctcggagcgatgcgccgggagttgaagcaggccgggctggatacgaggagcctgacatccgaacggcagcggctccagcgggagctggatcgaaacctccaggcgggccggaatgacgcggccaccaccagcctccggcaacaggccgcagcgatcaagcagagcgcgatagagcagcgccgcttcaacttggagcaagcgcgtagcaccctgggagtcgccagggtgcgcgaactgcaggctgctatcgggcagttgaaccagcaatatcgcttgcttcggtcgagcggaacgctgtccacaagggaacttgccgttgcgcagcgggcgctcaaaaagcagatcgcggagaccaagagcgaactcaactcgcttggtgccggctcgcggctgtcgagcatcggctctctacgcgggagcggtccagcgctggcggttgcgggtctcgcagccgcagtaggtgctgcaacggcgaagctagcgaacggcgccgatactgttggccggctcgattcccggcttcgcctggcgacccgctcgcaggaagagttcaacactgcgcagatcgaactcgaccgtatcgcggatgatgttcagggcgacgtcggcgacctcatcggcctttattcgaggttgcagcgcccgcttcgggatgcgggcatggatcagcgcgccgccctcgaaaccgtagaggcggtatcccttggcctgaaaatcggtggagcctctgccgaggagtcggcgtcggtcattacccagttctcccaggctattgccagtggcgtcctgcggggcgaagagttcaataccgttctggagtcctcggatcgaattgctggcgctctggcggactccttcggggtgactgttggccggcttcgtgagatggctgccgccggtgagttgacctcggagcagatcgttatcgcgctgaggaaggaacttccgaagctccgcgaggagatggcttcgtttgcgccggagatcggcgcggggttgaaccggatcttttccgaaacccagaaatattgggggcgcagagcgaaggaaacaggcatcgtcgactgggttgcgaaccagttgaacgatgttgccaaggggatcaacacggcgaatacgctggtgaaaaagggcgagggcagcctcacggccaccctcgccgccgagaaggcgcgtcaagagcagatcgtgaagcgccagaacgatgccctgaagcgggctcgggatcagaacgtcgctgatctccagtctgaggttgttcggaccaaggccctacttgagcagtccaccaagaacctcaacgacgcgctttcgcgccaggcagatgtccgcaaggagtttgccgacctggtgaagggcatccaggcgacgcccacctccggaacgcagaccttcggtgatgccactgcggcccaggcctcggctcgcaacgcgctgaccgccggcaacaaccaaaaggcgatcgaggaggcgcgccgcgcgctgcagatccttcagcaactgaaggacgctggcgcgaacagctatggcttcgaaggcgtggccaaagaggtggagcgcatcgccaacaaggccgcagaggtcgaggctggtaatgccaaggctgcggatgacgtcaaccgcctgaacctggccgacctcgaggagcgcatcaaggctgtgcaaaacgtcgaggtgtcgttcggaatggacttcgaaagcgcggagaccttgaagcaacaggtcgccgacatcgccgccggactggctgagcagctcgtgatacctatcacgctggttccgcctccggagatgggcttgcctggcgtgcccagcatcacccccaagatacccgggtttgccactggtacgcagagcgctccccctggtatggcgtgggttggggagcgtgggccggagttgatgatgatgcgcggaggagagcgcatcttcaacgcggtgcagtcgctgcagatgtcgcagaggtatcaacgaactctccccgagatacccgagattccgactgcggcgcttcagcaggcgaatccgccggcagccatgcaaaacctgggatcgctgaccctcaacctgggtggagacgatgccggtttcaccgttttcgggacacacgacacgctccgagatatacgcaaggccgcttcgaagttcgggcggacgcgcccaaaatga

SEQ ID NO: 323788 - DNA, 522 bp, Pseudomonas aeruginosa
atgatcattccgaacgtgatgcttgggggcgtaccgatcgtgatacacggcggcgccccgcagtgtcagtaccaggctgtagatggcggcgtcgagcgattgaggctcagcggaggtgcggcagtacagatgacgcactggcgcaagacggcaatcaccatcagcggttcaggatggatcggcacggggatgcttggactcgacttcgacaacccgttggagctgcgatgcaatgcgtcgcttggcatttccggccgtactgccgccgaccgagtattcacaatccctggagaggttcgccccgatgccagtccgtgggggctggcgctggtcggccgtgagtgggtcagaacggacgtgtcgtccgccggccaggtggtaaccgtgtcggagatcccaggcgcgcaactctaccgcgtcgagtggtggccgctgttccacgtcttcgcgtcggtccctcctgaagcgcttgattcttcgaacaacagccggacctggcaaattgtcgctgaggaaatctga

SEQ ID NO: 323789 - DNA, 1698 bp, Pseudomonas aeruginosa
atgctcaacggtggaccgctcaatagcgctgagctgaactcggccgctcaatccgttgtgcctggtcctgagccgatcattccaggctacgctttcacctggcgagcaatcgtgcgtgttggcgatgacgacgttacaccgctcctgaccggggagatcgaggtcgatcgtgaagagggggcggctggcgtcgcttccttttcgatctatctcggcgacggccctgttgtccctacggactggattggtcgaaccgtaaccatcgactacgcaacggagaccgccggcgagctgagtcagggccggcggtttacgggaagggttacgcagccagcctggaatcctgttcggcgcgtcctggacgtcagttgcactgaccagttgcagcagcgtgtagaggccatggagattgcggccgttgacgccttggtcggcggcgcctggtccgccgatgtgttcgagccggtcgatggacgctcgcggtgggactacgcccaggagcgtttgaccagcgttaccgggagcttggactgttcgccatacggcgctctccgcgtcacgtcatggctttcggtggctcctgccttcgagttcggccaaggctctacggtatacgggtcgcttgcggtcgagttggccgacctgagttcgcagacgaacaggatcgagatcgagtgcgactaccgattcagccggctctggcagttgaacgcatcgtatggatggcagcaccccgggacgggtaacgctgttggcgaggcggggttctgtaattggcgcggcgacgacaccgagctaccggatgtcgagatgatcacctcagcgaccgaaagcagcggccagacgttgttctatgcgacctggtatccacttccgcccacgggcgtctactgcaatccgccggcggcatggagaaatgacttcaccgagctgctgctcggcggaaattggatagctggccggcgctgggtgcagtccgtcacagagcgctaccggctggtcatggaagttcagccgagcgttgcggcgaccggtccgattgtcggtcggcagcgcgcctcgttcgagatcgagtcggacaaggccgagcgctgggaaagcgacccgatcaccggcggcagcaccggccacgacgacgagaaggatggaagccggcgtttgtccgcgctgaactgcttgttggcccagggcgccacgacgctcattgctgcgcatcgcggcacgaccgtgacctgggatgtgccgacgtccatggtcctgccgatcgatcttgtacatacgctccgcctcgatgatcagggcgcgcgtgcggtgggcaagtgtcgacgcattgtcgaccggctcgacctcgcatccggaagcgcgctgaccacgatctctatcgctgtgatgcgaggcggcggtggcgcagcagacccccttgttcctcctgctggctcgtccggtcccgtcagcccaccgtcgggcgggggacagctctcgacgcagcttggaggccgcaacggcagccccccttatgacgatgatgcggacggattctccgggaactggagcaaccgcgatcctggcgccgagttgttcccgcggcgcttttcgttgaccgcaaacgacattccggagacctaccgggacgagcatgcgccggagatcgcggccacctaccgggtatctgtacctgatgacgtactggagatgtag

SEQ ID NO: 323790 - DNA, 411 bp, Pseudomonas aeruginosa
atggcgagagcctggatcaacaactggaagacgacgctgagcgccggcttggcgcctggcgccactagcctgacggttccggatgccgccgccgcgttactgcctctctccggcggtagctgggttctgttgacgctggcggatgccgctggcgcgcagcatgaaatcgtgaaggcaaccgtccgcgcgggcggtgtgctgacgattgagcgccgacaggaaggaacaactgatggcacctggccggcgggaacggcgatctatgcagccgtcacggccggcgatctcatggcactgcaagcgcgaatcgcggcccttgagggcggcactcccgacggagccctggtcgatgcgagcggttcggccctcgtcgatggcgccggaaacaacctgatcatggagaacatttga

SEQ ID NO: 323791 - DNA, 423 bp, Pseudomonas aeruginosa
atggctctatcagatgagcgccgcggcatcggcgcaaggaacgaagcgatccgccgcgccggcggccagcgggtcgaagcggagcgacgcggtgaccagggcttgacggcggcgctcaaccggctgatcgagccggagcgtcaggcgcgcgcactgcgcaagatcgatccgcgcggcgccctggatgcaaagcgcgggcgggcggactacaaccccgccggaaagcagctcggtgggggtggcggtattgcgagccccctgatcgaagaagatgccgcccagcgcgaatactacgaactgcagacaatccccaccagcgatggcctggcctggctccggtatcgcagcgtgaagaagatcgtcatgaccgacgcgtcaggcgcagaagttgtgatggagtacgcgaacgatgtttcccaatag

SEQ ID NO: 323792 - DNA, 1500 bp, Pseudomonas aeruginosa
atgtttcccaatagcccgctcgatgaagctccgcaggtatgggggtggccatggcacggcctaatacgacagccaatcaacgccgttgattcgacattgacgttaccaagcgggcgaacgatgaagatgccggcggtcaggacagcaaatgatactgcgctctggagtgtaggtatgcctgtcccgaacgtcgaaaccgatgaccctgacgagcgctggctcaaccgagcgatcatgcgcggaaccggactagccgaggcatacggaggggtatcactccagccggcattcatccgtgggtacaccgtccgttgcggcgttgaggttacgttcaattcatttctcggaacagcctccgcaatctgctctattcgggatggtgtaacaggattcgttgggcagattacaagcaacaccattgcgccttctgcgctgggtatccccgtccagccagcaggtatgtcttttcaagtcctagatgtaaatcacgacggaacgcgccgagtgttccgcgtcgactatcaagaaactgttgacggaacggtgattgccggcggcatggtggaggtgcgcattagcccaagcggagcgtccggatttcaagctgagttggttgtcgtggctacgtggagtcaggtccagtttacaacgttgtccagcagtaagccggacgttgacccggatactcatacgcggttctggtgggacagtgcgagcggctcttacgtttcgggaacaagcgatccccctggcattcctgtggatacaagggtgcttcagggggcatggacggcgactctgcgggcagagtcgattgctgccgcttggtacggagtttcaggagatcttgagttcgtacatatcgaggtatctgtctctcattctctccagcgcgcagcaagtgcggcaggcgatcatgttgcattcaatcaaacggacgattgggtggttgactacagattgcgatctgcgtcaggagaggtgttggagacgctgcgaaataaagtcgaaatatcggggccaatatacaatgacggtggccctgggaccgcaaacataaccgatagcatcagcgggcaaacagtcgcaactggtacccggccgataactctgcaagatcaaaatatctatacgccagacgtgggagatacctacgcgagagggttgaattggggctctcgctaccatgtgtttccaatcgcggccgacggatatctttcgtcgtttgctgcccaatacgcatggccagtccagcgatactccaacaagatgttgggcatcatagcggttcgaaatagcgctatcggaactccagatgagcgctatcggcttgccggagttgcattcaccccgcatggcgtacacggaacccgtcaggttgacgtagatgttggtgcgtattcaggcatccagttcgaggcttggagtaagggcgcatataacccaatcaccggcgacgctatacgcaacgacccgaacgccttctattcctacgtttga

SEQ ID NO: 323793 - DNA, 588 bp, Pseudomonas aeruginosa
atgacgccggcctgtgtacccctgcgcattgaaaaaggggcgacgttccgcgacacgatgcggatcatgcaaccgagccttgtctaccggccgatcacccagatcgcgccggctgctcccgtccggctgaccatccctgggcacggattgcctggcacgtggctggcctggatcgatggtgtccagggcatgcccgaactgaaccgcgctcgacttcggcaattgccccaccgggtcgcgtccatcgacgacaacaccgtcgagatcaacctgctttcagccgttgggctggcgcctgtgggcgggcaattgatctaccagccacccgttgacctggctggcgccgaggtacggatgcagatccgcgacgcgccaggcgggactgtgctgatgacgctggcgctcggctccggccttgagatcgctggcgccggaacgatctcgcgcgagatatcggcatcggctaccgcggcgctggaatggtcggcggcggtctacgacgtggacgtgacatacccggatggaacggtccatcgctactacagcggtccgatcactgtgagccgtgggggagggtgcgatggatga

SEQ ID NO: 323794 - DNA, 192 bp, Pseudomonas aeruginosa
atggatgacaccgccgagccctgggcgctggcgatcgaggttgattgcgagccgcttgtgctcagcgagatgcaggaatacgcggtcaccgtgacgccgccggccgatgtgcttgtggttgttgcgggtgaccaagggcctcccgggagggatggcgtagacggtgcccaatggggcgcgactgattggtga

SEQ ID NO: 323795 - DNA, 561 bp, Pseudomonas aeruginosa
atggcccagattcgatttttcaaagtggcgaccctgccgggtacgctggaacccgattcgttctacttcgtcgagaacggcagctactcggagtcctacctgacgaacagcgccggagtggcgcgctcgatcggtaacagcgcgatgatcaacgcgctgatcaacgaggcgctgtccagcctacccggaaccggcgcgccgatcctgttcgttgcggatatcgccgcgcgcgacgctctggagccggagtcggcgatattcgttctggttcaagacgcttccgccgactcgacagtcgaatccggcgctgcgttgtacgcatggaaccctgcgaccagcgcctggctgaaggtggccgagtatgagtcgatggacgtcgagctcaactgggacgcgatcaacgggcgcccgacgtcgacgccagcgcagatcgacaccgccgtttctcaggcgcacacgcacgcgaacaagtcgacgctcgacaagttcagcgaagacggcggcctggtgcgcttcaacggccagccgatcccggccgagtggaatgggacggcctggtaa

SEQ ID NO: 323796 - DNA, 282 bp, Pseudomonas aeruginosa
atggccgtcctccagacccacaaggtcgtggcgcaactccccgcgtccctggagccgaacgcgatctacttcgtccggcgcagcaccggctacgaccagttcgtcaccaatggcgcgggtgtggtggtggcctatccgatgaacgtccgcatccctgcggctgtgccgggctatctcgccgacggctccatgcttcggctcacgatgaaccctgacggccaactgccggcgtacaccgccggcggcgcaactctcaacctgcaggtgcttttcaatggctga

SEQ ID NO: 323797 - DNA, 303 bp, Pseudomonas aeruginosa
atgatcatcaagttgtcaccgtacgcaccactgccaggcagcgacgagcacctgtcgctgagcagggccggcgatgtgctcaccgtgaacggccagtcgttcgacttcactccgctcccggacggcggcgagttgccggccgaggctatcgggtcggagtggttcgctggttccgcagtgcgacgtggcgaccggctggagttgatcctgcggttcccgcttgctgccgatgccagtggcgccgctcgcttccctgaaccgttgctgatcgaggccgatggcccggtggagttaccgcgatga

SEQ ID NO: 323798 - DNA, 240 bp, Pseudomonas aeruginosa
atgatcgactggagcaaggtaaagaccactgaacagcaggcgcaagatcgcaggcaggctgagtacgatgccgcagccgcggcgcgggcaaatgcctaccgcctggaaagtgacccgctcaagaccgaggctgaattcgatgcgatcaaggcaggcaccgagccggactacagcgcctggatcgccaaggtcgaggagatcaaggccaggtataagctgccggacgcgggcggcgtgtag

SEQ ID NO: 323799 - DNA, 273 bp, Pseudomonas aeruginosa
gtgctggtggtgagactcaagaaagggtggacgctgaagcttgatcggaaagtgaacgatgcgaatcgggcgggggtttggtcgttccattgctccgagagcacgttcgtgccgggcatggataacttgctgcggcacgcggccatccgtccggctgagccggcagaagggaagagcaccgaggtagaggtggccatctgtcggccaggtgatccggaggagaagtggattccggtggggaagggcgtggcggtctacgaggcagagcgctga

SEQ ID NO: 323800 - DNA, 294 bp, Pseudomonas aeruginosa; identical to SEQ ID NO: 318659

SEQ ID NO: 323801 - DNA, 360 bp, Pseudomonas aeruginosa
atgacaagcaagggacttacttccgcactgctgctcgcctcgatgttcgccgccacctccggctgcctccagcagaacgcactgacccagggctaccgcaccacccagcccgggcaacccggccaggctcaggtcgcctccgccaacaccccttgcacccccagcgccaccaatgacctgatcgctaccggtcgcagcctgctggacatcaccaccaacctgatcaagacccgcaaccagatgagcgacggcggcagcatcatgcgcgacgtcgacgacgtgcagaaggtcggcaagggccatgccgtactggacagcgtcgagagcatgaccggcggtccgcagcagccctgcggctaa

SEQ ID NO: 323802 - DNA, 1179 bp, Pseudomonas aeruginosa
atgaacctgcgcatcctgctgatactgggagccctgagcgccttcgggccactggccatcgatttctacctgccgagcttcccgaccctggccaaggccttcgccaccgacgtcgagcacgtccagctgagcctggccgcctacttcgccggcctgtccatcggccagttgctctacggcccggtggccgaccgctatggccggcgcctgccgctgctggtgggggtgagtatcttcaccctggcctcggccgcctgcgccctggcgccgagcctggagtggctgatcgccgcgcgcttcgtccaggccctcggcggctgcgccgggatggtcatctcgcgggcagtggtgcgtgacctgtgcgatccgatcggcgccgccaaggcgttttcccagttgatgctggtgatgggcctggcgccgatcctcgcccccgtggccggcggcctgctgctggactggcagggctggcaatcgatcttcgtctgcctgaccctgttcgccgccctggccggcctcggcgtggcgttgtggctgccggaaaccatcccggccgacggcgagcgaccgccgctgtccggcgcgctggggcagtaccggcggctgttcgccgaccgcctgtttctcgcctatggcctttccggcggggtggcgatggccgggatgttcgcctacatcgccggttcgccctacgtgttcatccagctctacgggattcccgccgagcactatggctggctgttcggcagcaatgccgcgggcttcatcgtcatggcacaggtcaacgcgcggctgctgcgctatcgcgggccggcgttctggctgcggcggatcatctggggctacctggcgtgcggcctggccctgctgggcatcgcttcgctgcaaccggccacgctgtggccgctgctggttccgctgttcggatgcgtggccagcctcggctgcatcattcccaacgcttccgcctgcgccatggccggacagggacagcacgccggcagcgcctcggcgctgatgggcagcctgcagttcagcgtggcggcgggcgcttcggcgctggtcggcgtgctccacgacggcacggcgatccccatgactctggtgatcgccgtctgcggcgcggtcgcgaccctgctcgcctggcagaccgggcgcctggagcgccaggccgcctga

SEQ ID NO: 323803 - DNA, 1650 bp, Pseudomonas aeruginosa
atgagccgccgccagacctgttcgctgctgctgatcgccttcggcctgttctacctggttccattgagcaaccatggcctgtggattcccgacgagacccgctacgcgcagatcagccaggcgatgctgctgggcggcgactgggtgtcgccgcacttcctcggcctgcgctacttcgagaagccggtcgccggctactggatgatcgccctcggccaggcggtcttcggcgaaaacctgttcggcgtgcgcatcgcctcggtcgtcgccaccgccctcagcgtcctgctcgcctacctgctggcccgccgcctgtggcgcgacccacgcaccagcctggcgtgcgcgctgctttacgccagcttcggcttgatcgccgggcagtccggctatgccaacctcgacccgcaattcaccttctgggtcaacctgagcctggtggcgctgtggcatgccctcgacgcggggagccgccgcgcgcgcctgctcggctggaccctgctcggcctcgcctgcggcatgggcttcctgaccaagggcttcctcgcctggctgctgccggtgctggtcgccctgccctacatgctctggcagcggcgctggcgcgagctgcttggctacggcgcgctggcggtgctggcggcgctgctcgtctgcctgccctgggcgctcgccgtgcatgcgcgggaagcggactactggcggttcttcttctggcacgaacacatccgccgcttcgccggcgaagacgcccagcactctcgcccgtggtggttctacctgccgttgctggcggtctcctgcctgccctggagcggcctgctgccgagcgcgctgcgccaggcctggcacgagcggcgccaggcgccggtggtcttcctggcgctatggctgctgttgccgctggcgttcttcagcctgagccggggcaagctgccgacctacatcatgccctgcctgctgccgctggcactgctcatgggccacgtcctggtgcagcggctgcgcctggggaacagcgtcgcgctgcgcggcaacgggctgctcaacctgggcctggcgctcctcgcgctggcggccctggcctacctgcaactgcgcaagccggtgtaccaggaagaacccttcgagctgttcctggtcctgctggtgatcggcgcctgggccgccgccggcctcgcccagtggcgctacccgctacgcgcctgggccgcgccgctgctggcgagctgggtgctgatcgcgctgctgccggcagcgatgcccaaccatgtggtgcagaacaagacccccgacctgttcgtcgccgaacacctcgacgaactgaccggcgcccgccatctgctgagcaacgacctcggcgccgcctcggccctcgcctggcgcctgcgtcgtagcgacgtgacgctctacgacaagcgcggcgagctgaagtacggcctctcctaccccgagcacagccagcgcagcgtgcccttggcagacatccgccagtggctctggcaggcacgccaggacggctcggttgccgtgctgctgcggatcaacagcgccagcgaccgctaccagctggcgctgttgccgggcgacggcgaacgctaccggaacggcaacctggtcctggcgatcctgccgcaggtgcgcccatga

SEQ ID NO: 323804 - DNA, 888 bp, Pseudomonas aeruginosa
gtgatccaggccggcctgcgcatcgacgtcgacaccttccgcggcacccgcgacggggtgccgcggctgctcgagctgctcgacgaagccgggctgaaggcgaccttcttcttcagcgtcggcccggacaacatgggccgccacctctggcgcctggcgcgcccggcgttcttctggaagatgctccgctcgcgcgccgccagcctgtatggctgggacatcctgctggccggcaccgcctggccgggcaagccgatcggccgcgaactcggcccgctgatgcggcggacccaggccgccggccacgaggtcggcctgcacgcctgggaccaccatgcctggcagacccacgccggcgtctggagcgtgcagcagctcggcgagcagatccgccgcggcagcgattgcctggcggacatcctcggccagccggtgcgttgttccgccgccgccggttggcgcgccgacggccgggtggtcgaggccaagcagcccttcggcttccgctacaacagcgactgccgcggacgcggcgcgttccgcccgcgcctggccgacggcagccctggcatcccgcaggtgccggtgaacctgccgaccttcgacgaggtggtcggtcccggcctgccgcgcgaggcctacaacgacttcatcctggaacgcttcgccgctggccgcgacaacgtctacaccatccacgccgaggtcgaggggctgctcctcgccccggcgttccgcgaactgctgcggcgcgccgaacggcgcggcatccgcttccgcccgttgggcgaactgctgccggacgatccgcgcagcctgccgctggccgaactggtgcgcggtcgcctggccggccgcgagggctggctgggagtgcgccagccatga

SEQ ID NO: 323805 - DNA, 651 bp, Pseudomonas aeruginosa
atgaacccgatgacccgccgccacacctggaaccgcctggcctgcgcactttccctcggcgtcgccgcattcgccgcgcaggccgacgagggcgccctgtacgggccccaggcacccaagggctcggccttcgtccgcgcctacaacgccggcaacagcgaactcgacgtgtcggtcggcagcaccagcctgaacgacgtcgcgccgctcggttccagcgacttcaagttcctcccccccggcagctacaccgcccaggtcggccagcagagcctgccggtcaagctcgacccggacagctactacaccctggtcagccagcccggcggcaagccgcagctggtggccgagccgccgttcaagaacaagcagaaggcgctggtacgggtgcagaacctcagcggctcgaagctgaccctgaagaccgccgacggcaagaccgacgtggtcaaggacgtcggcccgcaaagccacggcgaccgcgagatcaacccggtgaaggtgaacctggcgctgttcgacggcagcaagaaggtcagcgacctgaagccagtcaccctggcccgcggcgaggtggtctgcctgtacgtcaccggcagcggcggcaagctcgcgccggtctgggtcaagcgcccggtgaaggcggactga

SEQ ID NO: 323806 - DNA, 1218 bp, Pseudomonas aeruginosa
atggcggatgtgaagaaggtagtcctggcgtattccggcggcctggatacctcggtaattctgaagtggttgcaagatacctataactgcgaagtggtgaccttcaccgccgacctcggccagggcgaggaagtcgaaccggctcgcgccaaggcccgcgcgatgggcgtcaaggaaatctacatcgacgacctgcgcgaagaattcgtccgcgacttcgtctacccgatgttccgcgccaacaccgtctacgaaggcgagtacctgctgggcacctccatcgctcgtccgctgatcgccaagcgcctgatcgagatcgccaacgagaccggcgccgacgccatctcccacggcgccaccggcaagggcaacgaccaggtccgcttcgagctgggcgcctacgcgctgaagcccggcgtcaaggtgatcgcgccctggcgcgagtgggacctgctgtcccgcgagaagctgatggactatgccgagaagcacggcatcccgatcgagcgccacggcaagaagaagtcgccgtactcgatggacgccaacctcctgcatatctcctacgaaggcggcgtgctggaagatacctggaccgagcacgaagaagacatgtggaagtggaccgcttccccggaaaacgcgccggacaccccgacctacatcgagctgacctaccgcaagggcgacatcgtcgccatcgacggcaaggacatgaccccggccgaggtgctcaccgagctgaaccgcgtcggcgggatcaacggcatcggccgcctcgacatcgtcgagaaccgctatgtcggcatgaagtcccgtggctgctacgagacccccggcggcaccatcatgctcaaggcccaccgcgccatcgagtcgatcaccctggaccgcgaagtggcccacctgaaagacgagctgatgcccaagtacgccagcctgatctacactggctactggtggagcccggagcgcctgatgctgcagcagatgatcgacgcctcgcaggtcaacgtgaacggcgtagtgcgcctgaagctgtacaagggcaacgtcgtggtggtgggccgcaagtccgacgactcgctgttcgacgccaacatcgcgaccttcgaggaagacggcggcgcctacaaccaggccgatgccgcgggcttcatcaagctcaacgcgctgcgcatgcgcatcgccgcgaacaagggccgcacgctgtcctga

SEQ ID NO: 323807 - DNA, 1356 bp, Pseudomonas aeruginosa
atgaatcgcatcaagcacctgctcaaggacctcgccatcctgatccgcgccaacctctggctgatcccggtgatcgccgccctggtcgccgcggtgttctatttcgtcgccccgccgccgccgatgagcgcgaccatggccaccggcgccgagggcggcggctacgccgtgttcgccggcaagctccgggaaaagctcaaggagcagggcttcgaactgaagctggtgcccagcgccggctcgcgcgacaacctggagcgcctgctcggcaccggcgaggtcgacatcgccctggtccagagcggccaggagcgccagctcgaagccgggcaggcgcgccagttgcagaccctcggcgcggtctaccaggaaccgctctggctgttccaccgcagcaacgtgcacatcgaccagctcagcgacctgctgcacctgcgcctggccatcggcagcgacggcagcggcacccgcgccgccaccgaggcgatcctgcaggctaacgacatcgccccgggacactatccgatcacctgggaagcccgcggcggcaacgcggtggtcgacgacctgctggccggcaagctggacgcggcgttcatcgtcggcccggcggagaacccggcgatccagaaattggccgacaacgaccagcttcgcctggtcaacttccgccgcagcgccgcctacgaggcgcgcctgccgttcctcaagcgggtcgaggtcggcgagggcctgctcaacctgccgcgcaacgtgccggaacgaaacatcagcaccctgtcgccggtggccaccctggtgatcaacgaacgcttccacccggcgctgatcccgctggtgctggaagccgcgcgcgaggtgatgaaggacggcagcctgctcgacaagcccggcgccttccccagcgccgagccgcgcaccctgcgcctgcacgaggacgccgagcgctactacaagagcggcctgccgctgctgcagcgctacctgccgttccgcatcgcctccctggcggaccgctacatcatcctgctgatcccgttcatcgccatcctcatcccgctgatgaagtccatcggcccgctgtatcgctggcgcatccgcgcgcgcatctaccgctggtaccgctacatccgcgacatcgaccgcaagctcgacagcggtaccgacgccgagcaactgagaagcgagatcgagcggctggagaaactggagagcgagctgaacaccgtggaggtgccgctctcctactaccacgagctgtacgagctgcacctgcacctgaacttcgtgatcaagcgcctgcacggtctgcaggaacgccaggcgacgcaggcagaagccggcaacctcgggtaa

SEQ ID NO: 323808 - DNA, 414 bp, Pseudomonas aeruginosa
atgctcacgaccatcggccgtttttcccatcccctggaggcgcagatcgctcgcgcccgcctgaaggccgctggaattccggcgttcgtcgccgacgagcacaccatcaacatgcagtggctgtactccaacgcactgggcggcgtgcgcctgcaagtgcccatggtctgtcgcgaagacgcggtggcgctgctggccaccgatgaaagcgaggcgctgcgggccgagcagggcagcagcgagttccagtgcttgcgttgtggcggcgaccaggtggcctggaaggtggacggccgccgcctggccttccttgggatcctgctgctcaacgtaccgctgtggccgatccggcgtcggttggtgtgcgaggtctgcggtttccgcagcgaagtaccgatgcctctaagcgagtga

SEQ ID NO: 323809 - DNA, 813 bp, Pseudomonas aeruginosa; identical to SEQ ID NO: 319697

SEQ ID NO: 323810 - DNA, 924 bp, Pseudomonas aeruginosa
atgcaacgactgaacgtggaattccgctccgagggtgtcgccctgcgcggctggctgtatttgccggaagcgcgtgccgagcggccggcgatcgtcatgacgcacggtttttccggggtgaaggagcagtacctggaccgttacgccgaggtattcgccgccgccggcttcgtcgtgctcctctacgatcatccgaacttcggcgacagcgacggcgagccgcgccaggaaatcgatccggtgatgcagcgtcgcggctatcgcgacgcgatcacctggttgggcgcccaggcacgggtcgacgcgaggcgcatcggcatctggggaaccagctacagcggcggacatgtgctggaagtggccgcactggatcggcgggtgaaatgcgtggtggcgcaggtgccgaccgtcagcggccatgcctcggcgttgcgccggacccgcgccgagcagttgccggcattgctggcaagcttcgacgcggaccgccagcggcgcttcgagggcttgccgccggcgctgttgccggcggtcgccgcgagccccgacgagccttgcgcgatggccggcgcggacgcccaccggttcttcaccgacagcgcggcgctggcaccgaactggtgcaaccgggtgaccctgcgtagcgccgagctggcgcgagagaacgagccgggcattcacattgggcggatcagccccacgccgctgctgatgatcgttgccgaccgggacctgcttacgcccacggacctttgcctggaggcctaccagcgggcgttgccgcccaagcggctgctgatgctcgccggcggccatttcacgccgtacatcgagcatttcgacgccaccagccaggctgcggcagactggttcgtccgtcatctcggagagggcggcgagcagctagcgacagtcgtcgaataa

SEQ ID NO: 323811 - DNA, 876 bp, Pseudomonas aeruginosa
ttgaggtacgcctttatcaagcagcgagccggcaactattccattcgacggctttgcctgacgctgaaggtccatcccagcggttattacgcctggttgtctgagccgcaatcggcacgcgctaaagacgaccagcgactgctgggtttgatcaagcattcttggctggagagcggcaccgtttatggctatcgcaaaatccatgacgatctgcgcgaggtcggtgaagtttgcgggcgccatcgtgtggcaaggctgatgcgtcttgaaggactgcgctctcagacaggttatcgacgccgccctggaaagtacggcggtaagccagcggtcgcctcgcccaatttgctgaagcgccaattcgatgtagtggaacccaacaaggtttgggtaaccgacatcacctacattcgtacgtatgaaggctggttgtatttggcggtggtgttggatcttttttctcgtcaggtcgttggctggtcaatgaaggcgcagatgaccagtgatttggctattaatgcgttgttgatggcggtttggaggcgtaaaccgaagcaagaggtgatggttcattccgaccagggcagccagtacagcagctccgattggcgcagctttttgaaggcaaacaatttggctgccagcatgagtcgtcgaggcaactgtcatgacaacgccgtggccgagagctttttccagcttctgaaacgagaacggatcaagcggaaaatttacaccacgcgggaagatgctcgtagcgatgtgttcgattacatcgaaatgttctacaactcaaaacgccgacatggtttcaacaatcagctgtcaccgctagagtttgaaaagcgtcatgcaatgagcttgcaatgtgtctag

SEQ ID NO: 323812 - DNA, 702 bp, Pseudomonas aeruginosa
atgacacccatacaaaaagaggcatatatgcaaaagccagagccaggtcaggcagagcgagctccatgcgaaactcttcaagagaagcatgaaaccaaggaagagccaagcatcttccagtccctcggcatacctctaattctcagcgaaccgttgaccctcgagcagttggatgccaacagagcatatctactcgctgattctcaggggcgtattctcgctgccaaaaatggaaagacagagtccagtgattggaattgggcgcagatggtggataaggaggaacatggaaactggatattcggcgttactttcagttctcctccgacccaagaaagcccgtcgacaattttactaggctggccatacaatcatgtctggcttcattcaaatggtaccttgcccgccagttggcagtgggcattctggggcggtgaaaaatactcgaactcctcaaccccagacctcaggttctatctagcgagcgataattctcttacaacgagcgacggaacaatggctctgtgcgaagacgatggagacgtctatatagggagtaaaacaagttacacacctataagattcacgatccatactttcttccttgccaaccctgccatctttgcactaggccaggctacctggccagacataagcttttcgcaggtgaacgtgcagctagcgaattatgaatgcgaataa

SEQ ID NO: 323813 - DNA, 1182 bp, Pseudomonas aeruginosa
atgacccgtatcggtacccccctgtcgccgagcgcgacccgcgtccttctctgtggctccggcgagctgggcaaggaagtcgccatcgagctgcaacgcctgggttgcgaagtgatcgccgtcgatcgctatggcaacgcgccggccatgcaggtggcacatcgcagccacgtgatcagcatgctcgacggcgccgccctgcgcgcggtgatcgagcaggagaagccgcactacatcgtgccggagatcgaggccatcgccaccgcgaccctggtcgagctggaggccgaaggctacaccgtggtgcccaccgcccgcgccgcgcaactgaccatgaaccgcgagggtatccgccggctggctgccgaggagctcggcttgccgacctcgccctatcacttcgccgataccttcgaggactaccgccgtggcgtcgagcgcgtcggctacccctgcgtggtgaagccgatcatgagttcgtcgggcaagggccagagcgtcctgaaaggccccgacgacctgcaggcggcctgggactatgcccaggaaggcgggcgcgccggcaagggccgggtgatcgtcgagggcttcatcgatttcgactacgaaatcaccctgctcaccgtgcgccacgtcgacggcaccactttctgcgcgccgatcggtcaccgccaggtcaagggcgactaccacgagtcctggcagccgcaggcgatgagcgcgcaggccctggccgagtccgagcgggtcgcccgggcagtgaccgaggccctcggcggacgcgggctgttcggcgtcgaactgttcgtcaagggcgaccaggtgtggttcagcgaggtgtcgccgcgcccgcacgataccggcctggtgaccctgatttcccaggatctttccgagttcgcgctgcacgcgcgggcgatcctcggcctgccgatcccggtgatccgccagctcggcccgtcggcctcggcggtgatcctggtggaaggcaagtcccggcaggtcgctttcgccaacctcggtgccgcgctgagcgaggcggatacggcgctacgcctgttcggcaagccggaagtggatggccagcggcggatgggcgtggccctggcgcgcgacgagtctatcgacgccgcccgcgccaaggcgacccgggccgcccaggcggttcgcgtcgaactctga

SEQ ID NO: 323814 - DNA, 1293 bp, Pseudomonas aeruginosa
atggatgagctgcaccccgggtacctggtcggcctgctggttctcctggtcgcctgctcggcgttcttctcctgcgtcgagaccgccctgctcaacctcgaccgttaccgcctgcgcctgcaggccaagcaaggcctgcgcggggcccggcgcagcagttggctgctgctgcacgacgaccgcctgcgcggcaccctgttgttcggccgcaccctggtcaacgtcagcgccgccgccctggccagttgggccgcgctgcgccactggggcgtcatcggcctggccgtcgccatccccggcatgaccctgctcctgctgctgttcggcgccctgctgccgcgccgctacggcgcccttcgctcggaacgcgtcgccctgccgctcagcctgccgctcctgatcctgcagcgcctgtgctggcccctgctgtggctgctgaccctgctgagcaacgcgctgctgcgcctgctcggcgtcgccgcggcggaacaggacgacagcggacgcagccgcgacgaagaggccctgcatccggccgacaatccccaggccagcgaggtcaaccggcatgacatgctgctcggcctgctggacctggagaaggtcacggtcaacgacctgatgatcccgcgcaacgaaatcgaaggcatcgacctcgacgacgaactcgaggtcatcgtcgagcagttgcgcaccaccagccacacccgcctgccggtctaccgcgacgacgtcaaccagatcgaaggggtcgtgcacatgcgccagatcgcgcgcctgctgacccagggccgcctgaccaaggagaatctccgccaggcctgcatggagccgtatttcgtgccggaaagcacgccgctgtcgacccagttggtgaacttccagaaggagaagcgccgtatcggcgtggtggtcgacgaatatggcgaggtgatcggcatcgtcacgctggaggacatcctcgaagagatcgtcggcgacttcaacgacctcgacagcctcgacaacccggatatccaggcccaggaggacggcagcttcgtcatcgacggcagcgccaacctgcgcgagctgaacaagtcgcttggctggcaattgccctgcgacggcccgaagaccctcaacggcctggtcaccgaagccctggagcagatccccgattgcgcggtgtgcctgcgcatcggcccctactgcctggaaatccagcagtcggcggaaaaccgtgtgaaaagcgtgcgcgcctggcatccccgcgcgctgaccccgctggtcgaaagcgacgccagcgtctga

SEQ ID NO: 323815 - DNA, 123 bp, Pseudomonas aeruginosa
atgtgcggctcttttgttttcatcattggcgatttccgccgcccgctggcggaatccatcgccaggatgtgtcgtggcccgtacagtggtcgcgtcaacctcgattcgatcggggaaccatag

SEQ ID NO: 323816 - DNA, 1104 bp, Pseudomonas aeruginosa
atggcaccaaggccgcgtaaagaggggtcaaaagacctccccccaaacctgtacaagaagacggactctcggtcaggcgtaacctattacgcctatcgagatccagtaagcggccggatgttcggcctgggcaaggacaaggctcgcgcgattagggaagcgatcgaagcaaaccacacggaagcgcttcagccgactatcgccgacaggctcaattctgagccatcacgtccgccgcggctatttgacgactggctcatcgagtacgaaaagatctacgccgagcgcggcctggcggcggccagtgtccgtaatactcggatgcgcctgaaacggctgcgcgccaggttcggaacgatggacatccgggatatcgggaccattgatgtggccggctacttctcggagatggcgaaggaagggaaagcacaaatggcccgagccatgcgatcccttctgcgggatgttttcatggagtcgatggcggccggatggactgacaaaaacccggtggaggtgacgaaggcggcgcgggtgaaaatcaagcgcgagcgcctgactctggagacatggcgtctgatctatgccgaggcgaaacagccctggttgaaacgagccatggaactggcggttattaccggccagaggcgggaggatcttgcagcaatgcagttcaaggacgagcaggacggatacctgcaggttgttcagtcgaagacgggaatgcgccttcgtataagcacgtcgattggtctggctgtccttggtctcgatctggcctcagtgatcaaatcatgccgagggagggttctttcccgctacatgatccatcatcaccgcacgatcagtcgtgccaaggctgggcagccgattatgctggacaccataagcgccgcgttcgctgatgcgagggacagggcggcgaaaaaacatggactcgatttcggcgccagcccgccaagcttccatgagatgcgttccctggctgccaggcttcatgaagaagaagggcgcgatgcgcaacggctgctcggccaccgctccgcgaagatgacggatctctaccgggacagtcggggcgccgaatggatcgacgtggcataa

SEQ ID NO: 323817 - DNA, 195 bp, Pseudomonas aeruginosa
atggcgcacccgacccgcgcaatccagttgctgctcgagcagtgcgagccagacgtgctctcgccgatgttcgagattgagatcgacgcgatcctgcgccaggccgacgagtatgcgaaaaccggacaggtgctagagcgcgagcaactgcgcgaaatgctcatgcacctgatctcgaaggccgcgggcgactga

SEQ ID NO: 323818 - DNA, 321 bp, Pseudomonas aeruginosa
atggctgaagaactgaaaccctgcccgttctgcggagaagaagccgcttttgtcgagctggaagacggcggaatagttgcggtgtgcgcatcaaaaggatgcgtcgcgagcggtgttgcacgctacgcatgtggagacgacccgagaccgcttattgccgagacctggaacaccagagcagtccccgcaggccatgtggtggtcagcgaggcactgttgcggcgtcttgccaggccggcagaccgttacgatgaggttttcactttggatcgacatgaggccgccgaagaactccgcgccctgctgagcgagcaggcatag

SEQ ID NO: 323819 - DNA, 201 bp, Pseudomonas aeruginosa
atgctgcatgagccggaggagtaccgattgttcagtctatggatgctggtcttcatggccatcggctggttcggtggctggatacacgcccattacaccgtagccgaagaatgccggaagctcggcaagttctacgtcggcaagaccgtattcgagtgcaaggcgatcaccgaggaagacaaggagaacggcaatggctga

SEQ ID NO: 323820 - DNA, 663 bp, Pseudomonas aeruginosa
atgagtgaggtgaagcggttcgaccacgtgaaccatgctcacgttgatgactgtgagcacattgataaccccgaaggagcgtgggtgaaggcctccgactacgacgccctcgccgccgaggcccaggcgctcagggaggaagtcgcacgcgctgagcagcaccgcaacgatcaggctgacttgattgtgtcgctacgcaccgaagtcgcagcactgcgaatggcgagagatgatctcaaactcgaacgagaccttgctcgacaaaacttctgcgacgagcaggcagcgaattatcagttgcaagcgcacttgaaagcctgcctcggcgaactatcggaactgcgcgcaagggtggttgtgctccccagcgttgataacgtcatgaatatcgtcatgcgttaccagtggaacgagaagaccaacgtcaccggaactacgaactgggcggccaacctcggtatgagggttgtcgaagtggtcaagcgcctcaacggcaagacggtcagcgaggggctgttgcggcgcatcagcgatctgttcccggctgacatgggagatgacggatcaggccgcgccggttggtttccgcatgtgcgcgagacggttgcagagcttcgcgccctgctcaaccaggacaaggagaacggcgaccatgctgcatga

SEQ ID NO: 323821 - DNA, 282 bp, Pseudomonas aeruginosa
atggccgtttacgtcgacgacatgaacgcaacgtttggccgcatgaagatgtgccacatgctcgcggacacgaccgaggaactgctcgcaatggcagacaagatcggtgttcagcggaagtggattcagcatgccgggaccatcaaggagcacttcgatatctgcctgtcgaagaagtcagcagctctcgcagccggggccgtggctatcacgtaccccgacggcgtagcagagatcatgaagaagcgccgagcagccagcaaggaggtaggtcatgagtga

SEQ ID NO: 323822 - DNA, 717 bp, Pseudomonas aeruginosa
atgaatgactacaaatcagccttcaacgccgcggccgccgacatcagcgcgatcatcgcactgctggggttcaccaagtatcccggcgttgatccggtgctgcgcgcaattgctgacctgatactcgaaaaagccgagaaccaggtactcagggaggagcgcgacgccgccaacaagcgcgccgacactctcgaacaccgcatgatgggcatgatgacccgccacttcgccgaggcatggcgcaaccgagacacgcagaaggcgctcgacggctacctgtctgctggtatcgcgcagttggagcaggagcgcgacgccgcccaggccagggtcgcggagctgactgcaacccgcaatcgctacgggttagacgcccactacttcaacaagaacctccagcgcatcctgcgcgacttcgagagcttcacgcccgacgaactcgctcgctccctgatcatcctggcgaaggtcgccgacgaaaaggtcgtagcccaggctcagcacagcgtgccggaggggtggatgctcgtcgagtgcggaatctggacgcaggaacaggtggacgagatgcagaagacggtggctcgattccgcaattcagaattcgtcgacgaccgcgcgctggcgatggctgttgctgacgcaggccagtgcaaggctccagagatatcgctggccgagctgctcgccgccgcgcccggcaaggaggggttgtga

SEQ ID NO: 323823 - DNA, 384 bp, Pseudomonas aeruginosa
atgaagcaatccgaattccgtgccgagttggtcaagatcatgcccggctacaactggacggttcatgcgagccgcagcagcgaaaagctgttggtcgccaccggcatccagtccagcggctccaaccggctctcgacgctgcgcgtggagcggcgtgacgactacgccggttccggcaagcctcgctacgaagtgagcagcgcgggatacggaacccgatccccctggctgcacaccgcccaggacaaaactctggtacgagcccttcgctcgcttcaggagcactacgagggcaatgcgcgtaagtacagcatccacgcgagcgacctacagcgtggacggatagctaccccgccaacgcccggagcttctacagatgaatga

SEQ ID NO: 323824 - DNA, 1419 bp, Pseudomonas aeruginosa
atgaccaaagcaaatgaatgcacctgcccttccggagacggctccctccgccatccgtgcccggcacacatcggtccattcgacaaactcgtcggctccccggtacacaacgaaagcgagccagacttgcctcctctcgacgaacatcttgcacaagttttcgagacaggtatggcgctcagagaatcggtagagcaggcaggcggggatgagcgcgcggcgttcgaggcctggtggcaatccgccgaagtgctgaagtgcaagcgggatgtcgccatggaagcatggcaagcccgcgccgccctggcgcaaccctcccaggcgcaggccgagcaggccaccgccgacgactacgaggaagtcctggccgatcaccgtcgtctggtgcgcgagttggacgtgctgctgaacggagaggaaggcgccgccaagcaggcaagcctctgcgatctggtcgggcaggtgtccgccatcgtgcgcgagcgtcgcgtgcctctgctgtcccgttcgcaggcagaggacgctccggtaatcggatgcctctgcggcatgcccatgaccgaaggtcatcactcgccggagggttgcaccagccttgaagagttcgcaccacaggcgcaggccgagcaggcagaggcggagcggccggaagtggtggcgtggcgttacggctccagcggcggaatcgtcagcgacaaggcatgtctcgatgaatggaaatccggcggcgaatatcaatcgctgatgaccgtcgcccagcatgagcgcatcgtcggtgagctacgagcggagaacgagcgactggcgaacgaccgcgaccgagcgaatcaattcgctaatggcgctgccttggaaattaatgccgccctggccagggtcgcggagctggagcacgtcctgcgggtagtggtcaacgctgccgaccatggctcatggccgaccacggtgatgcatggcatcgagaaggtgcgtgaagttctcgcaggctcagccccgcccgccaaggctcagcacagcgtgccggaggggtggaaacttgtgccatcggacaaaggttgcgtcaccagttcgatgaaagctgagtgcatcggagagttctcgttttacatccgtgcagcttgcgccgagtgccttgatgttggcaccgatagcgattgccatgtctgcggtggtgatatcgagtacgaccaaaaaatcgacgtgccgtgggatacctgcaaggagatctacaagaccatgctcgccgccgcgcccggcaaggctcagcacagcgttccggaggtgtcagggatcggacgagacttcgcctatccgcgctccgtagttctgtacctgcgcacagagccgaccgacgacgacctgcgagccatccatgatggcctgcgatctctcgccgccgcgccgcagccagtagcgtag

SEQ ID NO: 323825 - DNA, 210 bp, Pseudomonas aeruginosa
atgccattcgacgaaagccccgcagtccgccgcataaacgccctctacccctctaacgcgccagcccgctacctgcacattcccaccggcattcactgggtcgtcatcgacagcctgggtgaggtcattcaactcgaaaacatcgagcgccggcgccgactgataaccgtttctgacctcgaaaccgaggcctggagaaagctcccatga

SEQ ID NO: 323826 - DNA, 249 bp, Pseudomonas aeruginosa
atggaatccctcaacctgaccgcgctgttcctggacggcgaggatggccagcgcctggccgaggtcaacggcctcccacgcctcggcgccccgctctcctcctctcaactgcgccagctcgcacgccagctcaacgagatcgcaaacgacgcagaccaggacgcaactggtttgcacacatacgcagcgccaccgtatggagcctgcccatcatgccattcgacgaaagccccgcagtccgccgcataa

SEQ ID NO: 323827 - DNA, 762 bp, Pseudomonas aeruginosa
atgccgggcgcctactacaacgaattcgacccatatgccgctcagtggcttcgaaacctgatcgccgccggccacatagcacctggcgacgtcgacgaacgatcgatcgaggatgttcacccagatgacctcaagcactacacacaatgccacttcttcgcgggaatcggcgtctggtcgctcgcccttcggcgctccggctggccagatgatcgacctgtttggaccggttcctgtccttgccaaccttactccaaggcaggcaagagacttgggtttgctgatccacgacacctctggccgtcatggagccatctcatcagagagcggcgccctgcagagttgtttggcgagcagtctcctgaagcgcttgtccatggctggtttgatctcgtcctgggcgaccttgaagaagctggatacgccgctggggcgatacattttgcagctgcctcatgcggggagccgatcctcaggaagcgggtctactttgctgccaagcatctcggcgagggagcacaaggacagcagtcgcgcagaagtccttgccaggctggaccgcggagatggcgtggcgaagcggatctgcgcgctatcgcagactctccgctccagcccggagatcgttggcctcagcccatcgttcgcagcatggaccatggctattccggtcgaatgggtgctctgcatgccatcggaaacgccctcaatgctgaagcggcgacgcagttcatagccgcagacctcgacgctacctcatag

SEQ ID NO: 323828 - DNA, 618 bp, Pseudomonas aeruginosa
atgtccgcagaaaagccgcgggagcggccaatcctgttcaacgaccagatggtccgagccatcctggaaggccggaagacggtgacgcgacgcgccgtaaagggcttgcagataccaaccgaggacaaaaccacgcctcacgagggcctccgctggagtgcgctcggccagcgccacctgcgctacgggttcaacgtgttcggatccacggaggaggaatgcgcgcatgagcttgctcggtgcggggtctgccctttcgggaagcccggcgaccggctgtgggtgcgcgagaccttcgccgacattggatgccgtctcaccttccgcgccgatctcgaagacggggctcactgttccgtcacacgctggaccccatcgctgcacatgccacgctgggcctcccgcatcctgctggagatcaccgctgttcgcgtcgagcgcctccaacaaatcaccataggcgagatatgtaaggaaggcctcgcgcgctcaatgtatgagtttatccccgtgactactgcgttcgatgccttcgccgaactgtggaactccaccggtggcgactgggacgccaacccctgggtctgggtcatcgagttcaagcgggtgacgccgtga

SEQ ID NO: 323829 - DNA, 537 bp, Pseudomonas aeruginosa
atgatgcgccgcgtctacttgtccggccccatgaccggcatcccagacttcaactaccccgcgttcaacgccgaggagcggcggatcagagccctcggctatatcgtcgagaacccggcggtcaacatggtctaccgtggcgcgccgtgggagacgttcatgcgcgacgggatcaagcggctcatggactgcgacattctcgcgttgctccctgggtgggagcgttctcgcggcgcgaacatcgagcgcaacctcgctatcaccctcggcatgcacgtcgtcgacgccgaggcgctccccgcgcccgacttcgtctgcaagtgccgcgcaattcagttcacctgctgctccgtaccgagtgacaacgatccgttcgtctgccgtcgcctggccgacatgccggcatacctctccccggaggatcaactggcaaacgcacgccaggcgctcgaaaagatcgccgcactcaccgacgtctctaccggcggtatcggtatggacgtgctcaagatcgccaagcaagccctttccaactga

SEQ ID NO: 323830 - DNA, 378 bp, Pseudomonas aeruginosa
atgagcacttttgccgtgttcggcatgacgcgagacgtagcgctcgccatggccaataaagaagtgaagtcggtacgcaagacaccgctcggggatgagcatgttccgatgagcgaatggctcgccgcagtcgagcggaaggccgacaacatcatgaccggaaccaaggtcgtccagttgagccaactcctggatacgccggacttctgtcagcagttcatcgacctcgcacggaagaccctggaatgccgcgacatgcagatccgcgccagggtccagctttggaatgacgacggaacgccagtcctgaccaagaagcgcaagcacaaggtcgagtggcagcagttcggccaccagccagggagagcagcagcatga

SEQ ID NO: 323831 - DNA, 303 bp, Pseudomonas aeruginosa
atggccaagaccaacgcccagcgccagcgggagaaacgccagcgacagcgagaggcaggcatccccgagcgcaagctaccctcaccgcccgcaatcgacgcagcgtttgagcgcctgcaggcggtcggcgatttcgaggactggcgagaagcgttctcgacgctgctactcaacgcctcagccctgcccgatgccgatctcctgcctctcctcgtcgtgtcgcgacacgaatacacgcccagcgaaaacgtgtcgcgacaactactcgccgccgaactctccgtcgccgacgacgaacagtaa

SEQ ID NO: 323832 - DNA, 315 bp, Pseudomonas aeruginosa
atgagcctgccaatcaatgcactgaaggatgacgaactgctgcactactcgcagttcgattcaggggcggccgacgagctggcaagacggctcgcaacgggcgacctgcatatagtcgatgagctaagcgagcttgaggaatacgccagggagctggaagaagggaaagaagaggcagacgacgaccttgaggttgagcgggcaaagtgccgcgatgcgatcgccgttctcgaagccacagtgcagtttaagccaaagacggtagacgacgcgctgcatgcaatcaggtcggcgatagaaattctggagggctga

SEQ ID NO: 323833 - DNA, 249 bp, Pseudomonas aeruginosa
atgctcaagcatcaggaacaaaccgaagttctcgccggcctgccctcccagaccgccctcgcccgcctggcgttcgttcagcggctcatggctcctgcggtggaggaaccctaccaggtcgtgcctcagggtcgcggattcttccacatcgtcgagaccgctactggcgcggtgcgcggattccgccggaaccacaacgaagcttgcgcctacgcagagcatttgaagcgccagcaggccgctaagtga

SEQ ID NO: 323834 - DNA, 384 bp, Pseudomonas aeruginosa
atgcaagcaatccaatgcggcggatggatcggccgccagggcctcggcctggctccccgcgaactcgaagctaccgcctggagcgccagcgaactgaccgcgaaagaggtcgcgcggcgcatgggaatcgccccagggaccgtcgagaagcgcctagacgacgccaaattcaagctcggcgtgcgcagcgtgcgcggactggtgcttgaggcgttccgacgcggaatcatctcgcctgccgtcgtcttgctcgcattcctcgtcgccggccacccgctgatcgatgacgaccacatgaaccggaaccgcaggccgagcaacgagcggcgaatcaccgaagcccgcaccgttcgccggatcgacgaaatcaccatcaacgcgtag

SEQ ID NO: 323835 - DNA, 867 bp, Pseudomonas aeruginosa
atggcggccaaatcgttcaagcagatgatcaaggacggcgacctgaagcgcgcggatgcgatgaaggctcgcctcgaagaccttcacgaagagcccggcttcaacctgcgcgccgagggcgaagacctcgagcagagcatcgcggatctggccgactacctgcaccagggcggcatcgttcctgccctcgaagtgcgaccgcgcgaagaaggcggcatgtgggttgtcgacggacaccgccgccggcgcgcttacctcaagctcgacgccgagggccgtctgccgcgtgacccgaacggcgagttctgggtgcccatcgttgcgttcgccggtaacgacgctgagcgcgtgctccgcgtgatcacgtcccaggaggggcgcaagctctcccctctggagctcgcacacggctacaagcggctcattgcgttcgggtggaccgtcgaacagatcgcccaaaagatggggcgcacccgtcagcacgtcgaccaggtgttggtcgtaggcaacgcgaataccgatgttcagcagttgatcagctccggcgcggtagcggccaccaccgccgcgcggatcgtcaggaagcacggcgagaaggccgggcaggtgctcggccagcagctcgcgaaggtgatcgcagcgggagggacaaaggtcacccccagagcggtagccgagccgaccgtgccgcgcgccattctcgatgatctgctgaaggtcactaccgatatcgtcgatgccttccctacggcactccgcgcaggcctggccgaaggcccggaatcgatcaccctcaccactcgctcggcatgggtagagcggttgatggatctcgtcgctcaggcgaaagagtccctccaggggtaa

SEQ ID NO: 323836 - DNA, 705 bp, Pseudomonas aeruginosa
atgactgcagacacccctacctctgtcgctaccatcaaccacctgctgctcggcgcgccctacaccagcccactggtgatccccggcgactggctggtcgacgagctggaaggcgccgtggaggtcggcggcttcaccgacggcctgttccgctggccgacgcgcaagcgcagcggccgcccttcgccgattctctgcggcgacctgctgcgcgcggtacgtaccgaatgcgccgagtcggtgcagttctggtgggggttcagtccgagcctggtggggcgctggcgccgcgccctcggcgtgacccgccgcaacaatcccggcgaccaggcggtggcgcgcgcccgcgccgccctcgcccgctcgctggaccgcaaggcgccgccgaaggcaccggccgcctggtccagcgaagaagtcgagttcatccgccgccacggcagcaagcgcagcctggcctggtgcgcctacatgctcggccgcagctaccagagtgtcgccagcaaggccgaggagctttccccgcacagcgggcgcgaccgcaacaatgcgatctggagcaagtccgaggaagatctgttgcgccagcactaccagcagcgcggctcgctatggtgcgcgcagcagaccggcaagacccgcgcagcggtattccaccgggccaagaagctgggcctgcaacggcagcggccgaaacacccgtga

SEQ ID NO: 323837 - DNA, 1038 bp, Pseudomonas aeruginosa
ttgagtctcggtcactcccactcgcacagccaccacgagcatcatcacgatcacgatcacgatcacgatcacgatcacgatcacggccatggcgcacaggccgcgccgccctggcgccggctgctggtcgccgcgctgctggtgctgttcgccgtcgccgccgcttgcctggtgcaggtgcgttccggcgaggcgatggtcatcacccgtttcggcaacccggcgcgggtcctgctcgaaccgggtctggcctggcgcctgccgttgccgttcgagagtgcgatcccggtcgacctgcgcctgcgcaccacctccagcggcctgcaggacgtcggcacccgcgatggcctgcggatcatcgtccaggcctacgtggcctggcaggtacagggcgacgccgacaacgtgcagcgcttcatgcgcgcggtgcgcaaccagccggacgaggctgcccggcagttgcgcaccttcgtcggctcggcgctggaaaccaccgccagcgcctatgacctggccgacctggtgaataccgaggcgtcgcgggtgcgtatcggcgacttcgaagcgcgcctgcgcgaacagatcgaccatcagttgctggcgacctacggggtcaaggtggtgcaggtcggcatcgagcgcctgaccctgcccaaggtgaccctcggcgccaccgtcgaccgcatgcgcgccgagcgcgagaccatcgccaccgagcgtaccgccgagggccgtcgccaggccgcggagatccgttcggcggcggagcgcgacgcccgggtgatccaggccgaggcttcggtgaaagccgcggagatcgaggcccaggcgcgggtcgaggcggcgcgcatctacggcaaggcctacgccggttcgccgcagctgtacaacctgctgcgctcgctggacaccctcggcaccatcgtcaacggcgatacccgcctggtcttgcgcaccgatgccgcaccgttccgcgtgctggtcgacgggccgccggcgttccccgccgaagcgccggccaacaggcgccggccatga

SEQ ID NO: 323838 - DNA, 1986 bp, Pseudomonas aeruginosa
atgagcgagccgaccgcccacggcagccatggcggctgcgcgcatcaccatcatcacctgccgttcggcggcggcctgctcagccgcgacgagcagcgccgtgccgcgcgccagctgagcctggcgatgctcgccctcggcctgttgctgctcggcctggcctggcgctggctggcggcggaccaggccggggtcagccagatcctgctcggcgtcgcgtcgctgctggtggcgctgccggtggcccgctcggcctgggacagcctgcggcatccgagcctgcacggcgtcaccgaccagttgatcgcgctggccatgctcggcgcctgggccagcggcgacctgctgaccgccgcgctgctgccgatcatcatgatcttcggccacgtgctggaggagcgcagcgtgatcggctcccaggaggccatcgccgccctcggcgagctgacccgcagccatgcccggcggatcgaggccgacggcagcctgagcgaggtggacaacgccagcctgcgagcgggcgaccaggtggaagtgcgcgccggcgaccgggttccggccgacgggcgggtcctgcagggccaggccagtctcgacaccgcgccgatcaccggcgagtcggtgccgctcgaggtggtgccggggatggaggtctacggcggcgcgatcaacctcgacggcctgctgcgcatcgagataacccgtaccggcgaggcctcgaccctgggcaaggtgatcggcctgatgcagcaggccgagcgcgccaagccgccgatcacccgcctgctggagcgctacgccgggcagtacatgttgctggtgttgctgatcgccgcggtcacctggttcgtcaccaacgatgcccaggccatgctcgccgtgctggtcgccgcctgtccctgcgccctggtgctgtccgccccggccacggctatcgccgggatcgccgtggccgcccgtcatggcatcctgatccgcagctcggccttcctcgaggagctggcggacctgacttcgctggtggtcgacaagaccggcaccctgacccatggcagcctgcgcctgcaggcgctgcgcctggccgatgccgccgaggaggcgtcggtgctgcgcctggccgctagcctcggcgccgccagcagccatccggtgagccgagcgctggcagccctggcggcgcacgatgcctatcatccattgagcgatatccgcgaacgccaggggttcggcgtggtcgcacgaacagcggcgggcgaagccgccctcggccggcccgaactgttccagcaactgggcatcgacgccagcgaggtgccggagcatgagggaccgatcgccggaatcgccctggacgggcgcttcctcggctggctgctgctggccgacagcgtacgcgcggaggccgccgaggccctggccgatctgcgcgaactgggtctgggccggcaactgttgctgaccggcgatcgccgggcggtggccgacgccgtggccaagcaggtggggattcgccaactggtggcgcaggcgttgccggaggacaagctgcgccaggtcggcgcggagatcggcagcggtttccggccgatggtggtcggcgacggcatcaacgattcgctggcgctgaaggccggtgtggtcggggtggcaatgggcgccggcggcgccgacatcgccctggcctcagcggatatcgtgctgatcggcagcgacctgcgccgcctcggcacctgcgtgcggctcagccggcaatgccggcggaccctgcaggtcaacgtggcgatcggcctcggctggaccctggcgatcgtcgccgcggcagccttcggcctgctcggcgcggccggggcgatggtcgcggcgctgctgcacaacctcagcaccttgctggtgctgggcaatgccggacgcctgctgcgtttcgaggagcccctcgggcagccccggccggccgtggagggacgcgaagaggagggtacaccgtga

SEQ ID NO: 323839 - DNA, 1014 bp, Pseudomonas aeruginosa
atgcccctgttgaattccctgactgtattgccgttgcctggcgggcagcgtttgagtggcgacgaaaccgatagccggctcagccttgccctggatggtgcgttgctgttgcgcctgcgcctggagcgcacagacacggaaatacggctggcggtggaggagcttcccggcggcgatgccgagcatgcgttgtgggccgccagctactggctgttcgcccgcgatccggattgccagcggctcgtctggtcgctgtcctgggaacccgaagagtccctggcgaaggggatgctgacaggagccgccgcagcgggcacctatgtctgcgagaggggccggttctggcagttgccatggccctggctgccgcttgcccagccgtgctatccccagtcgatgcaacttaccgatggaaagcgtcatccgctgcgccggccgaagcccaggggagaggtctaccggcgcttcgatgcgcgattgggatgctggatatccttgcgtaccctggacatcgagagggacctggagcgttttcatcgctggcagaactcgcccagggtggcggagttctggcaggaagatggaagcctggaacaacatcgcgagcgtttgcgccagctcgaggcggatcctcatgcactggggctcatcggctgtttcgacgatgagcccttcgcctatttcgaggcctactgggcgaaggaggatcgcatcgcgccgttctacgtggccgaagactacgaccgcgggatccacatgctggtcggcgaggaggcccaccggggtccgcacaaggtcgcctgctggctatcggcactggtccactacctgtttctcgacgacccgcgctcgcagcgagtggtggcggaaccgcgcgcagataacgcgcggatgatcggtcacatgcacaacctgtgcttccactgcgagaaggagttcgactttccgcacaagcgggcggcgctgatgatcatcggccgcgaacggttcttcgagcgctgtcgtctggcctga

SEQ ID NO: 323840 - DNA, 513 bp, Pseudomonas aeruginosa
atgcacggccatacccagcttgccccgcactacttcttccgacagcagcgattgctgcgcgcgctgctgatcgacgaccaggcctggttcgtcctcgacgacttcgcccggctgatcgaacacagccagcccgaacagatgctcgcccgcctggacgacgaccaggcgcgccgcgagtcgttgcgttccgaacgtggcgaagaccaggcgcagtggctgatcagcgagtccggcgcgtatgccacgctgatctaccagcagcgcggcgatggcggcgaattgcgccgctggctcagcggcgaggtggtgccggagttgcgcagcgccaccgacgacagcggcatgccgcgctacgtcaagttgcgctgggagcgccaggtggtgcacatgctcgactggcagggcaagctctgggtgaatttcagcgagatgcccgacctcctcgaacgccagggcgagcccatggtgcaactgggttggcgacgctggttgcgcaagttgcgcccgctgtag

SEQ ID NO: 323841 - DNA, 315 bp, Pseudomonas aeruginosa
atggctaagccgaatgatacgtccaaccccgaggtaacagaatcgtccccccgcttcgtcccgctgctacccacctcccaggccgacatgtgtccgcgtagcgccaccctgtacgtggacacccatgcactccccacgcacttgttcgacaacgcgaaagtgcgcctgaggtcggcaatcaacatcctggccatgacccgtttgctcgatgagaaagaagagcccggcggcaccctggcctacatcaacggtgcgttgctgtcgctgctcagcgatgccttgtccgaaatcgaggcgggccacccgagcctgtag

SEQ ID NO: 323842 - DNA, 1212 bp, Pseudomonas aeruginosa
atgtcgaaaaagtcccgctccagactctggttcctcgtccacagctggctggccctgcccatctggttcttcgtcctgatcgtctgcgtcaccggcaccctggcggtggtcagccaggagatcgtctggctggccaacccggaaatccgtgccagcaagccaagcgactccgccgaaccgctgagctacagccaggtcctcatcagcatcaatcaggcccggcccgagctgaaggtcgaatcgatcgaacgccccgacgagtcccacttcgccctgaccgtggatgtcagccatcccgacggcagcagcgctgcgctctacgtgaatccctacacaggtgccatccagggcaagagcccgcacttcgatttccgccagttcacccgcgccctgcacggctggtggctgatgccgttcgataacggctacagctggggctggtacctggtctcgctactcggactgccgatgttggcctcgctggtcaccggtctggtggtctataaacgattctggaagggtttcttcagaccacgcctgcgcatcagccagggcgcgcgcatcttctggggggatttccaccgcctgagcggcatctggtcgatctggttcatcgccgtgatctccatcaccggcacctggttcctgatccaggcgatcctcgccgacaatcacatcactctctccagcgaaggcccgccgccggtcatcgcccgcagcgaggtgccgctctcgccttccggccagccggctgtgcagatcgacctcgacgaggccgtgcgcatcgccactcgggacatttccggcttggaagccagcgggctgttcctcccaggcaacgcctacagcccgctctatgtctatggccgcggctggtacccgctgatgtaccagtcggcagcgatcaatccctacaacggcaggatcgagtcttcccgcctgctcggcgaccgcaccccgctggagttcgtcaccgaatccatgcgccccctgcacaccggcgatttcggcggtatctgggtcaagctgatctggttcgtcttcggcctgctgctgagcatgatggtgctcagcggcctgctgatctggagcaagcgcaccgcacaggccaccgccgcgttggtcaagcgcggcaagcgcccggcgcgccagccgaaaccggccaagccggcgccggtaatggccaaccagaccgcggagggacagccatga

SEQ ID NO: 323843 - DNA, 7248 bp, Pseudomonas aeruginosa
atgaacgcagaagattccctcaagctcgcccgccgctttatcgaactacccgttgagaagcgtcgggtcttcctcgaaaccctgcgaggggagggaatcgatttctcgctgttcccgattccggccggcgtgtcttcggccgagcgcgaccgcctgtcctacgcccagcagcgcatgtggttcctctggcacctggagccacagagcggcgcctacaacctgcccagcgcggtgcgcctgaacgggccgctggaccgccaggcgctggagcgcgccttcgccagcctggtgcagcgtcacgaaaccctgcgcacggtgttcccgcgcggcgccgacgacagcctggcgcaggcgcccctgcaacgcccgctggaggttgccttcgaggattgcagcggcctgcccgaggccgagcaggaagcccgcctgcgcgaggaggcgcagcgcgagtcgttgcagccgttcgacctgtgcgaggggccgttgctgcgggtccgcctgatccgcctgggcgaggagcggcatgtgctgctgttgaccctgcatcacatcgtgtccgacggctggtcgatgaacgtgctgatcgaagaattcagtcgtttctacagtgcctatgcgactggcgcggagcccggcctgccggccttgccgatccagtacgccgattacgccctgtggcagcgcagctggctggaggccggtgagcaggagcgccagctggagtactggcgcggcaagctcggcgagcggcatccggtcctggagttgccgaccgaccacccgcgtccggcggttcccagctaccgtggcagccgttacgagttcagcatcgagccggccctggccgaggccctgcgcggcaccgcccgacgccaggggctgaccctgttcatgctgttgctcggcggcttcaatatcctcctgcaacgctatagcgggcagaccgacctgcgggtcggcgtccccatcgccaaccgcaaccgcgccgaggtggaagggctgatcggcctgttcgtcaacacccaggtgctgcgctcggtattcgacggccgcacgtcggtggcgaccctgctggccgggctcaaggacaccgtgcttggcgcccaggcccatcaggatctgccgttcgaacgcctggtcgaggcgttcaaggtcgagcgcagcctgagccacagcccgctgttccaggtgatgtacaaccaccagccgctggtggccgacatcgaggcgctggacagcgtggccggcctgagcttcggccagctcgactggaagagccgtaccacccagttcgacctgagcctggatacctacgagaagggcggccgcctgtacgccgcgctgacctacgcgaccgacctgttcgaggcgcggaccgtcgagcgcatggcgcggcattggcagaacctgctgcgcggcatgctggaaaacccgcaggccagcgtcgactcgctgccgatgctcgatgccgaggagcgctatcagttgctggaaggctggaacgctactgcggccgagtacccgctgcaacgcggcgtgcaccggttgttcgaggagcaggtcgagcgcacaccgacggcgccggcgctggccttcggcgaggagcgcctggactacgccgagctgaaccgccgggccaaccgcctggcgcatgccctgatcgagcgcgggatcggcgcggaccgcctggtgggcgtggccatggaacgttctatcgagatggtcgtggccctgatggcgatcctcaaggccggcggcgcctacgtgccggtggacccggagtatcccgaggagcgccaggcctacatgctggaggacagcggtgtggagctgctgctcagccagtcgcacctgaagctgccgctggcgcaaggcgtgcagcggatcgacctggatcgcggtgcgccctggttcgaggattacagtgaggcgaacccggatattcatctcgatggcgagaacctcgcctatgtcatctacacctccggttccaccggcaagcccaagggcgccggcaaccgccattcggcgctgagcaaccgcttgtgctggatgcagcaggcctacggcctgggcgtcggcgacacggtgttgcagaagaccccgttcagcttcgacgtgtcggtctgggagttcttctggccgctgatgagcggggcgcgtttggtggtggccgcgccgggcgaccatcgcgacccggcgaagctggtgaagctgatcaaccgcgaaggggtcgatacgctgcacttcgtgccgtcgatgctgcaggccttcctgcaggatgaagacgtcgcctcctgcaccagcctgaaacgcatcgtttgcagcggcgaggcgctgccggcggacgcccagcagcaggtgttcgccaagctgccgcaggccggcctctataacctctatggcccgaccgaggcggccatcgacgtcacccactggacctgcgtggaggagggcaaggacgcggtgccgatcggccggccgatcgccaacctggcctgctacatcctcgatggcaacctggagccggtgccggtgggcgtgctcggcgagctgtacctggccggtcggggcctggcccgtggctaccaccagcgtccggggctgactgccgagcgtttcgtcgccagcccgttcgtggctggggagcggatgtaccgcaccggcgatttggcgcgctaccgcgccgacggggtgatcgagtacgccgggcggatcgaccaccaggtgaagctgcgcggcttgcgcatcgagctgggcgagatcgaggcgcgcctgctggagcatccgtgggtgcgcgaggcggcggtgctggcggtggacggcaggcagttggtcggctacgtggtgctggagagcgagggcggcgactggcgcgaagcgctggccgcgcacctggcggcaagcctgccggaatacatggtgccggcgcagtggctggcgctggagcggatgccgctgagtccgaacggcaagctggatcgcaaggcgttgccgaagatcgaggcggaagacggactcggcgaatacgtggcaccggccagcgaaccggagcggcaactggcggcgatctgggcggatgtcctgggacgcgagcgggttggcgtgaccgacaacttcttcgccctcggcggcgactcgatcgtctcgatccaggtggtcagtcgagcgcgccaggccggattgcaactgagcccgcgcgacctgttccagttgcagaacattcgcaagctggccgagcgctgcagcgcggcggcgcccgtcgcagagccggcgagcgtgcccgacggcgccgtcctgcacaatctgctgccgcagcaagtgcaggcgctgccgttgccccacgaacggctggaacacctctacagcctttcgccgatgcagcagggcatgctgttcctcgggctgaacagcccggacgccgagttgtacatcaaccaattgagcatcgcggtcgacggactcgatccgcagcgcctgcaacgcgcctggtcggcggtggcgcagcgccatgaagtgttgcgcagcggcttcctctggctggaccaggaagagcccctgcaatttgtcctggccgatcccgggcttccgttcgaggtcctcgactggcgtgggcgggcgataagcgacgaagcgctggaacaggtcgcgcaacaggagcggcgcaagggcttcgacctgggccagccgccgctgcaacggatacgcctgctgcgcctgggcgaggatcgctaccagttgatctggacctaccaccacattctcatcgatggctggagcacttcgcagctgttcggcgagatactcgaactctattccggcggcagcctgccgcccgccgtcccttaccggcactacatcgcctggctgcgggcgcgcgatggcaaggccagcgaggccttctggcgccgccaactggcacgcatggacgagccgacctatctggccgacgccttcaacgctgcccgcgaaggatacgggcaccaggcgttgtacacgcgcctggacagcgatgccaccgagcacctgaaacgtttcgcccaatcccagcgagtgacgctcaataccctggtacagggcgcctggctgctcctgctgagtcgctacagcggccagcgctgcgtgtccttcggcgccaccgttgccggtcggccggccagcctggaggcgtcggaacggatcctcgggctgttcatcaataccttgccggtggtctgcgaagtggcgccggaacagtgcgtcggcgattggctgagagccttgcaggactacaacctggagatgcgcgagcaggagtacaccccgctcagcgacatccagcgctgggccgggcgcagcggtcaatcgctgttcgacagcatcatcgtgttcgagaaccatccggttgaccggacgctgcgtgactggcgcgacgattcgctgcgcttcggcgagatgcgcagcgcaggcctgaccaacttccccatggacctgatggtgaccagcgacgattccggcctggcgatcgaatacatgttcctgcgcgagcacttcgccgtggcttcggtcgagcgcctgcgcacggatatggaagggctgctcgcagccttgagcggcgacgccgagtgccgcctgggcaacatcggcttgccgagtgcccgggtgccgttggcggatggcgcgtgtccggatcggtatccgctggtacaccagcgcatcggcgagtggagccggcgcacgccggacgccaccgcgctggtgttcgacgagcgcagccactcgttcgccgagctggacgcgcgggccaaccgcctggcgcatgcgctggtcgagcgcggcgtggcggccgatgtgcgggtcggtgtggcgctgccgcgcggcaccgaactggtcgttgcgctgctcgccgtgctcaaggccggtggcgcctatgtgccgctggacctggcgtatccgcgtgagcgactggcttacctgatgcaggactccggcatcgccctgctgctgagcgaaagccaggcgctggtgcaattgccggtgcctgccggcgtgcccgccctggccctggaccgcctggatctgctggagcatccggcgcaggcgccgcaggtcgaggtccatcccgccaacctcgcctacgtcatctatacctccggctccaccggcctgcccaagggcgtcgcggtgagccatggtcctctggcgatgcacatcgacgcggtcggcgagcgctacgagatgtccccggccgatcgcgagctgcacttcatgtcgttcgctttcgacggcgcccatgagcgctggctgaccgccctgggccacggcggcagcctgctgctgcgcgacgatgcgctgtggacgccggagcagacctacgcggcgatgcaacgccacggcgtgacggttgccgcgttcccgccggtctatctgcaacagctggccgagcatgccgagcgtgacggcaacccgccgccggtacgtatctactgcttcggcggcgacgcggtgccggtggccggtttcgaactggccaagcgcgcgctgaaaccgcgctacatcatcaacggctatggcccgacggaaaccgtggtcacgccgctgatctggaaggctgccatggacaccgaatgcggcgctgcctatgcgcccatcggcagcttcgtcggcgagcgctgcggctatgtcctggacgctgacctgaacccgttgccggcgggcgtggccggggagctgtacctcggtggcgtcggcctggcgcgaggctatttgcagcggccggggttgagcgccgagcgcttcgtcgccaacccgttcagccgtgccggcgagcgtctctatcgcaccggcgacctggttcgtcagcgcgaggatggcaccttcgactacctcgggcgcatcgacaaccaggtcaaggtgcggggcttccgcatcgaactgggcgagatcgaggcgcgcctgcaggatgccggcgaggtccgcgaagcggtggtggttgcccgcgacgcggcgagtggcaagcaactgctcggctatgtggtcgcggaagatggcgcggacgcctcgggcctgctcgagcgcttgcgcgagcgcctcaagcgcgatctgccggagtacatggtgccggcgcacctggccctgctgccggcgatgccgctgacgccgaacggcaagatcgaccgcaaggcgctgccggacatcgacgtcaccgccagcgaggcctacgtggcgccgcgcaatgagctggagctggccctggctggtatctggcaggaagtgctcggtatcgcaaggatcggtgtgcacgacaacttcttcgaactgggtggcgactctatcctcagcatgcaggtggtggccaaggcccgtgccctgaagaagctgggcttcagcctgaagctgcgcgacctgatccagaagccgagcatcgccgccttgtccgggtacgacgacagcgctgcgccgccgtcgccgatcctggcgctgaacgcggcggtggacggatgcccgccgctgttctgcgtgcatgccggcttcggcacggtgttcgactatgaaccgctggcccggcgcctgaatggccgccgtagcgtactggcgatccaggcccgctcgctgctggatccgaactggcgggacgcttccctgcaacggatggccgaggattacgtcgcgctgatccgccagcgccaggccgagggtccctatcacctgctcggctggtcgctgggagggaccctgggcatgctaatggccgccgagctcgagcggcagggacagcaggtggccttcctcggtctgctagacagctatgtgccgggaaccgaagcgcccgccgccgatgactggcgcgaggatctgctggacttcctcagcgtcagcgccggcctggaaacccgtccgccactggccgccgggttggagcagcgcgacaacgtcagcgccgccatcgccgagtgccttggcgtcggccagaccgggaagggagggctgggctgcgacgaactggcccaggtattcctggtcgcccggcagctcaagcaactctccgggcaactggatagttgctcgccgatccaggtccggccgctgtgctggtggacgcgcgggcgtggtgaagaggtgcgggcgctgtcgcggcaattgggtggtcagcctctggccggtcgggtcgccgcgtgcgggcatttccagataccccatgcgcaggaggtgctcgactccctggtggaggcgcttgaagaaatccacggcagcctcgtctattcatga

SEQ ID NO: 323844 - DNA, 966 bp, Pseudomonas aeruginosa
atggccttgaaccccgatatcgcggcatacctggaactggtcggcaacggccgcagcagtggcaagagcctgcccatgcaccagttgacggtgcaacaggcgcgcgagcagttcgaccagtcgtcggcgttgatggacccaggcctcgacgagccgctgccgcgcgtcgagacactgttcgtcccggcgcgggacggtacgccgttgccggcgcgcctctacagtccccaggggctgtccgcgtcgccgccgttgccgggcgtgctctacctgcatggcggcggctacgtcgtcggcagcctggactcccacgacgcgctgtgcgccagcctggccgagcgcgccggttgcgtggtgctttctctggcctaccggttggccccggagtggcgttttccgaccgccgccgaggacgccgaggatgcctggtgctggttggctgccgaagccgcgcggctaggcatcgatccgcaacgcctggcggttgccggcgacagcgtcggcggcagtctgtgcgcggtgttgtcgcatcgcttggcgctgcggggagacgcctcgcaaccgcgtctgcaggtactgatctacccggtcaccgatgccagccgcacgcgccaatcgatcgagcgttacgccgttggccacctgttggagagggacagcctggagtggttctaccagcactaccagcgtagccccgaggaccgtcaggacccgcgtttctcgccgctgctcggcgtggtgccggctgacctggcgccgacgttgctgctggtcgcggagtgcgacccgttgcatgacgagggcatcgcctatgccgagcacctgcgccagggcggcgcccgggtggagttgtgcgtctatccggggatgacccatgacttcctgcgcatgggtgcgatcgtcgacgaggcggacgaagccaaggacatgatcgccgacgcgctggtggcggccctggcaccctga

SEQ ID NO: 323845 - DNA, 2427 bp, Pseudomonas aeruginosa
atgcgcaacaccctgacgctgcatccgcgcctgagcaccaccgccctggccatggccctgttggcgccgatcgccagccaggccgaagcgcagaagatccagttcgacatcggcgcccagtccctgcccagcgccctgcgccagttcggccagcagagccagttgcaggtgctctacagcgccgatgaagtgcaaggcctgcgcagcaacccggtccgcggccaactgagcgtcgaggcggctctcgccgaacttctccgcggtaccggcgccagctacagcctgcaaggctccagcgttaccatcagcgcccagcgctcggcggactcggtggacctcggcgacattaccgtcaccagccaggagtcggcctggggccacgtcaacggctacgtggccaagcgcagcggtaccggcaccaagaccgacaccccgctcaaggaaatcccccagaccatcaacgtggtcacccaggacgagatcaaggcgcgcggttcgcagaccgtcaccgaggccctgcgctacactccggggatcaccggcggcggcttcgccgaccgggtgaagatcttcgacgagccgacctcgcgcggcttcagcccggcgccgatgtacctcgacggcctgcacatgccctacggcggcggcagtaccggcggtgccctgcagatcgacccctataccctggaacgcatcgaggtgctgaaggggccggcatcggtgctctacggccagaacgaaccgggcggtatcgtcaacatggtgtccaagcgtcccaccgccaccccgatccgcgaagtggtgctcggcggcggcagccaggaccgccgctacggagccttcgacgtcggcggcgcgctcgatgaacagggcacctacctgtaccggctgaccggtgtgggccgggacatcaactcggagatcgactatgccgagcagaaacgcttcatgctggcgccgagctttacctggaaccccaacgagcagaccagcctgaccttctacggccagtaccagaaggacaacgacgtgcccgaggcccaaggcctgccggcctacggcacggtgttcagcacgcccaacgggcggatcaagcgcagcaccttcatcggcgagccggggctgaactcctacgaccgcgaccagttcgtgctcggctatgagttcagccacgaattcaacgatgtctggaccttcaagcagaacacccgctacgcctatatcgacgaccagtacgtggcgccactgcacggttacaacttcgtacccaacccgaacaccggtgccaacgaccagcgctataccacgcgctatggcgtcgactggtcacagaccaacaaagccttcggcatcgacaatatgctccaggcaaaattcaagaccggtgaaatcagccacaccgcgctggtcggagtggattactaccattacaagagcaaattcctcggcctttactcatacgagaacagttcgccgatcatcgatctgtacaagccggcctatggcaataagttcaccttcaccaatccctatcgctggaaccgtaccaccgagcagaccggtctctacttgcaggaccagatgaaatggaaccagtggttcttgaccctcggcggccgctatgactgggccaagaccgacaccaaggaaaccggcggcaaggtcgacgcgaaggacgagaagttcagcggccgcgccggcttcggctacgagttcagcaacggcatcgtgccctatgtcagctactccgagtcgttccagccggtcggcggtttgaacatggacgaaggcaacaaggccttcaagccgaccaccggcaagcagtacgaggccggcatcaaataccagccgccggggcagaacagcttcatccagatgtcggtctaccagatcgacaagaagaacgtgctaaccctcgatctcgagaaccccaatttctacgggcagtccggcgccatgcgctccaagggtttcgagttggaaggcaaggccagcctgaccaacaatctcgatgtcatcgcctcgttctcgcgcaacgacatcaagtacaccaaggacaacgaggggcgcaaaggccgccatccggccggcacgccgccgatgaccgccgccgtctggctggactacacccttggcggagacaccatgttcgccggcctcggcgcggggatcggcgcgcgctacactcgtggcagcgacggcaccgatacagccgtcgatcacttcaccatcccgtcctacaccctgtacgacggcaagctgtcctacgacttcgaaaaatccccgctgcacgtaaagggcctgaaggtgcaggtcaacctggagaacctcgaggacaagaagtacgtcagccgctgcgccggtatttgggactgctactacggccagggccgtaccatcaccaccgacctgacctacaactggtaa

SEQ ID NO: 323846 - DNA, 1653 bp, Pseudomonas aeruginosa
atgtccgcaacaccccgtagcgccactcgcgaactcctgagcattctcaaacccttctggccagcgctcagcctgtcgatcggactgggtatcgtcggcggcctggccatcaccgcgctgctcacctcgatcaaccgcgtactgaacgccgagggcggcatgaccagcggcatgatgctggctttcagcgcgatctgcgcgctggccctgctcagttcgatcctgtccaacatcggcaccaactacgtcggccagaaggtcatcgcccggctgcgcaagaccctcggcggccgggtgttgtccgccccgatcgaacaactcgaacgctatcgcacgcaccgcctgatcccggtgctcacccacgacatcgatacggtcagcgatcttgccttcggcctgccgcaactggtgatctccctgaccgtgacccttggctgcctgggctacctggccaccctgtcgctgccgatgttcctggtcgccgccagcgccgtggtgctcggcaccatcgcccagtacatcgcccgcggctatggaatggccggtttcgaagcggcgcgcgaagaggaagacttgctgcagaagcactaccgcggcatggccgagggagccaaggagctgcgcatcaaccgcccgcgccggcagcgcctgcacgggcgtctgctggacgagaccgtggagcgcatctgccgcctgcaggtgcgttcggtgaatatattcctcactgccagcaccttcggttcgctgctgttcttcgtggtcatcggcaccgccctggcggtccagacctggtggccgacctccgaccgcagcgtgctcagcggcttcgtcatgaccctgctgttcatgaaggggccgctggaaagcgtactcagcctgttgccgctgatcagtcgcaaccgtatcgccctgcgccggatcgccgaactcaacgagcagttctccaatcccgaaccctacctgctgctcgagaacgacgcctccagaccggctcaagaggtgcgcagcatcgagttgcgcgatgtcggctacagctatccgggcgtgccgggctcgacgcccttccgcttcggcccggtcaacctgacgatccgcccgggagagatcctcttcatcgtcggcgagaacggctgcggcaagaccaccctgatcaagctgttgctcgggctgtacacgccccacgagggctcgctgctgctcaacggagaggaagtgacggcacaggcgcgcgacgactatcgtcagctgttcaccaccgtgttcgccgactactacctgttcgacgacctcgtcgacggcgagcaacacttgccggaagaagccgggcgctacctgaagcgcctggaaatcgcccacaaggtcagcgtcagcgacggcagcttcaccaccaccgacctctccaccggccagcgcaagcgcctggcgctggtcaatgcctggatcgagaagcgcccggtgctggtcttcgacgaatgggccgccgaccaggatcccaccttccgccggatcttttataccgagctgcttcccgagctgaagcgaatgggcaagaccatcatcgtgatctcccatgacgaccgctacttcgacagcgccgaccaactgctgcgtctggccggcggtcgagtggtcgaggagctgcaaccggcctga

SEQ ID NO: 323847 - DNA, 876 bp, Pseudomonas aeruginosa
gtgccggagcacgcgctcaagtccgacccattccctgagaaagacgagatgacgaaaaggaaattagcctatatctggtccctgagaaacgccgccgccgacaaggccggacaacaggtggcctacaagggcgagctgcgctacatgaagtccccgctggagtttctcgccgaatcgctgaaccggacggcgctgggggacgcctacgaattggtcggggtgatctacgacgacgacccggagctgccccgcgaccagcggaagatcgaggactacggattcgcctaccggcctggacagcagtggttctacccggcggaactggaggtacaggggcggcgcatgaacgatctgctgctgaacgtgccttccacctaccgtcgccacccgcgcgggagcgcggagcatgtggccggcaagcgcgacttcgaacgacgcctgtacgagacgctggtcgagctgcgcgccgaggtcgtcgtcctcgacggcctgctggtcatcctcgatgagctggtgcggcccggggcgccattcgcccgacggatcatgaatatccatcccggggtcacgcgcgccgactcgccctaccaacggcgcggcgcctgggcgaccctggatgcattgcatggtgcgcggggtgagaagatcgtcgactgggcgacgatggaaagcgtaccggtcgaacccttgtacctgaccggcgcctcgttccactacgtggacaacggcatcgattccggcgaggtcttccacgacgtgctgaaaacgaagatatctcccgacgacaccatcctcgagctgcgttggaacaacttcaacgacagtctgttcccggccttgcacgaaggcctggctctgctggccgagaaggactga

SEQ ID NO: 323848 - DNA, 996 bp, Pseudomonas aeruginosa
atgaagacacccctccccgccgacagcgacaccttggtccaggacgccgcacactggtgcatgcgcctgcatgccgaggactgtagcgaggaagagcgtgccgagttccgtcgctggctggcgagcgatccgaggcacgccgacgaatacgcagcaatggaagaaatctggcaactcagcgaattgctgccccgccgctccgacaccccggcggccgccccggcctggccgcgcccgcgtactacccgcaggcgccactggagaaaccaggcgcgagctgccgcgctcgctctgttcctgctccccgcctcggcctacctgggctggttgcagggctggattccctccagctatcaacgctacacggcgcaggacaatatccgccacgtcaccctccccgacggcagcgaggtagaactggatctcaagacccacctcagcttcgccaacttcagggacatccgccgcgtcgtactggacaacggcgaggcctatttccatgtcacccacgatacggcccaccccttcgtggtcagggccggcaagggttcgatcaccgtcaccgggacccgcttcaacgtctggaagtaccaggacaacgtcgtcgtcaccgtgaccgaaggctcggtgaaggtccgcagcgaaggctcgggcaacgacagcagcctgaccccgggcatgcaggccagctactaccccgggctgctgcaaccgctggtcgaggcggtcgatacccgtcaggcactggcctggcgcgaaggccgcctgattctcgacgacctgccgctggctcaggccctaccgctgatcaaccgctacctggagcatccgctggtcctcaccgacaagaccagcgccgaactgcgcatcggcggcatctacagcacccgcgagatacgcaacctggtggaggccctgccgaaggtcctgccggtggatctcgagcaccgcgacgacggcagcatccgcatcagcagccgttacgcccagctctga

SEQ ID NO: 323849 - DNA, 480 bp, Pseudomonas aeruginosa
ttggaaaaccattatcgggagctgttgcgctttctcagcgccaggctcggagaccgacaggcggcggccgacgttgctcacgacgcgtatttgcgcgtgctggaacgctccagtcaagcgcgaatcgagcatccgcgggcgttcctgtaccggacggcgctcaatctcgcggtcgacgagcatcgccgcagccgggtgcgcaaggccgagcccttgcacgtcctcgacgaggaggagggtatgtccgagccttccccccaggtactcgaggaccagcgccagcgcctcgacctcttgaccctggcgctgaacgaactgccgccgctgtgccgcgagtccttcctcctgcgcaagctggaaggtctttcccacaacgagatagcggcgcacctgaatatctcccgcagtctcgtggaaaagcacatcgtcaatgcgatgaggcactgccgcctgcgcatgcaagcctgggagtccagttga

SEQ ID NO: 323850 - DNA, 1332 bp, Pseudomonas aeruginosa
atgacccaggctacagcaaccgccgtcgttcacgaccttatcggtatcggcttcggcccctcgaacatcgccctggcgatcgcccttgaggaacgcgcgaggacccagggggaactgcaagtcctgttcctcgacaaacaggccgactatcgctggcacggcaataccctggtcagccagagcgagttgcagatttccttcctcaaggacctggtatccctgcgcaatccaaccagtccctattccttcgtcaactacctgcacaaacatgggcgcctggtggacttcatcaacctgggcaccttctacccctgccgcatggagttcaacgactatctgcgctgggtcgccggccacttcgccgagcagagccgttacggcgaggaagtgctgtcggtcgagccgatgctggtcgagcgcaaggtcgaggcgctgcgggtgacttcgcgcaacgccgaaggcgaggagtttgtgcggaccactcgctcggtggtggtcagcgccggcggtacgccgcgaattcccctggcgttccgccacctgaaggacgatggcagggtcttccaccattcgcagtatctggaacgcatgctcaagcagccctgtgtcaacggccagccgatgaaagtcgcgatcatcggcggcggacagagtgccgccgaagccttcatcgatctcaacgacagctatccatcggtacaggtcgacctgatcctgcgcggttcggcgctgaagccggcggacgacagtccgttcgtcaacgaagtattcgcgcccgagttcaccgacctgatctacaaccaggaaggcgcggagcgtgagcgcctggtgcgcgagtaccacaacaccaactattcagtggtggatatcgacctgatcgagcgtatttacggcatcttctatcgccagaaggtttccggagtcccgcgccacgccttccgtagcctgcgctcggttgagaaggccacggcaggcgccgagggtatcgagctggcgctgcgtaataccgccaatggcgaactgagcgtgcagcgctacgacctggtaatcctcgccaccggttatgagcggcagttgcatcgtcaactgctggagccgatggccgactacctcggggacttcgaggtcgaccgcaactatcgtctgatcaccgaccagcgttgccaggcgtcgatctacatgcagggcttctgccaggccagccacggcctcagcgacaccctgctgtcggtgctgccggtacgtgccgaggaaatctccggctccctgtaccagcacctgaagcccggcactgcggcccgcgccctgcacgagcacgccctggccagctga

SEQ ID NO: 323851 - DNA, 2289 bp, Pseudomonas aeruginosa
atggggatgcgtaccgtactgaccggcctggccggcatgctgttgggttcgatgatgccggtccaggccgatatgccgcggccgaccgggctggccgcggacatccgctggaccgcctatggcgtgccgcacatccgggccaaggatgagcgcggcctgggctacggcatcggctacgcctatgcgcgcgacaacgcctgcctgctggccgaggagatcgtcaccgcgcgcggcgagcgggcgcgctatttcggcagcgagggcaagtcgtcggccgagctggacaacctgccgtccgacatcttctacgcctggctcaaccaacccgaggcgctgcaagccttctggcaggcgcagacgcccgcggtacgccagttgctcgaaggctacgccgccggtttcaaccgcttcctccgcgaggccgacggcaagaccaccagttgccttggccagccctggctgcgggccatcgcgaccgatgacctgctgcgcctgacccggcgcctgctggtcgaaggcggggtcggccagttcgccgacgcgctggtggccgccgtgccgcccggcacggagaaggtcgccctgagcggcgagcaggcgttccaggtcgccgagcagcggcgccagcgcttccgcctggagcgcggcagcaacgccattgccgttggcagcgaacgttcggcggacggcaagggcatgctcctggccaacccgcacttcccctggaacggcgcgatgcgtttctaccagatgcacctgaccattcccggccggctcgacgtgatgggggcctcgctgcccggcctgccggtggtcaacatcggcttcagccgccacctggcctggacccacacggtggatacctccagccacttcaccctgtatcgcctggcgctggacccgaaggacccgcggcgctacctggtcgacggtcgttcgctgccgctggaggagaagtccgtcgcgatcgaggtacgcggcgccgacggcaagctgtcgcgcgtcgagcacaaggtctaccagtcgatctacggcccgctggtggtctggcccggcaagctggactggaaccgcagcgaggcctatgcgctgcgtgacgccaacctggagaacacccgggtactgcaacagtggtactcgatcaaccaggccagcgacgtcgccgacctgcgccggcgcgtcgaggcgctacaggggatcccctgggtcaacaccctggccgcggacgagcagggcaacgccctgtacatgaaccagtcggtggtgccctacctgaagccggaactgattcccgcctgcgccattccgcaactggtcgccgaaggcctgccggccctccaggggcaggacagccgctgtgcctggagtcgcgacccggccgcggcccaggctggcatcaccccggcggcgcaactgccggtgctgttgcgcagggacttcgtgcagaactccaacgacagcgcctggctgaccaacccggcgagcccgctgcagggcttctcgcccctggtcagccaggagaagcccatcggtccgcgggcgcgctacgccctgagccggctacagggcaagcagccgctggaggcgaagacgctcgaggagatggtcaccgccaaccatgtcttcagcgccgaccaggtgctgccggacctgctccgcctgtgccgcgacaaccagggcgagaattcccttgcccgtgcctgcgcggccctggcgcagtgggaccgtggcgccaacctcgacagcggcagcggcttcgtctacttccagcgcttcatgcaacgcttcgccgaactcgacggcgcgtggaaggagccgttcgatgcgcagcgtcccctggatacgccgcaaggcatcgccctcgatcggccgcaggtggcgacccaggtgcgccaggcgctggcggacgcggcggcggaggtggagaagagcgggattcccgacggcgcgcgctggggcgacctgcaagtgagcacccgtggccaggaacgcatcgcgattcccggcggcgatggccatttcggggtctacaacgcgatccagagcgtccgcaagggcgaccacctggaggtggtcggcggtaccagctacatccagctggtgaccttccccaaggaagggcccaaggctcgcgggttgctggctttctcccagtccagcgatccgcgctcgccgcactaccgcgaccagaccgagctgttttcccgccagcaatggcagaccttgccgttcagcgacaggcagatcgacgccgacccgcaactacaacggctaagcattcgcgaatga

SEQ ID NO: 323852 - DNA, 537 bp, Pseudomonas aeruginosa
atggcggcatccggcaagctcgacctggttcgtggcgacagccatctcgccggcaacctgctcgacggcagcctggaaggcccgttgcgcatcgacgagcacgacaggccgcaggccagcctcggctaccggcagggccagttgcacggcgccagcaccctgttccatcccaacggcaaggtctccgcgcaactcgccttcgtcgacggcaagctgcacgggccggcgagtttccatgccgcggaaggctggttgcagcgcaaggcgcactaccgcaacgggctgctccacggcgaagcgttcaactatttcgccaacggccaggtggccgagcgcgagcattaccgcgacggcgtacgcgacggggtctaccaacgcttccatggcaatggccaactggccttcgacggacgctacctgaacggccagctactggacggcgcccagccgttcgccgatgacggccggccactggacagcgagggcaggcccatggcgcgctggcgctggtggtggaccaggctggcggagccctag

SEQ ID NO: 323853 - DNA, 1794 bp, Pseudomonas aeruginosa
atgagcgattcgattgatgccgacctgctcgactactaccagcgcgagctgacctggctacggcacgccggcggcgccttcgccgagcgctatccgaaggtcgcccggcgcctgcaactggctcccggcgaatgccccgacccgcacgtcgagcgtctgctggaaggtttctcgctgctcaccgcgcgcctgcaacggcgcctcgacgacgactacgcagagttcagcgacgccctcctcgaacagctctaccccctggcgctgcgcccgctgccgtcctgcgcgatcgtccagttcgagccggacccgacccagggcaacctcgccgagggctaccggctgccgcgcgacaccgcgctgttcgtcaccacccgtggcggcgacagcgtgcatttccgcagcagcgccgaggcgaccctgtggccgctggcgatcgacgaggcgaacctgctcggcggcgaggaggcgcaagccctgaccggagtcggcgccgcccgctcggcgttgcgcctgagcctgcgctgcctgggcgagtaccgctgggacgaactgtcgatcgagcgcctgcgcatccacctggcggcttcgccgatgggctgcgcgatcctctacgacctgctcgccgcgcataccgtgcaggtcatggcgggggcgcccggcacgccgccggcggcgctccgcggactgccggagatcgtcggcttcgccgccgacgaggcgctgctgccggaggaagacggcggacatccgggcctgcgcctgctcgccgagtacttcgccttccccgacaagttccacttcttcgacctgccactgtccggcgcgctcgccgacggacagacgctctacctgtacctggtcttcgatcgcgcaccgacggcacgcctgcatttgcaggcggaagacttccagctcggctgcgcgccggcgatcaacctctttccgcggacctcggagccgctgcgcccggacggcacccgcagcgagtaccgcctggtcgccgacagtcaccgcgagaacagcgtggaaatccatagcatccgcgccgtgcgctcggtggccgggagcaccgtgcagccagtcccggcctactatggctgccgccacgacagccacctcggcacgctctactggcacgcccggcgcatcgccgggctgaccccgaaccggctgggcagcgacctgctgctgagcctggtggataccggcttcgacccgttacgcgaagccccggccttcagcctgaccgccgagctgctatgcaccaatcgctatctggccgagcgcctgggtgccggcaccgcgctgggcttcgaacggcccgggccggtcgccgccgcacgcctgcgcaacgcgcccagcgcgcagagccagccgcgcctggacggccagtcgcgctggagactggtctcgcagctgaccctcaaccacctgtcgctggtggaaggcccgcgcgccctcgaagccctgcgggaaatcctcgccctgcacaacctgcgcgacgatgccagcgcccgccggcagatagaagggctgaggcaactcgactgccagcgggtggtggcgcacgtcggcgaggatgcctggcgcggctggcgcaatggcctggaaatccgcctgcgactcgatccgcaacacttcgtcggcgccagcggcgtgctgttctccgccgtgctggcgcagttcttctcgctgtatgccaccgccaaccgcttcgtgcgcacggtcctggtggaagccgacaaggaggtgaagacatggcaaccccaggccggctcgccgctctccctctga

SEQ ID NO: 323854 - DNA, 1086 bp, Pseudomonas aeruginosa
atgtccgtcatcacccatccccacgcccgcgagctgaccaaatcggtgcgcgccaccgtgctggtgttcaacgacccccgttcccgcgagctgctggagcgcatcgagcgcctggcgcccagcgaggccaacgcgctggtcatcggcgagaccggcaccggcaaggagctggtggcgcgccatatccacgccctcagcggacgcaacggcggcccgttcgtcgcggtcaactgcggtgctttcgccgagagcctggtggagagcgagctgttcggtcacgagaagggcgcctttaccggtgcgttgcagagcaaggccggctggttcgaggcagccaacggcggcaccctgttcctcgacgagatcggcgacctgccgccgagcatccaggtcaagctgctgcgcgtgctgcaggaacgcgaggtggtgcggctcggttcgcgccggccgatccccatcgacgtgcggctggtggcggcgaccaacgtcgacctggccgacgcggtggtcgccggacacttccgcgaggacctgttctaccgcctgcacgtggcgaccatccaactgccgccgttgcgcgagcgccgcggcgatatcctgccgctggccgagtacttcatcgtcgagcactgccggcgcctcggctacaccagcgcgagcctgagcccggaagccgagcgcaagctgctcgggcattcctgggcgggcaatatccgcgagctggagaacgccatccaccacgcgctgctggtctgccgcaaccgtctgatccagccggccgacctgcacctcatcgacatgcgtgcgcgccaggagccgaacggcttgcgccgcgctcccgaaagcgccgccggctcggcgttggaggcggcgctgcaggcgctgttcgaggaaaaccgcgaggatctctacgagcacatcgaggaaaccgtgttccgtgccgcctatcgcttctgccacggcaaccagttgcagaccggacgcctgctggggatcagccgcaacatcgtgcgcgcccgcctggagaagatcggcgagctggaaacctcgccacgacacaacgtggtctcgctggtgggcaagtga

SEQ ID NO: 323855 - DNA, 654 bp, Pseudomonas aeruginosa
atgtcgcccatgcttgaacggctctggcaaggtttcctcgataccctgctgatgatcggcgcgtcctccgccatcgtcctgctggtgggtatcccgctggccctggtgctggtcaccaccgggccgggcgggatcttcgaggcgcgcctgctcaatcgcatcctgggcggtctggtcaacgtgctgcgctcggtacccttcctgatcctgatggtggcgctgattccctttacccggatgatcgtcggcaccagctatggagtctgggccgcggtggtgccgctgaccatcgccgccacgccgttcttcgcgcggatcgccgaggtcagcctgcgcgaagtcgaccacggcctggtggaggcggcccaggcgatgggctgcgaacgccgccacatcatctgcaacgtactgttgccggaggcgcgaccgggcatcgtcggcggcttcaccatcaccctggtgaccatgatcaattcctcggccatggccggcgcgatcggtgccggcggcctgggcgacctggcctaccgctacggctaccagcgcttcgacacccaggtgatgctcaccgtgatcatcgtccttgtgctgctggtcacgttgatccagttcggcggcgaccgcctggcccgcctgctgaacaaacgcctgtag

SEQ ID NO: 323856 - DNA, 837 bp, Pseudomonas aeruginosa
atgagcgaggcgctcctcgacgctcgcgggatcgccctcggctatccgcgcggtgccggctggcaggcggtgctcggcgatttcgaattgcgcctgggcgccggcgaggtggtctcgatcctcggtcccagcggcgtcggcaagtccagcctgctgcgcgtgctggccggcctgcaggagccggccgccggcagcgtgcgggtactcggcgagcccctgcgcggaccgcatccgggcgtcgcggtggcgttccaggaccccagcctgctgccctggctgaacctggagaagaacgtcgccttcggcctcgatttcgcccgccagccgcacctcgacgcggccacccgccaggcccgcgtcgaccaggcgatcgccgcggtcggcctggagcacgcccgtgcccgctacccggcgcaactctccggcggcatggcccagcgcaccgcgctggcccgctgcctggcgcggcagccgaaggtgctgctgctcgacgaacctttcggcgcgctggacgaagtgacccgcgccgacatgcagcagctgctgctgcgggcgatccacgagcgcggcaccgccgtggtcctgatcacccacgatatcgacgaggccctgctgctctccgaacgcatcctgctactgggtgacagcccggcgcggaccctcggcgagtggcgcatcgacctgccgcagccacgcgcggagctggtcgaggaactgggcgcgttgcgcatcgagatcctgaaaaccctacggcgggcgagccgcacccatgcccatcccatcgctcagccggaggcctcccatgtgcctggacgacccgacccattcccgacgtga

SEQ ID NO: 323857 - DNA, 1236 bp, Pseudomonas aeruginosa
atgagcgcactggaaaagaacgccgccgatccctatcggcaaccgctgccacggaccccggcccggcgtatcgccgacgacgccgaggcgatccgcgtcgcccgcgaactggccgggctgttcgccgaggaagcctcgctgcgcgaccgccagcgccgactgccggtggccgaactggaagccttctcgcagagcggcctatggggcatcagcgtaccgcgcgcctacggcggcgccgaggtcggctaccggaccctggccgaagtactgaagaccatcgccgcggtagacccgtccctggcgcagttgccgcagaaccacctggcggtgctcgaccatttgcgcctggacggcagcgaggagcagaaacgcttcttctacggcctggtgctagacggcgtgcgcttcggcaacgccttctccgaacgccacagccgtaccgtcgccgaattccagacacgagtgctggcggatggcgacgggttccgcatcgacggccgcaagttctattcgagcggcgccctgctcgcccactgggtaccggccgtcggcctcgacgccgagcagcgcgcgcacctggcgttcatcccgcgcgacgcgccggggctgacggtgatcgacgactggtccggcttcggccagcgcaccaccgccagcggcaccgtcatcctggacaacgtgcgggtgccggccgagcacgtcatcccggtgcaccgcgccttcgaccgccccaccgccgccggcgccgtatcgcagttcatccaggccgccatcgacgccggcatctcccgtggcatcctcgccgagaccgtgcagcaggtgcgccgccacgcgcggccatggatagacgccaaccagcagcatgcctgggaagacccctacaccatccagcaggtcggcgacctgcgcatccgcgtgcgcgccgcggaagccgtgctcgacctggcggccgacgccatcgaagcggcgctcgccgcccccgacgaggagagcgtggccgccgcctcgatcgccgtggccgaggccaaggtgctcaccaccgaagccgccctgctcgccgccaaccggctgttcgaactggccggcacgcgctcgaccctggaggaactcaatctcgaccgccactggcgcaacgcccgcacccacaccctgcatgacccggtgcgctggaaataccatgccatcggcaactaccagttgaatggggtgaagccaccgcggcacgcctggctctag

SEQ ID NO: 323858 - DNA, 159 bp, Pseudomonas aeruginosa; identical to SEQ ID NO: 321518

SEQ ID NO: 323859 - DNA, 2235 bp, Pseudomonas aeruginosa
atgagtgcgtcagaagacctgcaatccgctgtgcaaccggccgcgagcgaagcgctcgaaggattcccgctgtctcccttgcagacccgcgcctggcgccgccatgccgagcggccggaaaatacggttgtcggcgtgcgcctgcacgccccggccgatcccgtggcgacgctggagcggctgcgccgggcgctggacggcgaggcgcaactgcgcgtggcctaccggacgatgccgggcatgagcctgccggtgcaggtactggatgggcgcgcggccgatctgctggtcgagcgcctgccgggagatggcgactgggccggacgcttcgcgcgcgaaagcgcgcgtctcgccgcttcgcccctgggcggggaaggccagccggtactggcgctcggcctgctgctggacgccgccggagagacgctccaggggctgttgctggcggcgccggcgttcgtcgtcgatgcggccagcctggtggcgctgctgcgccgcggcctggggccggccggccaggcgagcgcggacgagggagacgaggcgctgctgttccagcatttctccgagtgggccaacgaggcgctggccggcgaagacggcgaaagcgccagcggttactggcgagagcaggcggctgttgcggcggagagtccgctggcgctggcggacgacctgggcgaaggcgagtggacggcgcggcgcctgctgccgcgcgcgctgctcgaacgcctggcagccaacggcttgccggaggcggccgccctgctggcctggacccaggtcgccgggcagttccagggcgacgagggactccctctggaaatggcgcgactggtctcggggcgcctgttcaacgagttcgccgagctggccggaccgttcgccggggtcgcgccgctgtgcctggagaatgtccgcgcgggcagcgtcggcgagcggctcgatgccctccaggcggcgatcctcgcccaggaggaggcagcggccctgcgcgatccctttgcccccgactggccgctcgccgagttgggcttcgcctggctggcgggcgaactggatggcgccggggtggccgagctggattgccgtcagccgccgctgggcgggttcctcgagttgcaggtgctgccccacggcgaaggccggctggccagcctgcgggtccgccgcgaccatgacggaacgctggccgggcgcttgctcgacgcctgggtcgaatgcctggaaagcatcgccgccgacaggcaactgccactggccgggctgccgttgatcggcgcggccgagcgcgagcgctaccaggcctggcagggcgagcgcgtggagcccgcgccggtggaatccctggtggccgcgttcgatctgcgcgcctccctgcagccgcaggcgccggcgttgctggatgcccacggcagcctggatttcgccacgctgcgcgcgcgcagcgaagcggtcgccgaagcgctgctggctgccggcgtgcggcccggccaggcggtggcggtgatgaccgggcgcaaccgcgaggcgatcgtcgccctgctcggggtgatgcgcgcggcggcggtgtacaccccggtcaatccggagtttccggcggcgcgggtggagcggatgcgcgaagcgggcgggatcgtcttcgcccttgccgatgccgagtgcgccgggcgcgcccgcgaggccttcgccggggcctgcctggacctgtcgacgctgccgcttgccggcagcggcatgagcctgccggcgccgggcgggcgcgatgcggcctacatgatcttcacctcgggcaccagcggccagcccaaaggcgtggtggtcgagcacgccagcgcgctcaacctgtcccaggccctggcgcgcacggtatacgcgaacgtggtgggcgagggcctgcgggtgacggtcaacgcgccgttctccttcgattcctcgatcaagcagattctccagttgctctccggccattgcctggtcctggtgccgcaggaggtgcgcagcgatccgcagcggatgctggggttcctcgaagaacggcgcatcgacgtgctcgactgcaccccgtcgctgttccgcctgctgctccaggccggcctcgacgatgcccacccggcgctgcccgggcgcatcctggtaggggcgagcgcttcgacgaagcgtcctgggaggtcgccgccggctggcgccgctgccaggtgttcaatctctacggtcctaccgaagccacggtga

SEQ ID NO: 323860 - DNA, 1452 bp, Pseudomonas aeruginosa
atgatcaggatcgacttttcccagttgcaccaggcccgcgaagatgccgcggcggccatgccgagcatcgccggcaagaagattctcatgggcttctggcacaactggccggccggcgccgccgacggctaccagcagggctcgttcgccaacatcgcgctggaagacgtgccgagcgagtacaacgtggtcgccgtggccttcatgaaagggcgcggcatcccgaccttccagccatacaacctgtccgacgcggagtttcgccgccaggtcggcgtgctcaacgcccagggccgcgcggtgctgatttcgctggggggcgccgacgcgcacatcgagttgcacgccgggcaggagcaggcgctggccgccgagatcgtccgtctggtggaaacctacggtttcgacggcctggacatcgacctcgagcagagcgccatcgacctggccgacaaccagcgggtgctgccggcggccctcaagctggtgcgcgagcactacgccgggcagggcaagcacttcatcgtcagcatggccccggagtttccctatctgcacaagaacggcaagtacgtgccttatctgcaggccctggaaggcgtctacgacttcatcgcgccgcagtactacaaccagggcggcgacggcctgtgggtccaggaggcgaacggcggcaagggcgcctggatcgcacagaacaacgacgcgatgaaagaagacttcctctactacctcaccgagagcctggccaccggcagccgcgacttcgtgcggatcccggcgcagcgcctggccatcggcctgccgagcaacgtcgatgcggcggctaccggctacgtgatcgatcccgccgcggtgagcaacgcgtttcgccgcctggaagccgccggtcacgcgatcaagggcctgatgacctggtcggtgaactgggacgatggcctgaacaagcgcggcgagcgctacaactgggagttccgcaagcgctacgccagcctcatccatgacggcgagggcggcgaccagcgcccggcggcgccgcagggcctgcgtctgctggagcgcggcgagaccagcctggtgctggcctggaacgcctccagcgggcagcgtccgatcgattactacagcctctatcgcgacggcgccatggttggccagagcgccgcgctgggttccaccgacagcggcctgacggcggacacccgctacagctatttcgtcaccgccaccgatacccagggcaaccagtcgctgcccagcgaaggcctggaggtcagcaccagcggcggggcggtggatccgcaattcccgcaatggcgggagaaccaggcctatcgggtcgacgatggggtgacctacgaggggctgcgctatctctgcctgcaggcgcacacctccaacagcggctggacgccgccggtagccttcaccctctggcggccgctgcgctga

SEQ ID NO: 323861 - DNA, 663 bp, Pseudomonas aeruginosa
atgcgtgacatcatcgacggctttctccgcttccagcgcgacgcctacccggcgcgctcgcaactgttcaagtccctggccacccggcaagcccccaaggcactgttcatcgcctgctcggacagccgggtggtccccgaactgctgacccagcgcgagcccggcgaactcttcgtgatccgtaatgccggcaacatcgtccccggctacgggccgcagcccggcggggtcagcgcctcggtggaatacgcggtggcggtgctcggggtcggcgacatcgtggtctgcggccactcggactgcggcgcgatgggcgccatcgcttcctgcgcctgtctcgaccagctgccggcggtggccggctggttgcaccacgccgaggccgcacgggcgatgaacagcgcccacgaacacgcctccgaggcggcgcggctggacgccctggtgcggcacaacgtgatcgcccaactggccaacctgcgcacccacccctgcgtcgcccgcgccctggagcagggtcggctgaacctgcacggctgggtctacgacatcgaaagcggccgcatcgacgccctcgacggcgctagccggcgcttcgtctccctcgccgagcatcccgaagtgcgcgcggtaggcggcgaacccgggcaggcggtcgcctga

SEQ ID NO: 323862 - DNA, 888 bp, Pseudomonas aeruginosa
atgctgcttcgccacctgcgctacctgctcgctgttgccgagcatcgcaacttcacccgcgccgccgaggcgctgcacgtttcgcagccgaccctgtcgcagcaggtgcggcaactggaagagcaactgcgcgtgcaattgctcgaccgctccggcaggagcgtgcgtcccaccgatgccggcgagctgtacctgcttcatgcgcggcgtgccttgcgcgagctggaagcggcgcaacgggcgatccacgaggtgcgcgacctcagtcgcggccgcctgcgcctgggcatgacgccgaccttcacctgctatctggtgggcgccctggtggatccgttcaatcagcgctatccgggcatcgagttgagcctcgaggagttgccccaggacgccctggaggcggcgctgatcgacgatcgcctggaccttggcgtggccttcagcgagccgggttcggtggagatcgacagccagccgctctacctggagcgtctgggcctggtgctgggggcggaacacccggcggcggacgcgccgctggccgccgcagcgctggcggagttgccgttggcgttgttgcgcgacgacttcgccacgcgtcggcatatcgacgcttacctgcgccagcaaggggtgacggcgcgggttgcgctggaggcgaactcgatcagcgccatcgtcgacgtggttcgccgcggaagactggccagcatcctgccggaggcggtggcgcgccagcaggccgggttgcgctgtgtggcgctgcggccggcgctgccgacccgtcaggtggcgctgttctggcgccagggcagccaccccggtgccgcgcgcctggccttccaggccctggcgctggagctcggcgccgagctgggcgacgcctga

SEQ ID NO: 323863 - DNA, 1809 bp, Pseudomonas aeruginosa
atgcccggacgcatcctggtcttcgcctgctgcctgctcgccagcctggcccgcagcgagccgcgccatgccatcacgctctacgacgagccggcgaaatatccgccgggtttccagcacttcgacttcgtcgacccgcaggcgcccaagggcggcagcctgcggcggatggaaagcggcagcttcgacacgctgaaccccttcgccaaccgcggcacgccgatcagcatgacccaggccgcgctgatctacgaaaccctcggcttccagtcactggacgagccgttcaccgaatacggctacctggcgcgctacatcgagaaagccccggacaacagctgggtgcgtttccatatcgatccgcgggcgcgcttcagcgacggcgtggcggtcaccgccgaggacgtgaagttttccttcgatagcctggtcgagcagggcagcccgttctggcgcgcctactacaaggaggtccgcgagccggtggtggaggatcgcctgcgcatccgcttcgatttccgtcatgccggcaaccgcgagctgccgctggtgctggcccagctctacgtgctgcccaggcattggtggcagggacgcgacttcaaccgcagcagcatgcagccgccgctgggcagcggaccttaccggctggagaaggccgaggcggggcgttcggtgagctaccggcgcaaccccgactggtgggctcgcgacctgccggtcgggcgtggcctgtacaacttcgagcggatccgtttcgactactaccgcgacagcggcgtggccttgcaggcgttcaaggccgggcaggccgacatcaatgtcgagaccagcgtcaaggcctggagcagcggctacgactcgccggccctgcgcgatggccggttgcgccaggagagctttccctacccgtacccggccagcctccagggcctggtgttcaacctgcgccggccgctgttcgaggaccgccgggtacgccaggcgctgagcctgttgttcgacttcgaatggaccaaccggcagctcttcggcggtcgctacaagcgcctgcgcagctatttcgacaactcggagatggccgctcgcggcctgcccggcgccgacgaactggccttgctggagccgctgcgcgggcagatccccgaggaggtcttcggccaggcctacgctccgccggtgaacgacggcagcggcgatatccacgagcgcctggtgcaggcctaccgcctgctcggcgaggccggctggcatgccgtcgacgggcgcctgctggataccgccggacggccgctgcgcttcgacctcctgctccagggcaagagcctggagcgcgcgctgctgccgttccagcgcaacctggcgcggatcggcatcgatatgcgcctgcgccaggtggacgcttcgcaatacatcgagcgcatacgtgcgcgggactacgacatgatcgtttcgagcttctcccagtccaattcgccgggcaacgagcagtacagcttctggcattcctccagctacgccgatcccggcggctacaaccgcatcggcctgaaggacccggccatcgaccggctggtccaggcggtggtcgaggccgactcgcgggccgccctggaaaccgccgtgcgcgccctcgaccgggtgctgcaatggggctactacctgatcccgacctggtattccgacgaggtctggatcgccagctggaatcgcttcggccgaccgccgcaggcgccgcgctacagcctggggctgaacacctggtgggaagtccgcgagcgggccgcgccgagccgggaggcgcagtga

SEQ ID NO: 323864 - DNA, 1251 bp, Pseudomonas aeruginosa
atgaccactcgtgacgactgcctggcgctcgacgccggcgatcccctggccgacctgcgccaactgttcgccctgcccgacggcgtgatctacctcgacggcaactccctcggcgcccgcccccgggccgccgtggagcgcgccgccgaagtggtcgccgcggaatggggcgaggggctcatccgcagctggaacagcgccgactggcgcggcctgccggagcgcctcggcgacaagctggcgcccctgatcggcgcgcgcgccggcgaagtggtgatcaccgacaccacatcgatcaacctgttcaaggtgctcagcgccgccctgcggatccaggaggaagacgcgccagggcgcaaggtgatcgtttccgaatcgagcaacttccccactgacctgtacatcgccgagggccttaccgacatgctccagcgcggctaccggctacgcctggtagatgacccggagcaactgccggcggcgatcgacgcggataccgcggtggtgatgctcagccatgtcaactacaagaccggctacctgcacgacatgcgcgaggtcacccgcctggtccacgaaaacggcgccctggcgatctgggacctggcccactcggccggcgcgctgccgctggacctgcacgcggccgacgccgactacgccatcggctgcacctacaagtacctcaacggcggccccggctcgccggcctacgtgtgggtcgcgccgcgcctgcgcgagcgtgtctggcaaccgctgtccggctggttcggtcattcccgccagttcgccatggagccgcgctaccagcccggcgaaggcatcacccggttcctctgcggcacccagccgatcacctcgctggccctggtcgaatgcggcctggatatcttcgcccggaccgacatgcagcgcctgcgcgacaagtcgctggccctcgccgatctgttcatcgaattggtggaaagccgttgcgaacgcttcggcctgaccctggtgaccccgcgcgagcatgcccggcgcggcagccatgtcagcttcgagcatgcccagggctacgccatcgtccaggccctgatcgaccggggggtaatcggcgactaccgcgagccgggcatcctgcgcttcggcttcaccccgctttacacccgcttcgtcgaggtctgggatgcggtgcaggcgttgctggaaatcctccagagcgaagcctggaaagagccgcgctaccaggtccggcacaaggtgacctga

SEQ ID NO: 323865 - DNA, 495 bp, Pseudomonas aeruginosa
ttgttcccggaagcgctcaagccgtccatcgccgccaagttcgaacgcctggtggaacgcttcgggcaggcgcgggcagaggacatcgcccacaccaacaaaagcctgttcatctttcccaacctggtgatcaacgacatcctcggcctgaacatccgctcgttcttcccgaccgccgccgatgaggtcagcgtcaccgtatggggcgccggcttcgccgatgagacccgcgaggagcgggcggcgcggatcaatgggttgatctcgttcatcggcccgggcggtttcggcacccccgacgacgtcgagatcctcgaatcctgtcagcgcgcctacgcccacgccgccctcggctacagcgatttttcccgcggcatgggaccggcaacccgccgccacgtcgacgaggagcagaaccgcggcttctggcgcgagtggagccgccggctcgggcagcagcccgccgccctgcggcgtctcgccgtggccgtctga

SEQ ID NO: 323866 - DNA, 1101 bp, Pseudomonas aeruginosa
atgagcaagatgatgaaagccgccgtattcatccagcccggccgtatcgagctggtcgacaagccgattcccgacgtggggccgaacgatgcattggtgcgcatcaccaccaccacgctctgcggcaccgacgtgcacatcctcaagggcgagtatccggtcgcgcccggcctgacggtgggccacgagccggtcgggatcatcgaaaagctcggcagcgcggtggtcggctaccgcgaaggccaacgcgtgatcgccggtgccatctgccccaacttcaactcctatgccgcccaggacggcgtaccgtcgcaggacggcagctacctggtggaatccggccgttgcgcctgccatggctacaaggcgaccgccggttggcgcttcggcaacctgatcgacggcacccaggccgagtatgtgctggttcccgacgctcaggccaaccttgcccccatacccgatggtctcagcgacgaacaggtgctgatgtgtccggacatcatgtccacgggcttcaagggcgcggagaacgccaacatccgcatcggcgatagcgtggcgatcttcgcccagggtcccataggcctgtgcgccaccgccggcgcccggctgctgggcgccagcacgatcatcgccatcgacggcaacgcccatcgcctcgatatcgcccgtggaatgggcgccgacgtcacgctgaacttcagggagtgcgacgtgatcgaggaaattctcaaactcaccggcgggcgcggcgtggatgcttcgatcgaggcactcggtacgcaatcgaccttcgagaccgccctgagggtgctcaagcccggcggcaccctttccagcctcggggtctattcggaagacctgacgattccgttgtcggccttcgccgccggcctcggcgaccaccggatcaataccgcgctgtgccccggcggcaaggagcgcatgcgccgactgctcaatatcgtggcttcgggccgggtcaacctcgggcctttggtcagccacgaataccgcctcgacgacatcgtcgccgcttacgacctgttcgccaaccagcgtgacaacgtactgaaggtggcgatcaagccgcactga

SEQ ID NO: 323867 - DNA, 2055 bp, Pseudomonas aeruginosa
atgagtgacgcacgcctggccgaactggccgccgccgtgggcctgcaactcgactggcaggacgccaacggacggccgcagcgggtcgacccggaggtccagcgcggcctgctggaagcactcggctatccggcgcagagtccgcaacagatcgaacagagcctggccgcgctggcccggctgcgcgaggacagcgccaacctcggactgctggtcggcgaatgcggccagccgctggagcaagcgctcggccccgccggcaccccgggcgagctggtctacgaggacggcacgcggatcgccctgcgcctggacgccgaaggccgcctgccggcgcaggcccgcagcggctatgcgcagctgtcgctggagcagcgggaatgggcggtggcgatggcgccgccgagctgcccgtccctggccagcctcgccccgggtcgctcgcgtcgctggggtctggccgcccaggtctatgccctgcgccgccccggcgacggcggcctgggcgacagcgccgccctcgaggacctgctgcgcagcgccgcgcggcatggcgccgacgcgctggcgatcagcccgctgcacgccctggccgaggccaacggacatgcctacagcccctactcgccgtccagccggctgttcttcaatgtcctgcacgccgcgccggcgaccattctcggcgcggcggcggtggaacaggcgatccgtcgcgccggcctggccgcggagatggcccgcctggagagcctggagctgatcgactggacagcggcggcggacctgcgcatgcgcctgctgcgccaactccaccgcgacttcaccgagcgcgccagtcccttgcgccacgacctcgccgaattccgccgcgaagccggcgaggccctgctgcaccactgccgcttcgagaccctgcaggcgcacctgggcgccggccccgactggagacgctggccggagccgctgcgccgccccggcgagccggcggtggccgcgttctgcgccgatcacgccgaggaagtggacttccgtgccttcggccagtggctgacccaacgttgcctgcaacatgcccagcgccaggcgcgcgaggccgggatggccatcggtctggtcgccgacctggcggtgggcgccgacggcggcggcagccaggcctggtcgcggcaggaagagctgctcgccgaagtgaatgtcggcgcgccgccggacatcctcaaccagtccggacaggactggggcgtttccgcgttcaatcccgaaggcctgcgccgccacggctaccgggcattccgcgagatgctgcgggccaacctggcctggcccggagggctacgcatcgaccatgtgatgggcctgcaacgtctctggctgatcccgcgcggccagccgccccacgccggcgcctacctgcgctacccgcaacgcgagctgctgcgcctgctggcgctggaggccagtcgcgcctcggcgctggtcatcggcgaggacctcggcaccgtgcccgaaggcctgcgcgaggaactggcacgccgccaagtgctgggtacccgcgtgctgctcttcgagcggcgcggcgaacgcttcgtgcccccggcgcaatggccggcggacgccatggccaccaccagcacccacgacctgccgagcctgtccggctggtggcggggccaggacatccactggcgcggccgcgccggacaccgcagcgccgaggaatgcgcggccgacctggaactgcgcgccgaggagcgccgggccctggccgccagcctcgaaccgccggtcgatcccgaccccgccgccgaagtaccgctggacgcctgcatcggctatgtcggggcaacccccgcgccgttggtgctactgcccctggaggacgccctgggcagcctggagcagccgaacctgcccggccccggcgacgcccacccgaactggcggcggcgctggccggaaaacgccgcgcagatgctcggaacgccgcaggtcgaccggcgcctgcgcctgctcgaacgcagccgccgggatgccgaggaggccgcccatgattga

SEQ ID NO: 323868 - DNA, 180 bp, Pseudomonas aeruginosa
atgcgttttcccacttctgcatcatcgggcgcgacagcgaccactccacgcaacccctcgagggatccggacgaatatccggttcctgaccacgaaagccacgtcccccaggaattcccggaagagattccgatggaacagcccaacgaagagcccctctcgcccataccggagccctga

SEQ ID NO: 323869 - DNA, 777 bp, Pseudomonas aeruginosa
atgacggcgaacagcgaacgcatccgcatcggggtcggcgacgaccggatcgaaggcaccttcctcagcccccgggcgaaggtccccggcgtgctcttcgtgcacggctggggcggcagccagcagcgcgacctgaagcgcgcccagggcatcgccgggctcggctgcgtgtgcctgaccttcgacctgcgcggccacggcgcggaaagcgggcgccaggcgctggtgacgcgcgaggacaacctgcaggacctgctcgccgcctacgaccggctggtggcccacccggccatcgacagcgaggcgatcgcggtggtcggcaccagctatggcggctacctggcggcgatcctcagccagttgcgcgcggtgcgctggctggccttgcgggtgccggcgatctaccgcgacgaggattggctgacgcccaagctgctgctcgaccgcgaggatctcagcgaataccgcagcagcctgatcccggccgccagcaaccgagccctgcaggcctgcgcgggattccgcggcgatgtgctgctggtggagtcggagttcgacagctatgtgccgcactcgaccatcatgagtttccgcgccgccttccagcagacccattcgctgacccaccggatcatcgaccacgccgaccatgcgctcagcagcgaggcggcgcaggacgcctatacctcgatcctggtggactggatcaccgagatggtggtcggcgaacgtctcagcatcaccccggcctacgccaccatccatccggctttctga

SEQ ID NO: 323870 - DNA, 591 bp, Pseudomonas aeruginosa
atgcgcaatctggaaaccgcaaccctgaagctggggatattccatccccacgacagcctgagccaggcgctgatcgccgccgccctgcagcggcagatcgaagtcagcgccttgcaagccgacctcaacagcctgcaggcgcgccccgggctgcgctgcaagccagccagcctggcgtcgtcgatcgaggtcagccaggcggcggccggtctcgacctgctgttcgcgccgttgtccgactacgccgccgaagccttgccgccgatctgcgccgcgctgatcgatggcgccctgcgcgccgaggtaccgcgcctgttcctgcttggccattggcaatggctggtggcgccgcgcgatgccggcgaggagcaattgggtgccgggctcgagcgcagcctcacggtcagcggcctggactggacgctggtggaggtcccgagcctgcccgccggcctgcgcatcgacgatttcagtcgcgccggcgacgtcgcggaagtggaggccgccagggtgttcgcctgcgccgaagcgctgctcgacgaagtccgtctcggcctgcacaagcgccagtgcctgcgcctggcgccctga

SEQ ID NO: 323871 - DNA, 1953 bp, Pseudomonas aeruginosa
atgaaaaccacaagaaaaccgaaagtccccttgaaccaggccacgcgcaaccgcctgctcgacgaagcggtcgacgactacgcgatccacaccctggacagcgctggccgtatcgccagctggagcgccggcgcggcgcgcctgttcggccacgacgcgagcgagatcctcggccgcgactacgcctgctttcatacccgcaaggaccgcgacgccggcgttccgcaacaggcgctgcgccaggcggatgccgagggccgcttcgagaccgagggctggcgggtgcgcagcaacggcaagcgcttctgggcgcaggtggtgatcgacgccatccgcgacagccagggccagttgctcggcttcgcccagctgatccacgacctcagcgaagggcgcgcagccaaggaggcgctgcggcgcagccaggagcagttccgcctgctggtgcagagcgttaccgactacgccatctacatgctcgaccaccgcgggcggatcaccaactggaacctcggcgcccagcggatcaagggctacctgccggaagaggtgatcggccggcacttctcctgcttctacacccccgaagaccgcgaggccggcgagccggcccgcggcctggccgccgccgaacgcgaagggcgtttcgagaaggaaggctggcgggtgcgcaaggacggcagtcgcttctgggccaacgtggtgatcgatccgatccgcgacagcgatggccggctgatcggcttcgccaaggtaacccgtgacatcacccaccggatcgaagccgaacgcgaactggaacgggcccgccaggagctgttccaggcccagaagatggagtccctggggcacctcaccggcggcgtggcccacgacttcaacaacctgctgacggtgatcatcggcagcctcgggctgctgaagaaacgcctgcccggcgaccagcgcaccgccgacctcttgcagaacgccctggaggccgcccagcgcggcgccaacctgacccagcggatgctttccttcgcccgcaagcaacgtctcgatccgcagccctgcgcgatccccgacctgttgcgcgggatgaccgacctgctgatccattccctgggaccgagcgtatcgatcgagacgcgctttcccctggatctcgacctcggcctgaccgacgccaaccagctcgaactgtccatcatcaaccttgccaccaacgcccgcgacgccatgcccaacggcgggcgcatcgtcttttccgcgagcaaccagcgggtgccggcggacaatccccatcgcctcgcaccgggcaactatatctgcctgagcatcagcgacaccggcagcggcatggacgaggaaaccctgcgccgtgcggtggaacccttctacaccaccaagggaattgggcgtggcaccgggctgggcctgtcgatcgtcgacggcctcgccgagcagctcggcggccggctcaccctggagagccagccgggcgtcggcaccaccgcgaacatctggatacccgccgtcccgcgaaccccggaaagcgcccgtacgggcaatggcgcgacgccgcagccgcccagcgaaagcgagcgggtgcgcttgtcctgtcgggtactggtggtggacgacgacccgctggtgttgaacaacaccgcggcgatgctggaggacctcggttgctcggtactcaaggccgactccggcagcctggccctggagattctcacggcgacgccggagctggacatcctcctgaccgaccaggcgatgccacggatgaacggcagccagttggtggagcgggtcatggcccagggcaggccgctgaagatggccctggccaccggcttcgcggaaaagatcgaaggcgcggcggcacagttgcccaagctggccaagccgttcggccaggaagagttgtacctgttcctgaccggcacgctgaaggccggctga

SEQ ID NO: 323872 - DNA, 609 bp, Pseudomonas aeruginosa
atgacccgcgaaatggctcggctactgatcagtccctccaatgcctggcctcgtctgcgccaggactacgaccatcaccctttcgccttcctcgttccgctgttgctattgccgctactgccggcggcctgcctgttcatcggcactacccaggtcggctggtcgctgccgggcaacgacagcgtgcaacacctctccagcggcagcgccctgctgctggcgacgatgtgttacctgggcttcgtcgccggcgtggtgatcatgggcttcttcgtacgctgggtgctgttccgcacgccgtcgcgccccagcgtaccgggcagcctgaccttcaccacggcgatcgccgtgcccttgatgctcgccgggatcgtcgccctggtgccctggcggatcctcctgctgctggccgcggcggctgcctgcgcctactcggtacgcctgctgttcaccggcctgccgctgttcatgcgcatgcaggagcggcagacattgttctacgccttctgcatcctcggcgtcggcttcctgaccctgctgaccaccgccttcatcttcatcgagttctgggggcaaagcctggccggcagcggcgagtacctgcgctga

SEQ ID NO: 323873 - DNA, 951 bp, Pseudomonas aeruginosa
atgcccagcctgaatgatccgcgcctggacgtcctggtcagcctcggcaactggttgcgaggccaggactaccgtttcgtcaccgtcaccccggctacccatgagcgcgtcaacgcccgcccggaaaaccgcatggcccgggacctggccggcatcttcggctggagccgggcattcgccggggaaagcctgccggccgactggctgacccttcttgccggcgccgacctgatccgccgcgaggcggacggctggcgcagccaggtgcgcgtctccagcctcggcgagcaactgttcgtccattcggccttccctaccctggccgccgacgcggtgttcttcggccccgacacctaccgcttcgaccggctgatccgcagccacctggcatcgtccgatccggcacgcatccgccgtgcggcggatatcggctgcggcgccggccccggcgcgatccgcatcgccatggcctgcccggacgccgaagtacacgggctggatatcaatccggcggcgctcgacctggcgcgggtcaacgcggcgctggcgggggtcggtaacctgaccctggcgcgtagcgacctgctgagccaggcgcccggtcgcttcgacctgatcgtggccaacccgccctatctcctggatgcctcggagcgcgcctaccggcatggtggcgggatgctcggcgccgggctctcgctggcaatcgtcgatgccgccctcgagcgcctggaagccggcggcagcctgctgttgtataccggggtggcgatggtcgaaggcggcgatccgttcctcgcccgcatccgcgaacgcctggcgtctcgggagtggggctgggactaccaggaactggacccggacgtgttcgccgaagagttggacagccccgcctaccgcgaagccgagcggatcgccgtggtcggcctgcgggtcactcgtcccgcctga

SEQ ID NO: 323874 - DNA, 1215 bp, Pseudomonas aeruginosa
atgacccacgacctggccgccagcggccttcgcttcggcatcgaggaagaattcttcctgctcgatgcctccgacctggacatcgtccgctccgcccccgccggattcgtcgcggcctgccgtgacacgctcggcgagcatttcgccgaggagatgttcgaatgccaggtcgaggtggccagcccggtgttctccaccctggccgaggccgcgcgcttccacggtcaggcccggcaacgcctggcgcatctggccatggacttcggcctgcgttcgctctgcgtcggcacccatcccttcgccgactggcgtcgggcgcgaagcaacccggcggcgcacttcgcccgcctgttcgaggaccaggggcgggtggcccggcgcagcctggtctgcggcctgcacgtgcatgtggagataccgccgagccacgaccgcatggctgtgctccagcgcgtgttgccgtggctgccgctgctgctggcgttgagcgcatcctcgccgttccgcggcggccggcgcagcggtctggcgagttatcgacgggcactctgcggcgagtggccgaggatgaacattcctcctgccttgcccgacgaggacgcctatcgccgccacctggcgctgctgcgcgagaccggctgcatccgcgaggatggccaggtctggtggatgatccggccgtcatcccatgtgccgaccctggagctgcgtatctgcgacgcctgcccgcgcctggccgacgcgctgagcctggccgggctgttcagagcgctggtgggcgaagcgctggacgcggacccgcgtgcgttgccggtcgcgcgcgacgcctgcctggaggaaaactactggcaggcgctgcgttacggttgcgccggccgctatctcgtcgaaggccgctgcgtaggtgccggggactggctggaaatggcctggcgacagtgccggccgcaggcccgccagggcaacgaatgggcctacgagcatgcccgtggattgctcggagagacctccgccagtcgccagttgcagcgctaccagacactgcgcgcagcgggccaggaacggcatgtggcgctgcgccggctggtggaagaactgctggaggagaatctccagccggccttggccagtccggccggcaagcgcgccaacgaaggcggccggtcattccgtccggccgctggagcaccgatgccaatccgtggtcaggagtag

SEQ ID NO: 323875 - DNA, 1137 bp, Pseudomonas aeruginosa
atgcgtatcgacggtcatcgtcaggtggtttctaacgcaacggcacagcccggaccgctactgcgccctgcggatatgcaggcacgggctctacaggacctgttcgatgcgcagggggtgggggttcccgtcgaacatgccttgcgcatgcaggcggtggccaggcagacgaataccgtctttggcattcgcccggttgaaagaatcgtcaccacgctgatcgaagagggtttcccgaccaagggcttctcggtgaaggggaaaagctcgaactggggtccgcaggcggggttcatctgtgtcgaccagcatctcagcaagcgggaagaccgcgacacggcggaaatacgcaagctgaacctggctgtggcgaagggaatggatggcggagcctatacccagaccgacctgcggatctctcggcaacgccttgcggagctggtgcggaatttcggcctggtggcagacggtgtcgggccggttcgcctcctgaccgcgcagggccccagcggcaaacgctatgagttcgaggcccgccaggaggcggacggtctctacaggatcagccgcctggggcggtcggaagcggtgcaggtactggccagcccggcttgcgggctggcgatgaccgccgattatgacctcttcctggtagcgccctcgatcgaggcgcatggcagtggtggtctcgatgcaagaaggaataccgcggtcagatacacccccctcggtgcaaaggatcccctgagcgaggacggattctatggcagggaggatatggccaggggaaacatcactccgcgcacgcggcaactggtggacgccctcaatgactgcctgggccggggggagcacagggagatgtttcaccacagcgacgatgcgggcaacccaggctcccatatgggtgacaacttcccggccaccttctaccttccccgggccatggagcatcgggtcggagaagagtccgttcgcttcgacgaggtctgcgtggtggcggatcggaagagcttttccttgctggtcgagtgcatcaagggcaacggctatcacttcaccgcccatcccgactggaacgtgccgctgcggcccggcttccaggaggcgctcgactttttccaacgtaaggtctga

SEQ ID NO: 323876 - DNA, 1251 bp, Pseudomonas aeruginosa
atgaaaattcttcccgttccgatgctggccgcggggctggcgttgctgccgtcgttcgcccaggcggagtttttcgccgacggcaaggccggcctcgaactgcgcaatttctatttcaatcgcgactatcgccagcccggcgccagccagtcctattcggaggagtgggcgcagggtttcctgttgcgctacgagtccggctacaccgaggggctcttcggcctgggcgtcgatgcgctgggcctgctgggcgtcaggctggactcctcgccagagcgatccggtagtggtctgttgccgtattcgacgagcgaccggcgcgccgcccacgactattccagcctgggcctgaccgccaagctacgggtctcgcacagtacgctgaagatcggcagcctgatgcccaggctgccggtggtgcagttcaacgacacgcgcctgcacccgcaaaccttccagggtggactgctggaagtgaacgagatcgacgggctggcgctgcagtttggccagttgcgccaggtcaagcagcgcgactcgaccaacgccgaagacctcggcatcacccgcggcaacaagcgcaacgtactggcgggccggcaccccggcagcgaccgcttcgacttcgccggcggtacctaccgctggagcgagcgcctgagcagcagctaccactacgccaacctggaggatttctaccgccagcattatctcggcgtgcagcacctcttgccgctcaccgatgaccagtcgctgaagtccgacatccgctgggcgcgttccaccgacgagggcggcagccgcgtcgacaatcgcgcgctgaatgcgctgttcacctatcgcctgggtggccacgccttcggcctcggctaccagcgcatgtccggcgacagcggcttcgcctacctggccgggaccgatccgtatctggtcaacttcgtgcagatcggcgatttcgccaacaaggacgagcgctcctggcagttgcgctacgactacgacttcgccgccatcggcctgcccggcctgacattcatgagccgctacctgcgtggcgaacacatcgaccttctggacggcggtgggcgcggcaaggaatgggagcgggacaccgatatcgcctacctggtgcaatcggggccgctgaagaacctggggatcaagttgcgcaacggcaccttccgcagcgatttcggcaacgacatcgacgagacccggctgatcgtcagctacgcgttgccgctgtggtga

SEQ ID NO: 323877 - DNA, 615 bp, Pseudomonas aeruginosa
atgaagcaggcgatcatcgtcggggaagggcgcgcgctcgaacgggcggacagtaccgcgcgggaacggggactggaacaccgggtcctggagctgaatgctgcggatcgacacaacttcgatattgcgcctctgctcgaacgctaccccgctgcggaaagcgaagtattcgtggcgctggacgagcgggcggtgaactacgcccgccacaagctcatcgcggacatccgcctggcgggctaccggctattcgatatcgtctcgcctcaggccatcgtcggcgaaggcgtgcgactgctgggcaacgtgttcgtcggcgccggttgcgtgctcgccggtcgtgcccgcatcggcactggcagttggctggagctgcaggtcctggtggaggaggactgccgggtcggaacctgtagcacgctgctcgctggcgtgcagttgggacggcgagtggagatcggccagggcagcacgctgggtgcgggcagcgtcgcgctcgccgacacccgggtggggcgacactgcgaatggttgttgccgggcaggattccccgggagctgcccaattactccttttacgatgaactcatgcccgatggggcgcgcatcctatga

SEQ ID NO: 323878 - DNA, 1149 bp, Pseudomonas aeruginosa
atgatggcgggaaacgatatgacgcaggcggacttcctttcgcgatgcgaacggagcggatatctattggtgctggtgcctagttcctatcttggaggggtgttccgctcacaggtggttgccggtttgtcacagcgtctgcctggggttcgcctgattgctgtggacgatgtgcttttcgccagcaatagcgttcccgatggtttcgaccaagtgattcctaccgcccagttgaaggaaccatgccacgcagggaaacccgcggtgaattgtgcctattcgctgcctacctggctgacgctggatcacctggcgaagactgcgcaatgcatcaccctcgatctgcccgagcttctctacctgctggatattcctttggtctaccagaccggcgcgctgactcgcgaattggcgatgcagcatcacgccgagttcgtctcgctgcgcgagcgcctggccgacgagcgaagccggaagaccctggaagccatcatgcgcctgcgtttggacggcaaccgcgctgcgttgctggacgtgttgtgtccgggagagcaggaatacttttccctgtaccggggccccgagcatccgatcgtcttgcgaagcgacgagcattacgtggatatcggtgcctacgatggcgatacggtgaagaagttcatgctggcggctcgtcatgaatatgcttcgatccatgccttcgagcctgatccggcgaattaccggctcatgcatgcgtcgcttgctggaagtgtcggtctccatctgcataaccaggcggtgtccgataccggcggccatctcgcattcgcagcccacggcaccatgggaagcagggtcgagatagacggcaccgtgcaggtgccgtgcgtgcggctcgacgatctcctcgatgtcatgaccttgctgaaaatggatgtggaaggccatgaggcacgggttctgcggggggccgcgcggctgatcgacgagtgccggccgcgcatggccatcacctgttaccaccatgtgcaggacctgctggacatcgtcgccgcgatcgacgggatcgctgcgggagcccggctgcgcctgcgccattactcgctgtatttctacgacacgatcctctatgtcgactggcccgatgctcttcgtgaagggcgctga

SEQ ID NO: 323879 - DNA, 3507 bp, Pseudomonas aeruginosa
atgagcgcgaacgttcgtgtcagcatcgtcatgccgacctacaagctggagtacttcgaggacgccctcgacagcgtgctcgggcagacctatccggccctggagctgatcatctgcgacgacagcagcgacgagcggatcgccacgctggtcgagcagaagcgcgcctccgcggcattcccgatccgctacttccgcaacgagacgcgcctcggcgaactgggcagcacggcgaaaggcatccgcctggcggagggcgagtacgtcaagtttctccacgacgacgacgtgttgcttcccgaatgcgtcgaggcgttggtgggagcgatggagcgcgagccgaacgtggtcctggcctcgtcgcggcggttgcgtatcgacgaggaagggcagccgctgccggacatcctggcgacctgcttcccgttcgccggcgacgtcctgatcgacggtcgcgagctggtctcgttcctcgccgaccacaccatcaacttcatcggcgaacccagttgcctgatggcccggcgcgatgcgctgctgcagatctgcgagcgcctgatgatgctcaacggccgggccatcgactggatcggcgacctggccatgtgtgcgcagttgctacagcgtggcgacctggcgttcctgtcgcggccgctgacccgtttccgcgtctcccgccagcagttcagccagatcgggcgcgaccagcccggtatcggcgagcagggccatgccgacttccgcctggctatccgcgaactgggttggtatcgccaggccggcgacaaccgcttcgtccgggtggcaccgatcacccgcctggacgcccgtgtcttcaagccggtcaacctgctcgccgcgctgaggcgggcggcgggcttcggtagcgtcacgctgtcgacctggctggaggcgcggcggccggatgcggtgcagaaggcgctgatcgatcgattcctgcaggagcagggcggtgggccgcgcttcgcggtgctggtgctcgatgcccacggcgataccgaggccgtggagcttaccctgcagagcctggagcacgtcaattcgtatccacgtgtcgagagccacctgttcgcgccgctgggcacgagtccgcggaacggagcgatgctcttcgatccagaggtggggccggtgccgacgatcaaccaggcgcttgcccggcttgataccgactggttgctcctggtcgaagcgggcgtcgaattcactgtcagcggcctgctggtggcggcgctggacctgctggcggcaccggagagctgccaggcggtgtatgccgacgaactcatgcgcctggatgacggcgagctgggcgcggcgttgcgcccggacctgaatctcgaccttctgctcagtttccccgccggcctgtcccggcactggttgttccgccgcgagccgctgcttgccacgggcggattcgacgagaccgccggcgaggctttcgagctggcctaccagttgcgtctcgtcgagcagcggggcctgggctgtatcggacacatcagcgagccactgctgtctggcccagcgctgcgcctgcaggacagcaccgccgagcgtgcggcgatcgaaggccacctgcgtgcccgtggctacgcgcaggcgacagtcggaagccggctgccggggcgctacgagctggactacggccacgccgggcaaccgccggtcagcatcctggtgctggccggggagcgcctggcgcagctccagcgttgcgtagaaaccgtgctggagaataccgcctaccccaactacgagatccttctgctggaacagggtggcgaagcggccgacgttcgcgaatggctgctcgccgtcgaaggcatgggtgtcgagcaggtgcgggtgctgcgaggcgataggcagttatcccgtggggctctgcgcaacctggcggcgtcccgggcgcgtggcgaattcctgctctggctcgatgccggcagcggcatcctcgacaaggactggctgcagcagttgctcaaccatggccagcgtccggaagtcggcgcggtaggcgccaagctcctggcggcggacggacgggtctgccacgccggctggctgctcggtttgtgcggaccggccgggcgggccttcgaagggcgttcgcacgaggacgccggttacctgcagcgcctgcaggtggaccagaactactcggcggtggctggcgaatgcctgttgatgcgccgcgagttgttcctcgaattgggcggtttcgacgaggcgctgacgcgctgggacgatgtcgacatctgcctgcgggcggtccaggcgggctacctgaacgtatggacgccgcgtgcgcggctgttgctcgatgcgcctgccacgacggcggcgagcgtcgaggaagaagatgcgctgtacgcgcgctggctaccgttgttggcacgcgatcccgcctataacccgggcttttcgttgcaggccgaaggcggtttcaagctggccgacccgcagctggcctggcgcccgttgcaggggtggcggcccttgcccactgtcctggcgcaccccgccgacctattcggctgcggccattaccgggtgatccagccgttcagcgcgttgcgcgagtcggcatccatcgatggcgcgctgtcgatcggcctgatgcacgtggccgatctggagcgctacgacccggacgtactggtgctgcagcgccaggtcggcgaggagcgtctcgaggccatgcggcggatgcaggcgttctcgcgggccttcaaggtctacgagctggacgactatctgcccaacgtgcccctcaagagcgcccatcgccagcacctgccgaaggacattttgcgcacgttgcgtcgcgggctgggttacgtcgaccgcttcgtggtgtcgacgccggccctggcagaggccttcgccggtctccacccggatatccgggtgatcgagaaccgcctgccggtggggtggtggcaggggctgcgggcgcagcggcggcgcggcgagcggccacgtgtcggttgggcgggcggctcgagccataccggcgacctggaactgatcgccgatgtggtccgggaactggccgacgaagtcgactgggtgttcttcggcatgtgcccgccgtccatccgtcccttcgtcagggaagtgcatgcgggggtgcctatcgaacgctatccgcgggcattggcggctctcgatctcgacctggcgctggcgccggtggagcagaacctgttcaacgagtgcaagagcaatctgcgcctgctggaatacggcgcctgcggtttcccggtggtctgcagcgacgtgcgctgctaccaggacgatctgccggtgacgcgggtgaagaaccgtttccgcgactgggtggaggcgatccgcatgcatacccgcgacctggatgccgcagccagggcaggggataacctacgcgaacgggtgctggcggattggatgctcgacggcgagcgtttgcgcgcctggtatcgtgcctggatgccggactga

SEQ ID NO: 323880 - DNA, 1149 bp, Pseudomonas aeruginosa
atgccgggcctgtctttgaatgccatcctgctgagcgccgtcgcgctgctcgccccgtcggccgaggcggtggacgccggtcgccacgacagcgagctgggcgccgtcgaggtcaccccggtggttggcggtctggcctatccctgggccgtcgccttcctgccggacaaccagggcatgttggtcaccgagcggcccggcagcttgcgtttcgtcagtcccgagggacagttgtcggcgccgctggaaggcgtacccagggtcttcgccagcggccaggggggactgctcgacgtcgccttgtcgccggggttcgccgaggaccggctggtctacctgacctatgccgaggccggcgaggacggccgcgccggaacggcggcgggacgtggccggttatcggcggacaagcgacggctggagggcttccacgtgatcttccggcagttgccgaagctttccagcggccatcacttcggctcgcgcctggtcttcgacggcaagggccacctgttcatcgccctcggcgagaacaaccagcgcagcacctcgcaggacctggacaagttgcagggcaagatcgtccgcctgtatccggacggcggcgttcccaaggacaatcccttcgtcggccgtgccgacgcgcggccggagatctggagctatggccaccgcaaccagcagggcgccgcgctgaatccctggaccggccggctctggacccacgagcacggcccgcgcggcggcgacgagatcaacataccccaggccggcgggaactacggctggccgctggcgacccatggaatcaactacaccctgctgccgatccccgaagccaggggcaaggccgtcgaaggtaccgaggcgccgcaccatgtctgggagaagtcgccggcgatcagcggcatggcgttctacgatgcgcagcgcttcccggcctggcagcataatttgttcatcggcgcgctggcgacgcaggaactgatccgcctgcaactggatggcgaccggatcgtccacgaagagcgcctgctgggcgatctcggggtgcgcatccgcgacgtgcggcagggcccggacggctatctctacctgctcaccgaccagaaggacgggcaattgctgcgcctggggttggcgcgctag

SEQ ID NO: 323881 - DNA, 498 bp, Pseudomonas aeruginosa
atgccagccattctctcctcccgccaacgtatcgccctgcgcctggcctggcgcttcatggcgccttaccgctggcgcatgctcggggccctggtggcgttgctgttcaccgcggcgatcaccctgtccctgggccagggcatccgcctgctggtggaccaggggttcctcaccgcctcgcccgaattgctcaatcgctacatcctgctgttcttcgtgctggtgctcggcctggccgtgggcaccttcgtgcgcttctacctggtgtcctggatcggcgagcgcttcgtcgccgatatccgcaagcgcgtgttcgaccacctgatcgagttgcatcccggtttctacgaaaccaaccgtagctccgagatccagtcgcgcctgaccgccgacactacgctgctgcagacggtgatcggttcctcgctgtcgatggccctgcgcaatgccctgatgctggtcggcggggtgctgctgtcgtcaccaacgccaagctga

SEQ ID NO: 323882 - DNA, 2325 bp, Pseudomonas aeruginosa
gtgcgtccactcagccgttggctctcatcttgcggctcgcttctggcgctggccgcgctgttcctggtcgttcccctcgccggccgctactggctcggctggtcgacgccgttcggctatctctcggacctggccctcggcagcctgctggtgctgctcctgcatcgacgctccctgtggttcgcgctcccggtcatgctgctctggtgcctgttcctgatcggcaatgccgaactggtcggcgcggtcgggcgcatgccggaaccttccgacctcaagtacctgctggatccgcagttcgtcagcagctccacccagggcggcggcctcgcccacctgccactggcgctcggcctcggtggcgcgacattgctttgcgtgctgctctggcgtcgccgcggtccgcgcctgccgcgctatgcctacgcgctgccggcggcgttcctggcggcgcatgtcggcctgcaatacctgcgtccgagcgacgccgaccaatggcagcagtacaacctgccgcacaagctgctggccagcgcgctcagcagtggccaactggcggtcgaagactggctcgccgacgaccgtccggacaccccgccggacgtcgccgggctcaaccagctcgacctttccggaacgccgctgctggccggcggagggcgcgcgcgcaacgtcctgatcgtggccatggagggaatccccggcgcgtatatcgccgccaaccgcgccgccatcaacagcagctaccacgaagcgccgatgcccaggctgagtggctgggccgaacgggcgatgaccaccccggactacgtgctgcacagccaccagaccatccgcggcctctacgccatgctctgcggcgactacagcaagctcgactcgggcacgccgaagggcgtcgagctgctgaacaacccggcccgggccagggagtgcttgcccgcccagctgcgccagcacggtttcagcacgcacttcctgcagggtgccggcctgcgcttcatggccaaggacaaggtcatgccgcagatgggcttcgacaagaccctcgggcgcgactggttccgcaacacgtcctacctggagtttccctggggcatggacgacaaggccttcttcgagggcgccgcgacctacgtgaagcagctgcgccagcagaagaaaccctggatgctgaccctgctcaccgtcggcacccaccagccctactcggcgcctgccgactacctggcccgctacccgagcgccaagcaggccgcggtggcctatctcgacgacgcgatcgacgccttcctcgccgacctggagaaacagggcgtgttgcgcgacaccctggtggtgctcacttccgacgaatcccacggtgtcgaccaggtgcgcctcgcctcggcctggggcttcaacctggtgctggcaccggaacaggcggcgctgccgccgatcaagagcggcgtctacggccacgtcgacctcgccgcgtccgtcctcgactatttcggctaccgcgtgccggcggggatttccgggcgctcgctgttccgcgactacgccagcggccgcgaaatgatgtcctacaccaacggcatgctgcgccaccacgacggcaaggacaccttcgtcgaatgcgatttccagcaggtctgccggcgctaccgcagcgagggcttcatcgccgacgaagccgagttcctcggtcgcttcagcggtcgccaggcacgcctggtcagccagcgcgccgccgtcctcgaccactccgtgcaacaggccggccagttgggccaggagttccagttcgccacccacgaacgcatccgcctgaagccggaaacccacaacgactggaccgacaacctgatcggcgcgcaatacctggagatgccgaagaacagcaggaccacggtcaccctgaagatccgcgccttgcagatggaccgcaacggcgcccgggtgacgctgaagaccaaggagttcgaacgcgacgttcccataccggtaccggacatcccgcgcctgctcaaaggcaagccgctggacatgagcttcaccttcgacaacccggaagcgcgcaaggccttctccttccacttgctcgccgagggccgcgggatcatcgagatcagcgacttccacgtggtcacggcggccaacccggaacccgtggaaagccgcagccaggtcgccgaagcggcgaaggaacagccgctgctgagcaccctgaaaagcctgttcgccaaccgccccgaaaccgaggaagcggaacgcgcggacgcccctcgggagcgcaccgtcatccccgagcagaaggccctgatcctttcgcactga

SEQ ID NO: 323883 - DNA, 1335 bp, Pseudomonas aeruginosa
atgaacaaccacaacggtaccctgcaccgtggctggcaatcgctccagcgctggcgcatccagatcttcgtcatcacctggctggcctacgccgccttctacttcacccgcaaggccttctcggtggccaagctcggcatcgccgaagacccctccttcgagctcgacaagagcgccatggccgatctcgatgccctctacctggccgcctacgccgtgggccagttcatgtggggggtgttcgccgaccgcttcggcacccgcgtggtggtgctcggcggtttgctcacctcggcgctggcggcgctggtgatgggtaccttcgccaccctgccgatcttcgccgcctgcatggtggtccagggcctggcgcagtccaccggctggtcggggctgtgcaagaacatcggcgccttcttcgccacctacgagcgaggccgcgtgctcggcctgtggagtacctgctacgccttcggcgggctggtggcgacgccgttcgccggctggtgcgcctaccggttgacgcatgactggcgcatggccttcctgtcctcggcgggagtggtgctggcggtggccgtgctgttcttcttcctccagcgcaaccgtccgcaggacgtcggcctgccgcccgtggaggccgaggccgcgccccccgccaacgcgccccggccgagccattccggcgccctgctgaaggcgctcaggaatccccacgtgctggtcctcggcatcgcctacttcctgctcaagccggcgcgctacgcgatcctgctctggggcccggtgatcatctacgaacgcatgccggagatcggcaaggtcgcctcggccatcgtgccttcggccttcgaggtcgccgggctggccgggccgatcctcatcggcctggcctcggacaagctgttcggcgcccgccgcatgccggcctgcgtgctcagcctggcggcgctgaccgtgagcctggcgctgttcgtcccggcgatgcagagcggcagcctgtacctggtggtcggcctgctgttcatgatgggcgtcaccctctacgggccggactcgatgatcagcggcgccgccgccatcgacttcggcaccagcgaggcggccggcaccgccaccggcttcgtcaacggctgcggctcggtcggggcgatcctcggcggcctgctgccgggctacttcgacaccctcacggtgttcttcgtgttcaccgccaccgcgctgctcgccagcctgctgctggtgccgttctggaacagccggccaggcgcgtgccgcgtcgaaccgaaggcgcatgccggcgggccgctgctggcggccggcaagccgcgttga

SEQ ID NO: 323884 - DNA, 369 bp, Pseudomonas aeruginosa
atggacgccaaagctctgctcctcggcagcctctgcctggccgccccattcgccgacgcggcgacgctcgacaatgccctctccgcctgccttgccgcccggctcggtgcaccgcacacggcggagggccagttgcacctgccattcacccttgaggcccggcgctccacaggcgaatgcggctgtacctcggcgctggtgcgatatcggctgctggccaggggcgccagcgccgacagcttcgtgcttcaagaggggctgctcgatagtcgccaggacacgccgcgcacgctgaccctggcggcggacgccggcttggcgagcggccgcgaactggtcgtcaccctgggttgtcaggcgcctgactga

SEQ ID NO: 323885 - DNA, 1857 bp, Pseudomonas aeruginosa
atggcacgacccattgctgaccttatccacttcaactctacaactgttacggcaagcggagacgtttattacggccctgggggaggtaccggcattggccccattgccagacctatagagcacggcttggattcgtccactgaaaatggctggcaagagtttgaaagttatgctgatctgggcgttgaccccagacgctatgttcctcttcaggttaaagaaaaacgcagggagatcgagcttcagttccgagatgccgagaaaaaacttgaggcgtcggtacaagccgagctggataaggctgatgccgctcttggtccggcaaagaatcttgcaccattggacgtcatcaaccgcagtctgaccatcgttggaaacgccctccagcaaaagaatcaaaaactactgctgaatcagaagaagattaccagcctgggtgcaaagaatttccttacccgtacggcggaagagatcggtgaacaagcggtgcgagaaggcaatattaacgggcctgaagcctatatgcgcttcctcgacagggaaatggaaggtctcacggcagcttataacgtaaaactcttcaccgaagcgatcagtagtctccagatccgcatgaatacgttgaccgccgccaaagcaagtattgaggcggccgcagcaaacaaggcgcgtgaacaagcagcggctgaggccaaacgcaaagccgaagagcaggcccgccagcaagcggcgataagagctgccaatacctatgccatgccggccaatggcagcgttgtcgccaccgccgcaggccggggtctgatccaggtcgcacaaggcgccgcatcccttgctcaagcgatctccgatgcgattgccgtcctgggccgggtcctggcttcagcaccctcggtgatggccgtgggctttgccagtctgacctactcctcccggactgccgagcaatggcaggaccaaacgcccgatagcgttcgttacgccctgggcatggatgccgctaaattggggcttcccccaagcgtaaacctgaacgcggttgcaaaagccagcggtaccgtcgatctgccgatgcgcctgaccaacgaggcacgaggcaacacgacgaccctttcggtggtcagcaccgatggtgtgagcgttccgaaagccgttccggtccggatggcggcctacaatgccacgacaggcctgtacgaggttacggttccctttacgaccgcagaagcgccgccactgatcctgacctggacgccggcgagtcctccaggaaaccagaacccttcgagtaccactccggtcgtaccgaagccggtgccggtatatgagggagcgacccttacaccggtgaaggctaccccggaaacctatcctggggtgattacactaccggaagacctgatcatcggcttcccggccgactcggggatcaagccgatctatgtgatgttcagggatccgcgggatgtacctggtgctgcgactggcaagggacagcccgtcagcggtaattggctcggcgccgcctctcaaggtgagggggctccaattccaagccagattgcggataaactacgtggtaagacattcaaaaactggcgggactttcgggaacaattctggatagctgtggctaatgatcctgagttaagtaaacagtttaatcctggtagtttagctgtaatgagagatggaggtgctccttatgtcagagagtcagaacaggctggcgggagaataaagatcgaaatccaccacaaggttcgagtagcagatggaggcggcgtttacaatatggggaaccttgttgcagtaacgccaaaacgtcatatagaaatccacacgggagggaagtga

SEQ ID NO: 323886 - DNA, 264 bp, Pseudomonas aeruginosa
atgaagtccaagatttccgaatatacggaaaaagagtttcttgagtttgttgaagacatatacacaaacaataagaaaaagttccctaccgaggagtctcatattcaagccgtgcttgaatttaaaaaactaacggaacacccaagcggctcagaccttctttactaccccaacgaaaatagagaagatagcccagctggagttgtaaaggaagttaaagaatggcgtgcttccaaggggcttcctggctttaaggccggttag

SEQ ID NO: 323887 - DNA, 309 bp, Pseudomonas aeruginosa
atgagcaagcaacgacgtacgttttccgccgagttcaaacgagaggccgcggccctggtgttggaccaaggctacagctatatcgacgcctgccgttcgctgggggtggtggattcggccttgcgccgttgggtgaagcagctcgaggcggagcgccagggtgtgaccccgaagagcaaggcgttgacgcctgagcagcaaaagatccaggagctggaagcccggatcaaccggttggagcgggagaaagcgatattaaaaaaggctaccgctctcttgatgtcggacgaactcgatcgtacgcgctga

SEQ ID NO: 323888 - DNA, 681 bp, Pseudomonas aeruginosa
atgcatgtactgctcaccgaagacgacgacctgatcgccagcggcatcgtcgccggcctcaacgcccagggcctgaccgtggaccgggtggccagcgccgccgatacccaggcgctgctccaggtggcgcgcttcgacgtgctggtcctcgatctcggcctgcccgacgaggacggcctgcgcctgctgcaacgcctgcgccagcagggcgtcgacctgccggtgctggtgctgaccgcgcgcgacgcggtgaccgaccgggtcgccgggctgcaggccggcgccgacgactacctgctcaagcccttcgacctgcgcgaactcggcgcccgcctgcataccttgcagcggcgctccgccgggcgttgcgtcaacgtcatcgaacacggccgcctcagctacgatccgagcacccgcgaaacctggctcgacggccgccccgtggaactgtcgcgacgcgaacaggcgctgttgcaggcattgctcaacaaccgcgggcggatcctcagcggcgagcagctcaaggacagcgtctatggcttcggcgacgaggtcgagagcaacgccctcaacgtccacatccatcacctgcggcgcaagctcggcaacgccatcgtgcagaccgtgcgcggcctcggctaccgcctcgggccggcgcgcggcgacggagacgacgcatga

SEQ ID NO: 323889 - DNA, 1032 bp, Pseudomonas aeruginosa
gtggaacagatcaacgccggcctgcgtacgcagaagctgcaactgttctaccagcagctcaacggcctgctgttcggcgtggagaacctgctggtgatctggctcggcgcgaccatggtgatggacggccagttcagcgtcggcatcctgatggccttcaacgcctacaagtcgcagttcgacagccgcgtcggcagcctgatcgacaagttcttcgagctgcgcatgctccagttgcagggcgagcgcctggccgacatcgtgctccaggccccggaggtcagccacggcgacatcctcccggagaacctccgcgagcgcgaggcgagcatcgagatccagggcctgcgctaccgctacgcggaacaggagccctgggtcctcgacggcctcgacctgcgcatcgccggcggcgagtcggtggccatcgtcggcccctcgggctgcggcaagagcaccctgttcaacgtcctgctgggcatcctcccgccagtggagggacagatccgcatggccggcctggaccttgcgcaactgggcctggacggcctgcgcgaactggtcggcacggtgctgcaggacgacgtgctgttcgccggttcgctcagcgacaacatcagtttcttcgacccgcaaccggacatgccctggctgctgcagtgcgcgcagatggctgccatccacgatgacatccaggccatgccgatgggctacaacaccctggtcggcgacatgggcacggtgctctccggcggccagaagcagcgggtgatgctggcccgggcgctgtacaagaagccgcgcatcctgttcctcgacgaagccaccagccacctcgacgtacactgcgaacagcgggtcaacgccgccattcgcgcgctgcgcatcacccgcatcatggtcgcccatcggcccgagaccatcgcctcggcggaccgcgtgatagtcctcggccagggcaaggtaagcctcgacgaaagcaccgcgcgcctggccgaacgccaggccgccgcggcgcgggagcaggcctga

SEQ ID NO: 323890 - DNA, 996 bp, Pseudomonas aeruginosa
atgcgtgccctcgccggcctgttgtgcggcctgctcggcctggttcccggcgccgccgcctacgagccggacgtgttcggcaccgccggccaggtcgccggccaggcctactacgacgccctcgccgcccagcgcagcctggccgcctcgcggcaggtcgcggagctggcggcgcagaacctggaagccgccgacgccaagtaccgggccggcgccgccgccctttccgatcgcctgcaggcgcagaccgcgctgtcccaggcgagcctcgcccaggtccgcgacgaaggcgccctgagcaacgccctcggcgtcatcgccctgcgcatgggcctggcgccggataccccgctgcgcctctccggcgagctggaggcgcaatccgacaccggcttcgtcaaggccatcgacgagatgctcgccgaagcccgccgcgagcatccggcgctgctcgccgcccaggcgcggctgaaagccgccgccgcctcggtggaggaaagccgcgccgccggccggccgagcctggcgctgagcgccaacctggcacgcagccatagcgaccaggcgatggcgttcaacggcgatacccgcgaacgcgaccgcagcatcggcctgcaactgaacatcccgttgttcgaaggcttcgaacgcacctaccaggtccgcaacgccctggcccgccgcgaagccagcgaagcggagctggccgacaccgagcagcaggtttcgctggaggtgtggaacaactaccagtcgctcagcgtcgagacccgcagcctggcgcgcacccgcgaactggtcgaacagtcgcggcaaagcctggaggtggtgcagggccgctaccgctcaggggtcggcagcatgatcgagctgctcaacgccctgaccgcctacgccagcgccgaggaccagcacatccgcgccctcggcaactggcagacctcgcgcctgcgactggcggcgagcctcggtcgcttggggcttcaaatgatctga

SEQ ID NO: 323891 - DNA, 1002 bp, Pseudomonas aeruginosa
atgatgaggacccatcccgtcgccgatcgtggcgatctccatgccgaccacctggacctggccgccgcccgttcctggatgtcgaaggtctgcgggccgcaccggctcgaagcggcgagcccgggactggtgcagttcgagcaccacggcaacgtgctgaagtcgatgtgcaccacccttggctacatcggctacggtaccgacgtcaccatcaccgtcgaggatgccgcggcgttcaacgcctacagcctgagcctgccgctcagcggcgagcaggagctgtgccggggcgggctgcgcctgctctccgacgtccgccgcggggtgatcatcgcgcccaacgagcgccaggagctgagcatcgccggggactgccgcaagctgcaggtggtgatcggccgcacggcgatgcgcaaggtcctggaggagatgttgcagcggccgatcgatacgcccttgcgcttcgatccggagatggatgccctggatggcgcctccgcgtcctggtggcgcaccgtgcggcacatcagcgaggagatggcgcgcagcgaactctacgcccaggcgtttttcagcagcgacctggaacgcgcgctgatcaagggactgatcctggcccagccgaacaactacagcgaggccctgcagcagggccttggcgggcgcccgccgcactacctgctgcgcgcccgcgagtttctccaggccaacgcccgcgagaccctgagcctggaggacgtggaacgcgccgccggggtctcgcggttcaagctgttcgagggcttccgtcgctacttcggggtgtcgccgatgagctacctgaagcactaccggctcgccgcggtgcgcgaggaaatcctcgccagcggcggcgcccgcagcatctcgacgatcgccctgggctggggcttcagccacctcggacgcttctccgtggactaccgcaagcgcttcgaggaaaccccgagcatgacccagcgccgcgctgcgcggcgctcctga

SEQ ID NO: 323892 - DNA, 1395 bp, Pseudomonas aeruginosa
atgaacgctacccgcagaagcctggaacagtggcgcgactatgtcggcggctgtctcgacttccgtcccgaggaaggcatcttccgcatcgcccgggacatgttcaccgaaccggagctgttcgacctggagatggagctgatcttcgagaagaactggatctacgcctgccacgagagcgaactggccaggccccatgacttcgtcaccctgcgcgccggacgccagccgctgatcgtcacccgcgacggcaacggccagttgcacgcgctggtcaacgcctgccagcatcgcggcgcgaccctggtgcgggtcggcaagggcaaccagtcgaccttcacctgtccgttccatgcctggtgctacaagaacgacggccggctggtgaaggtcaaggcgccgggcgaatacccggaaggcttcgacaaggccacccgcggcctgaagaaagcgcgcatccagagctacaggggcttcgtcttcgtcagcctggacgtcgccggcgaggacgacctggtggacttcctcggcgacgcccgggtgttcctcgacatgctggtggcgcagtctcccagcggcgagctggaagtgttgcccggcacctccacctacacctacgaaggcaactggaagctgcagaacgagaatggcctggacggctatcacgtcagcacagtgcactacaactacgtagccaccgtgcagcaccgccagcaggtcgaggccgagcgcggcggcgtggccgccaccctcgactacagcaagctcggcgccggcgacgcggccaccgacgacggctggttctccttcgccaacggccacagcgtgctcttcagcgagatgcccaaccccgccgtacgccccggctacgccagcgtgatgccgcggctggtggcggaatacggccaggcccgcgccgagtggatgatgcatcgcctgcgcaacctcaatctctaccccagcctgttcgtcatcgaccagatcagctcgcagctgcgcatcgtccgcccgctggcctggaaccgtaccgagatcgtcagccagtgcatcggcgtcaagggcgagtcggacgccgaccgggagaaccggatccgccagttcgaggacttcttcaacgtctccgggatgggcacgcccgacgacctggtggagttccgcgaagcccagcgtggcttccaggcccgcctggagcgctggagcgacatctcccgcggccacggcaagtggctcgaaggcgcgacgccgaacagccaggcgctgggtatcgcgccgctgctgaccggcaccgagatcacccacgaaggcctctacgtcaaccagcacgcgcattggcggcgcttcctcctcaacggcctggagcgcctggccctgcgcgcgaaggaggtgaccccatga

SEQ ID NO: 323893 - DNA, 1014 bp, Pseudomonas aeruginosa
atgaaccatcggatcgcactcaacttcgaagacggggtgacccgcttcatccatgccgcgcccggcgagaccgtggccgacgcggcctaccgccagggcatcaacatccccctggactgccgcgacggcgcctgcggcacctgcaagtgcctggccgaggccgggcgctatgcgctgggccaggactacatcgacgatgccctcagcgccgaggaagccgcccgcggctacgtgctgacctgccagatgcgcgccgaaagcgactgcgtgctgcgcgtgccggcgtcctcgaccctgtgcaggaccggccaggcgcgctacgaggcgcgcatcagcgaagtccggcaactgtcgccgagcaccatcggcctgtcgctgcgcggcgaggcgctggccagcctggcgttcctgcccgggcagtacgtcaacctccaggtacccggcagcgagcagcgccgcgcctactccttcagctcgctggcgaaggacggcgaggtcagcttcctgatccgcaacgtccccggcgggctgatgagcggcttcctcagtggcacggccagggccggcgacagcctggcgatggacggcccgctgggcagtttctacctgcgcgagattcaccggccactgctgatgctggccggcggcaccggcctggcgccgttcaccgcgatgctcgaacggatcgccgagcagggcagcgcgcacccgctgcacctggtctacggggtgacccacgacgtcgacctggtcgggctcgagcgcctggaggcgttcgccgaacggattcccggcttcacctggagcgcctgcgtggccagcgccgacagcgactatccgcgcaagggctacgtgaccgagcacatcgccgcgcagcacctgcacgagggcgacgtcgacatctacctgtgcgggccgccgccgatggtcgaggcggtcgagcgctacctgcgcgagcagggcgtgcgcccggcgaatttctactacgaaaagttcgctgccagcgcggcctga

SEQ ID NO: 323894 - DNA, 489 bp, Pseudomonas aeruginosa
atgagcctgggctacgacgccctgcgcgatttcctctaccgcgaggcgcgctatctcgacgacaaggattgggacgcctggctggcgttgtacgccgcggacgccagtttctggatgccgtcctgggacgaccgcgaccagctcaccgaggacccgcagcgggaaatctcgctgatctggtacggcaaccgcggcggtctggaggaccgggtattccgcatccgcaccgagcgctccagcgcgaccctgccggacacccgcacctcgcacaacctgagcaacatcgaactgctcggcgaggacgacggcatctgccgcgcgcgctgcaactggcacaccctgagctatcgctacaagaccgtggacagctacttcggcaccaccttctacgacctcgacgtacgcggcgagagtccgctgatcaaggccaagaaagtgatcctgaagaacgactacgttcgccagctgatcgacgtctaccacgtctga

SEQ ID NO: 323895 - DNA, 3156 bp, Pseudomonas aeruginosa
atgttcgaacgcatcatccaattcgccatcgagcaacgctggctggtcctgctggcggtgctggggatggccggggtcggcatcggcagctaccagaagctgtccatcgacgcggtcccggacatcaccaacgtccaggtgcagatcaataccgccgcccccggctactcgccgctggaagtggagcagcggatcacctacccggtggagaccgtcatggccggcctgccgggtttgcaggaaacccgttcgctgtcgcggccggggatttcccaggtgacggtgatcttcgaggagggcaccgacatctacttcgcccgccagcaggtcaacgaacgcctgagcacggcgcgcgagcaactgccggaagacatctcgccgaccctcgggccgatctccaccggtctcggcgagatctacctgtggacggtggaggccgaggagggcgcgaccaaggaggacggcagcgcctacacgcccaccgacctgcgcaccatccaggactggatcatccgtccgcagttgcgcaacgtgaagggcgtggccgagatcaacaccatcggcggctacgccaagcaattcctcatcgccccggatccgaagaagctcgcggcctacaagctgaccctcggcgacctgcagaacgccgtgctgcgcaacaacgagaacgtcggcgccggctacatcgagcggcgcggcgagcagttgctgatccgcgcgccgggccaggtcaaggacatggacgatatccgcgggatcatcgtttccaacgtcgacggcgtgccgatccgtatccgcgacgtcgccgaggtcggcctgggcaaggagctgcgcaccggcgcggccaccgagaacggccgcgaagtggtgctcggcacggtgttcatgctgatcggcgagaacagccgggaagtggcccaggcggtcggccagcgcctggaggagatcaaccggaccctgcccaagggggtcaaggcgatcaccgtctacgaccgcaccaccctggtggacaaggccgtggccacggtgaagaagaacctggtggaaggcgcggcgctggtgatcgcggtgctcttcctgttcctcggcaacatccgcgcggcgttgatcaccgccaccatcatcccgctgtcgatgctgttcaccttcaccgggatggtcggcaacagggtcagcgccaacctgatgagcctcggcgcgctggacttcggcatcatcgtcgacggcgccgtggtgatcgtcgagaacgccatccgccgcctggcccacgcccaggcccaccacggccgccagctgacccgcgcggaacgtttccacgaggtcttcgccgcgtccagggaggcgcgccgggcgctggtcttcggccagatcatcatcatggtggtgtacctgccgatcttcgccctcaccggggtcgaggggaagatgttccacccgatggcgttcaccgtggtcaccgcgctgctcggcgcgatgatcctctcggtgaccttcgtcccggcggcgatcgcgctgttcatcaccggcaaggtcaaggaggaggagaacttcgtcatgcgccgcgcgcgtctggcctacgaaccggcgctgcgctgggtgctcgggcaccgcgcgctggtggtcggcggcgccctcggcgcgatcctgctcaccgggctggtggcctcgcggatgggcagcgagttcattcccagcctcagcgagggcgacttcgccatgcagggcctgcgggtgccgggcaccagcctgacccagtcggtcgagatgcagcagaccctggagaggaagctgatgggcaagttcccggagatcgagcgggtcttcgcccgcaccgggaccgccgagatcgcctccgacctgatgccgccgaacgcctccgacagctacgtgatgctcaagccgcagagccagtggccggacccgaagaagtcgcgggaggcgctgctggaagaattgcaggccgcggcccttgaggtgccgggcagcgtctacgagttctcccagccgatccagttgcgcttcaacgagctgatctccggggtgcgcagcgacgtcgcggtgaaggtcttcggcgacgacatgcaggtgctcaacgacaccgcggagaagatctccaaggtgctgcaaggcatcgacggcgcctccgaggtgaaggtcgagcagaccaccggcctgccggtgctgacggtggacatcgaccgcgacaaggcggcacgcttcggcctcaatgtcggcgacatccaggacaccgtggccaccgccctcggcggacgcaacgccggtaccctgttcgagggcgaccgccgcttcgacatcgtcatccgcctgccggaaaccctgcgcgccgacctgccggcactgtccaacctgctgatcccgctgccgccgaacaacctggcgcggatcgacttcatcccgctgtcggacgtggcgcgcctcgacctctcgccgggaccgaaccagatcagccgggagaacggcaagcggcgcatcgtggtcagcgccaacgtgcgcggccgcgacatcggctcgttcgtgctggaagcgcaacagaagctgcaggacggggtgaagatcccggccggctactggaccacctggggcggccagttcgaacagttgcagtccgccgccaagcgcttgcaggtagtggtgccggtggcgctgctgctggtgttcaccttgctcttcgccatgttcaacaacgtcaaggacggcctgctggtgttcaccggcatccccttcgccctcaccggcggggtgctggccctgtggctgcgcgggataccgctgtcgatctcggcggcggtgggtttcatcgccctgtccggggtggcggtgctcaacggcctggtgatgatctccttcatccgcaacctgttgcaggaaggacgcagcctcgaccaggcggtgtgggagggcgccatcacccgcctgcgtccggtgctgatgaccgccctggtggcgtccctcggtttcgtgccgatggccctggccaccggcaccggcgccgaggtgcagcggccgctggcgacggtggtgatcggcggcatcctgtcctcgaccatgctgaccctgctggtgctgccggtgctctatcgctggacccacgggcgcgacgccggaccgcgcgaggagacgccggcggccggctga

SEQ ID NO: 323896 - DNA, 1488 bp, Pseudomonas aeruginosa
atgctacagacgctgaaacagaactggttctccaacctccgcggcgacctgctcgccggcctggtcgtcgccctggcgctgatccccgaggccatcgccttctccatcatcgccggggtcgacccgaagatcggcctgtacgcctccttcagcatggcggtggtgatcgccttcgccggcggccgtccgggaatgatctccgccgcgactggcgccatggcgctgctgatggtcaacctggtgaaggaccacggcctgcaatacctgctggcagcgaccctgctctgcggcgtgctgcagatactcgccggctacctgcgcctgggttcgctgatgcgcttcgtctcgcactcggtggtgaccggtttcgtcaatgccctggcgatcctcatcttcatggcccagctacccgaactcaccgatgtcggctggccggtctacgcgatgaccgccgcgggcctggcgatcgtctacggcttcccgcacctgccacggatcggccggctgctgccctctccgctggtatgcatcctggtcctcaccggcatatccatctacctgggcctggacatccgcaccgtcggcgacatgggtcagttgcccgacagcctgccgctgttcctctggccggacgtgccgctgaacctcgacaccctgctgatcgtcctgccctactccgccgccctggcggtggtcggccttctggagtcgctgatgaccgccaccatcgtcgacgagatgaccgacaccggcagcgacaagaaccgcgaatgcaagggccagggcctggcgaacatcgccaccggcctgctcggcggcatggctggctgcgcgatgatcggccagtcggtgatcaatgttaaatccggcgggcgcagccggctctcgaccctggtggccggcgtcgcgctgctgctgatggtggtgttcctcagcgactgggtcgggcggattcccatggcggccctggtggcggtgatgatcatggtgtccatcggcaccttccgctgggagtcgatccgcaacctgaagcgctacccgctatcgaccaacctggtcatgctggtgacagtcggcgtggtcctcgccacccacaacctggccttcggcgtggtcgccggcgttctcctggcctcgctgttcttcgccaacaagatcgggcactacctcgatatcgacagcgaacgctccgccgacggcacccgccgccactaccaggtgagcgggcaggtgttcttcgcgtcgtccggcaggttcatcgccgccttcgacctgagagagacgctggagcatgtgctcatcgacctgcgccacgcccacctgtgggacgtcaccgccgtcgcggcactggacaaggtggtcctgggctttcgccagcgcggcgtgcaggtcgacgtgctgggcctgaacgccgccagcgcgaccctggtcgatcgcttcggcgcctacgacaagccgggcgccgtggacattctccccggccattga

SEQ ID NO: 323897 - DNA, 1764 bp, Pseudomonas aeruginosa
atggcaaccccaccctatcccgaggacgagcattcgagacaggcctacgtcgaccaactcggtctgctggaagaaggtgcggacgaggtattcgaggaaatcctcgccgccgctacgtcctacttccagacgcccatcgcgctcatttccatcctcgaccatcagcgccagtggtttcgcgcgagcatcggcctcgatatccggcagacgccgcgacgggattcattctgcgcctatgcgatcctgggcaagggagtattcgaggtggccgacgccaccctcgacccgcgcttccgggacaacccctatgtgcaaggcgaaccgcgcatccgcttctacgccggggctccgctggccaccgcggaaggtctcaacctcggcagcctctgcgtcatcgaccgggaaccacgcgggccgctggccgagcgggacgtcgccatgctcgagcacttcgcccggctggtgatggcccgtatccatacgctccgctcgaccaactacatcgacgagccaaccggcctgtacaaccgtctccgcctgcaggaggacgtttccctgcgcctgcagcgcgacggcgccctcaccgtgatcgccgccgacctcctgcccctcgccctgctgaataccatcatccgtacgctgggctatcccttttccaacgacctcatgctcgaggcgcgcgaccgcatccgcgcggaactgccggatttcactctctacaagatcagcccgacgcgcttcggactgctcctgccacggcagcaacaggaagaaaccgagtcggtctgcctccgcctgctgcgggccttcgaaagccccgtcgtatgtcgcgggatcccgatcaaggccaacgtgggcctcggcgtactaccgcttgccgacgatcccctcgacggcgatcaggactggctgcgcctggtggtcagcgcggccgacgacgcccgcgaccgcggtgtcggctgggcccgctacaacccgccgctggaccaggcccagcagcgtgccttcacattgctgacgtcgctgtcccaggcgatcggaaccgaagaaggcttccatctggtgtatcagccgaaaatcgacctgccgacaggcaggtgcacgggcgtggaagcgctgctgcgctggcggcacccgcaactcggcttcgtcagccccgccgaattcgtgcccctggcggagaaaaccgcactgatgcgccccctcagcgactgggtgctgcgccatgccatggcccagctggcgcaatggaacgcacggaacatcccgctcaggctggcgatcaacgtatcggcatcggacatggaagacagcagcttcctggaagaggccgtcagactcgccaaaacctacgacatcgacctttccgccctcgagctggagttcaccgaaagcgtactcatccgcgacgcctcggcggtcggctcggtgctgctgcgtgcccgggagcttggcatgggcatcgcggtggacgacttcggcaccggctacagcaactggacctacctgcgcgatctgccaatcaccgccatcaagctcgaccaatcgttcacccgcgacctcgccggctcgccgaaggcgcagagcgtcacccaggcggtgatcggcctggccagccagttgggttatcgggtggtcgcggaaggcatcgagacccacgacaccttccacctgctgcaggcctggggctgccacgagggccagggctatctgatcgcccagccgatgctgccggagcaactggaggactggctgcggcgttag

SEQ ID NO: 323898 - DNA, 837 bp, Pseudomonas aeruginosa
atgttagcaggtagatggatacttttcccaggaacccacgcctgtcgacactcgctctggcagccgccttatgcccggctcgcgaaaaccctcgactctttcgcgtcgccggctagatcgatgaagccgcttgcgatgacgtgcgccctggccgtggcatgcctgcactcgaaagcccagttcgagccgcacatcgccgagggcaacctggtagcgtgctggaaggctggtgcgatccattcccgggctattacctctatcacccaagtcagaggcaaccttcgccgaccttctcagtggtcgtcgaagcgctggccttgggacggctcggtcgaacgtggcagccaaagcaacaggcgcacgaaggcggtccaaggtgcaatgaatcgagcccccctggagtgcgacagccacacttctgatgtgccgaggcagcatcttgcggcaagccgcctcgctggcgagacgaagggcttcgcgaaacgtacggccccggtcgccgggaaagcggcaaggagaaccgcccctcggcgcggacgttccacgaacgggtacgggacttggaggcggaacgaaaaaagggcccgaaggccctttctcaatgatctacagacttcattggaactctatagatctatatttggagcgggaaacgagtcatgcactagagcgctaagtctctgtttcccaatcactttctccactgtggtgatcagcgaagaactcaattatagccttgtttttcgccctcggcaacaaagttcatccaaccacttccaccagcgtccaaggatgatccatccacccgtcgttacgcctgatgcgtccagctgctga

SEQ ID NO: 323899 - DNA, 501 bp, Pseudomonas aeruginosa
atggctgaacattcccatgaacatcaacatcacacatccggtcagatgggtaagcacggccgaccatacgccaagttctgggtgaacatggtgttgggcctcgtcgtcatgtacttcgtaatgttcagcatgatcgacggcgccagggacttcagaaacaatctcaacatgctctacatggcggtcactatgtgggcgccaatgggcatcttcatgctagcgacaatgcccggcatgtttccaaaccggcggctcaatctcgtgctgtacggcttgtttgccgttctcacactcggttcttttgccgctacccgtgctcaaaccggaatcggcgatcgacagttcatcgcgtctatggtcccgcaccattcgggagcgatcctcatgtgccgcgaggcgcagctctcagatccggaactcgtcaacctatgccaagcgatttccgatggccagcgcgcggagatcgagcagatgaaccggattgctgcacgccttcgttga

SEQ ID NO: 323900 - DNA, 747 bp, Pseudomonas aeruginosa
atgcacaaggacatttcaacatcaaaggtgttctatcgtcccatcgaggcggccatccgatgggctgggttgctgcggtatctcccgatgatcctggccacgatcgcgtcaccgcgtgtcctgcctcggtcgctgaactgccctcgatggaatgagtgccggctgcactcggaacgtatctatgacggcatcctcaacggagagctgccctacggcaagaacgggatcacgctcaatgatccgaacctgctcaattctctggatctgactgttcgccatgtcgatctaaaacgctggatgcgcacccactatcccgagcaccggccaggatttctgttcagccgtggcgaacgcatggcgcatcctttcatcaccatggaaacaggacaggcgatcctcgtggagcggctggcccttcaggccgcgcttgaacaagcccgacgtgagatgcgagaactgcaggagcagcacgacacgctactcaagcaatcctcggtgctgttggcatccaagcaatgcgagatcagcgaacgggcggaaacgacctatctcaacatcattggagggatgttgacgctgatgctgagccagtcgccttcaggcgtgccctattccagcttcaaaacgcaggaggcccttgtctctgcattggtcgcccactacggcggcaccatgggcatcactgagcgcaccttaaacggaaagttcgccaacgctaagaggtacgttcgtagcgcaagcgcatga

SEQ ID NO: 323901 - DNA, 213 bp, Pseudomonas aeruginosa
atgtcgcagacccctgtactcccgccgaacgagcgccgcatcctgcggctcgatgaagtcgaagcgaagtccggcttcaaacgcgcccacatctacaacctgatgaagaagcgccagttccctcaggcgctgcgcctgggcgtgcgcgctgtcggctgggattcgatcgaaatcgaccagtggatcgccgagcgcctcaaccaccggacctga

SEQ ID NO: 323902 - DNA, 876 bp, Pseudomonas aeruginosa
atgcaggtcgtgtccatcatttcaacgaagggcggcgtcggcaagaccacgacggccgccaacctgggcgggctcgccgcggacgcgggcctgcgcgtgctgctgctcgatctcgacgtgcagcccaccttgtcctcctactacgaactgacccagcgcgcgccgggcggcatctatgagctgttggccttcaacgagcgcgaccttggccagctcgtgtcccgcacgatcatcgcgggcctggacctggtgctgtccgacgaccaccggggcgagctgaacacgttgttgctgcatgcgccggatggccgcctgcggttgcggcatctgctgccagcacttgctcccctctacgacctggtgctgatcgacacccagggcgcgcgttccgtgctgctggagatggcggtgctcgcctccgatctcgcgctgtcgcccgtcacgccggagatcctcgcggcacgcgagctgcggcgcggcaccatgcagttgctcgaagacattgcgccgtaccggcacctgggcatcgaaccgccgccgctgcacttgctcatcaaccgcgtccacccggtgtccgccaacgcacggctgatccagcaggccttgcgcgacctgttccaggacagcgccggcatccgcgtgctcgccaccgacgtgccggccatagaagcgtatccacgtgccgcaacgcgcggcctgccggtgcatcgggtcgagcaccgccagccgcccggcagagtcgcccctgccgcgctcgacacgatgcgcgcgctcgccagcgagttgttcccgcaatggcaggaccgactggctcaagtatccggccgcccgcagcgacctcttgatcctgggaggccccatggcgaacgcacatga

SEQ ID NO: 323903 - DNA, 270 bp, Pseudomonas aeruginosa
atggcgaacgcacatgagctggcccgcggccacaagcggctgcgcgccctgatcgagttcgcggtcggtgagggctggcacgtcaagcgcacgccgggcgggcacctcaagttcaccaaggccggctgcgcggcgatctacacgagttcgacagcgagtgaccaccgggccgaattgaacgcccgtgcgcagatccgccgcgccgagcgagaggcccgcatggcgccggccggcggtcgtggggactgcgaggggtgcggccatggctga

SEQ ID NO: 323904 - DNA, 1680 bp, Pseudomonas aeruginosa
atggctgacatgacctcgcaggacatggcaggcaagctgctcgcggccggcttcgagcgcagcggcccagcggctacggccttgagcgacccgatcgcggacacgcccatggtcgtgacgctggaccagttgcggccctacgaccatgacccgcgcatgaagcgcaacccggcttacgaggaaatcaaggcatccatccgcgagcgcggcctggacgcggcgccggccatcacgcgcaggcccggcgaggaccactacatcatccgcaacggcggcaacacgcgactggcgatcctgcgcgaactctggtcggagaccaaggaagaacgcttcttccgcatatcgtgcctgttccgaccatggccggagcgcggtgaaatcgtcgcgctgaccgggcatcttgccgagaacgaactgcgcggcggcctcacgttcatcgagcgcgcgctcggcgtcgagaaagcacgggagttctacgagcaggagagcggcgccgccctgagccagtcggaactggcccgccgcctggcggccgatggcttccccgtccagcggtcgcacatcacccgcatggccgacgcggtgcgctacctgctgcccgccattcccactgtgctctatggcggcctggggcgccaccaggtcgagcggctgtcggtcatgcgcacggcctgcaaacgcacctgggagcactacgccaaggaccgttcgctgccgctggacttcgacagtttctttcaggaggtgctggcgcagttcgacacgcagggcgacgagttcgcgccgcagcgcgtgcaagacgagctgatcggccagatgtccgagctgctgggcatcggctacgacgtgctggcgctggacctgaccgaatcggaaagccgccaccgggcgctggtcagtgacccgacgccacctgcggcgcagccggcgttgccttcgcccaccgccggcacgccgactccgccgggcgcagcatcgtccatcgccacgcctgcagcggcggccggtcctccacccgccagccctccggcgtccgagcccaccttgcgccacgacgacacggcggttggcgaagcggccacgggaagccagccggccgcaccgggcgatctgcttcgcgagcacatcgtctcgccagcaccgacgacagaacggctccaatcgatccagcgcatggtcgccgaccagttgggcgatgcgctgccgcccgacttctcggcgagcgtgctgcagtccatcccggtgcaagccggcggactctatccgatctccgacgtctggtacatcgacgccggcctggacacgcccgatcggctgcgcatccacatcgcgcagttcgcgcgcgagatcgccggggaggcagacctggacgagtgcatcgaggatcgcgccgatggcatcgggtttgcgtgccgcgcccgcggccaagccccgtcgccgctcggccgcgcggtgctgacgctgctcacttccctgacgggtcagcccgtcgccgaagcgggcctggacggcgcgcagctcgccgccgacctgccgaccctgttgcacggccagagccaaggccatggcagcggcgcaaggcgcttgagcgacacggcgttggtcaagctctttcggctgctgcgcctcgcccggcgtctgctggacctggaagccggcaccacggcgcccgggacgtga

SEQ ID NO: 323905 - DNA, 561 bp, Pseudomonas aeruginosa
atgtccacatcgcatccgctcaaccaggccgtgattgcccaggcgctgtatgaccttcgcaacggccaactgcgccgctgcaaggccatgggcttcggcgaggccgagctggatgcgctcaagcaccccgcgctgatcagcgtgctggccaacgccagcgtctcgtggtgctcggtcacggtcaaccgcgaagtgctgcagcgcctgctcaaccaggcacaggacgtggagaaggaaatcgccacggtcgatcgcatgctgcggctgggggccagcacggagatggtcagccgcttctatggcctgacccatcaggaagtcgccctgcggcgggagatcctcggcctgcccaagcgcaaggggcgccaccccgtcctggacgagacccaggacaccgaactgtggcggcaatggaaagccgtgaccagcagcaggaacgtcgatctggaggacgagacctcgattctcgatgcggccatggacctggccgagggcatgtcgctgccgctctcggtggtctgggccgcgatcaggaactgggtcgatcagggattgggctag

SEQ ID NO: 323906 - DNA, 1239 bp, Pseudomonas aeruginosa
atggccgtggacgacaccgccccacgagcccagcgccctggccccatcgcactcgccgacctgttcgacgctgcgctgaaggacctcgcgcccaagtccagctctggcgctcccgcgtccctgcctgctccaacgcccacgcctcctacgtccggcgacgccttcctgttcagtggcaatcggcacgagagcgtgccgcggcggctgttcctcgaccgccgcctgacaccgctggagcgcaacgcctggcaggtgttccgattgatgctcaacgacgatggcgtcacggcatttcccacctatgagcagttgcgcccctggctggcgtcgatgccctgcgcaggccaggcctcccatgagaccgtggcgcgggcgctgacgctgctgcgcctgacgcgctggctgagcctcgtgcgacgacggcgcgaccccaagaccggtcgcatcctcggcaacctctacgtcctgcacgacgaaccgctgacgccgttcgaggcgatgcaactcgacgccgactacctggccctggtcagccagtcgctggggcattcggccaaggccgtccaggtggtgggactcaacaccctccaggagatcgcggacgacccgatgctgtccggacgcaccttgccgtcgcggctgcaagtgctcgccgagcgcctggccgaccagggcatcaccgcctccgaaagttatccacaggaggatgcggtccacgattccgaagaagggcccgcgagccttcttcggaatggcgatcgcccatcttcggaatccgaagcagggccgaaacccgcgccagacggcgctcttcggaatccgaagcaggaccgtacagtacgtagtagtcgtattgatgaagtacgtactaccgcgcaggcgcgtgcgctgggcgacctgcaatggcccaagcgcttcgcggaactgaaggcggaacagcaggccggagccaagatggcgttgcagcaggtggacgctgccctgcggcaggccgtgctggacgaatgggccgcacggtgcggcaagcatggcatccgcaaccccgccggttatctgttcggcatcatccagcgcgccatgcgcggcgagttcaatgcctgggccaagcagaccggcccggcaccgccaacaccatcggcggcgcgagcgccaccaaccgagccgccgcgcaacgtcgtgccgcccgaggtggcccggcagcacatcgagcgcctgcgcgatctgctgcgcaaatcctga

SEQ ID NO: 323907 - DNA, 792 bp, Pseudomonas aeruginosa
atggcaaccagcaacgaaccattgcaactcaacctcggctccctgcgcagcgcgatgtcgctgacgctgcacacccaccacgcctcgcgcatctggcatggccgcgccgccgccgaggggcgaccgggcatcgtcggcctgaacggctacatcgccgtcatgaacaagatgaagcgcggctcggagcaggacgacccatacagcgactggtggatgcttcgcatcgaagacaagctcgaccagaccaggaccacgctgcagacgctgcgcgaccaggtggaccaggccctggccggcgtgcccgccgcgttgaccctgggcgagaacctcaacgtgcagcccgtcaagcttccgctgttcgtcaatgcgcagttgggctttgccgccgtctatctcctggccgactacgacgacatcgcgcgcaagctgatcctcgcccaccacaccgcgctgatcgatcgctcgacgttggagcgctggctcaacgaaggtgcccacgcgctgcgcagcctgttcagcctggcccagcaataccgctactcgggctgcacccgcgacgacttcgcggccaagaacgccgcagctcgggcagcattggagaagttcggcgaactgccgcaggacgtgctcgaaggcatgcgccgctcgaagtttgcgccgcccgtcgtgcgccgtggtctgcaacagcgtggtgatagcgctgccgcagccgcatctcccaccgacgaaggcgctgccgccgattcggccgaggccaagtccacagccgccggcgaggacgaaccggcatga

SEQ ID NO: 323908 - DNA, 528 bp, Pseudomonas aeruginosa
atgagcgacccgaaccgcgaaccgcgctacttccgtcgtctggaacagccagccttcatgcggctggaacacgcggcctctctaaaaggccttttaaagccttttaaaggtaaaggggacttcgaggcctgggccagccagtgcttcgccatgcgcgacgagttgattgccctggcgcagcgacaggtgctgccacaggcgtgcgggcatcccttccacctgcttcccgtcgagctggcccagcagaccactggcgcaggcacgacctttcttcgctggcgcaagcacgatcgatcggccatgggcgtggcgttgtggcaggagctgatggcgagccccagcacgccggtcaacctgctgcacgacctgcacgagatcgaactgcagcgcgtcatgctgaacatgcagatcagcctgctgcacaccctgggcaggcaagcacaggaatgcgccagcaaggccgcgcaggcggacaacacctacctgcgccggctcgcgtccgttcctgccgcagtgcgcgatcggtga

SEQ ID NO: 323909 - DNA, 441 bp, Pseudomonas aeruginosa
atgagcacacaattcatcggcgagggcaacatcggatcgcctcccgagtaccgcgaattccccaatggcaacgacgatcctcgccggttgctccggctgaacgtgtacttcgacaaccccgtccccaccaagggcggcgagttcgaggaccgcggcggcttctgggcgccggtggaactctggcaccacgacgccgaccgctggcagcagctctaccagaagggcatgcgggtgctggtcgtcggccgcatggagcgcgacccctggacggacaacgaagatcagccgcgtgagacttggcaggtcaacgcgcgcagtgtcggcatcctgccgtaccgcatcgagtctgtggccctcagcccgaagccacaggaggcagagccgaagccccaggccacccaggaatcgacggcgccgaaagagaccaagcgcaggaagtga

SEQ ID NO: 323910 - DNA, 2031 bp, Pseudomonas aeruginosa
atgcggctgttcttgtgcgagaagccctcccagggcaaagacattggccggattctcggcgccacgcagcgcggtgaaggctgcctcaacggttccggcgtcacggtcacctggtgcatcggccatctcgtggaggcggcgccgcccgaggcctacgacgagcagctcaaacgatggtccgttgagcagttgcccatcattccccagcactggcgggtcgaggtcaaaccgaagaccgccacgcaattcaaggtcgtcaaggcgctcttggcgaaggcgactcacctggttatcgccaccgatgccgaccgcgagggcgaattgatcgcccgcgagatcgtggagctttgcggctaccgcggccccatcgaacgcctgtggctgtcggcgctcaacgatgcgtccattcgggcggcactgggcaagctgcggccttcggccgagacgctttcgatgtaccactcggcgctggcgcgctcccgtgcggattggctcgtgggcatgaacctgagccggctgttcacggtgctggggcgacaggcgggttacgacggcgtgctgtcggtcggccgcgtacagaccccgacgctcaagctcgttgtggaccgcgaccgcgagatcgcgcgcttcgtgtccgtaccatactgggccatcgccgtgtccctgttcgcaggcggttcgactttcgccgcgcaatgggttccacccgatgcgtgcaccgacgacgcaggccgctgcctgcggcagccggtcgcacagcagaccatgcagcagatccgcgctgcgggcagtgcccacgtcgtgtcggtggagactgagcgtgtccgcgaaggcccgccgctgccgttcgacctgggcaccttgcaggaagtgtgttccaagcagcttgggctggacgtgcaggaaaccttggagattgcccaagccctgtacgagacgcacaaggccacgacgtacccccgctcggactccggctacctgcccgaaagcatgtttgccgaagtgcccaccgttctcgacagcctgctcaagaccgatccctcgctgcgctcgatcatgggccagctcgaccgctcgcagcgctcgcgcgcctggaacgatggcaaggtcacggcgcaccacggcatcatcccgacgctcgaaccggcgaagctctccgccatgagcgagaaggaactggccgtgtacaggctcatccggtcgcattacctggcgcagttcctccctcaccacgagttcgaccgcactgtggccaagttttcgtgcggggggcagaacctggcggccacgggcaagcaggttgtcatcccgggttggcgccaggtgctcgccgagccgcaggccgaagacggtgatggcgagggcgatactgcggtccgcgcccaggtgctgcccgcgctgccgaaactgtatgagggcctggcatgccaggtggccgacgtcgatctcaaggcactcaagacgctgccgcccaaaccgtacacgcaaggcgagttggtcaagtccatgaaaggcgtcgccaagctggtgtccgatccccgcctgaagcagaagctcaaggatacggttggcatcggcaccgaagcgacgcgggccaacatcatcggcggcctgatcgctcgcggctacctcgtgaagaaggggcgcgccatccgcgcctcggatgcggctttcactttgatcgatgccgtgcctgcggcgattgccgaccctggcaccaccgccgtctgggaacaggcgctcgacatgatcgaggccggacagctcaccctggacgtgttcatcggcaagcaggccgcgtggatttcgcagttgattgcgcagtacggcagcgcctccctgtccatcaaggttccccaagggccggcatgcccgcagtgcggcgcacccacgcgccagcgcagcggcaagagcggcccgttctggtcgtgcagccgctacccggactgcaaaggcacgctgccagtcgaatccggcagctccaagcgcggcgcctcgcgcccgcgccgtagcggccgcaaaggctcctga

SEQ ID NO: 323911 - DNA, 636 bp, Pseudomonas aeruginosa
atggctgaaaaccacagaaatcacgaaaacgacgagttgggccgcctagatgcgagcgatgcgaaggaccgaaagattcttctgactgtgttgctgatcaacctgacgcagtccgccgccggcattgcccttggcatctgggctggctctacggcgctgatgggcgccgggttggacaacctcgccgatgcgtcggtctatgcggttagcctgtatgccgtcggtcgtgcggcaacggtcaaggtgggcgcggcccgcttgtcgggtttcttgctaatcggcctggccgcgctgctgctgttggaagtcctacgccgcttcgctggaggggaagagcctgtcggcccagccatgatggccatggccgcgctgaacgcggctttgaacctagtgtgcctcagactactgcgccgccatcgcggggaagatgtgaacttcaaggcgtcagcgatctttaccagcaacgactccatcgtcaatggtgcgattgtgctgtccggggtgctggtgatggggttcgggtcgaacatcccggatctggtgctgggcgtcatcgtggccgcaatcgcagcgaatggggggcgggaaatcctgcgcgaagcatcggaaacagctcgccgtaaggcgggcacataa

SEQ ID NO: 323912 - DNA, 399 bp, Pseudomonas aeruginosa
atgatgcggatcggtgaactgggcaagaaggcagattgcttggtgcagaccgtgcgcttttacgagtcagaaggcttgctgcccgagcctgcacgtagcgagggcaacttcaggctctatgacgaagtccatttgcagcgcttgctgttcatccgccgctgccgggcgaaggacatgacgctggatgagatccgtcaactgctgaacttacgggatcggccagagttgggctgcggcgaggtgaacgcgctggtcgacgctcatatcgcgcaagtgcggaccaagatgaaggaattgcgcgccttggagcgcgagttaatggatctgcgacgctcctgcgatagcgcccgaacctcgcgcgagtgcggcattctcaacagcttggccgagcccgcctga

SEQ ID NO: 323913 - DNA, 2955 bp, Pseudomonas aeruginosa
atgatggcatccggggaaaaccttgtcaatgaagagcgatctatgaacaaagaaccttccagcccatgcgcctgctccggcggcaatggccaacagacggcgtgcgccagtgagcaggccagcactgaaaccaccgttttccacgtgagcaacatggattgccgcaatgaggaagcactggtgcggcgaacgctggagggcatgcccggtgtcgagcggctcctgttcgatcttccgcagcgtttgttgaccatttcgcaccgcgaagtctcggccgatgccttggagcaagcgctgaattcggtgggcatgaaggctcaggctgtccgagacgccgccgtgtcgaccacctaccgcatcgagaacatggactgcccgagcgaggagaaactcatccgctcgcacctcggggcagtcgagggaattcaggacctcgacttcgacctcgctgagcgcaccctgtcggtgaaacacctcgctcaggcacgcgcgcagatggagcaggtcctggcctcgatcggcatgcgcgccaaggagcagaccttcggccacacggggccgatcgaagccgcggctgtgatcccatcctcggccctgcagcagcaaccaaccgctgccgtttccgcgccgccgatcggcgagcgggtgacgtaccggatcgagaacatggattgcccgacggaagaagcgctgatccgcgaccggctgggcaagctgccgggtgtgaccgcgctcgacttcaatctgatgcagcgtgtgctgggagtccagcacacgctggcgacctcagcgccgatcgagaaggcgcttgcttccattggaatgcaggctgcgcggcaggacatgcagacagccaccacggtacttcgcatcgcgaagatggactgtccgaccgaggaaagtctgatccgcggcaagctgcaaggcatgccgggcgtgcagggaatggatttcaacctgatgcagcgcacgctcacggttcggcacacacccgacgcgatcaagccggcagtcgaagccatcgaatcgctgggcatggaagccgaggtccagaggactgatgagccgcgcgatgccccggtggccgcgcacaagaccaattggtggccgatggcggtttcgggcgttgcggcggtggccgccgaaggcgtgtactgggtcaacgacggcaatcattgggccgtgatcgtgctggcactggtttcgatcttcaccggcggcctcagcacctacaagaagggctggatcgcgctgaagaacctcaacctgaacatgaacgccctgatggccatcgcggtcaccggcggcatggcgatcggccactggccggaggccgccatggtcatgttcctgttcgcgttggcggaagtgatcgaggcgaagtcgctggaccgcgcccgcaacgccattcgggggctgatggacttggcgcccgagaccgcgaccgtgcggcaggccgatggctcatggacagagctgccggccaaggaggtcgcaaagggcgcggtggtccgcgtgcgtcctggcgagcgcatcgcactggacggcctgatcacctcgggtcgatcggccatcaaccaggcgcccatcaccggcgagagcctgcccgtcgagaaggccgaaggtgaccaggtcttcgccggaaccatcaatgagaccggctctttcgaatacaaggtgaccgcaggcgccagcgactcgacgctcgcgcgcatcatccatgccgtggagtccgcgcagggcagccgtgcgcccacgcagcgcttcgtcgaccagttcgcccgcgtctacacgccggcggtgttcgcggtgtccgtgctggttgccgtcgtgccgccgctcgccttcggcggcgcatggtttgactgggtctacaaggccctggtactgctggtgatcgcctgcccctgcgctctggtcatctccacgccggtcaccatcgtcagcggcttggccgctgccgcccgacgcggcatcctgatcaagggtggcgtctacctggagggcgggcgcaagctcaaggcgttggccctggacaagaccggcacactcacacatggcaagcccgagcagaccgacttcgtgccgctgatcggcgaggcgcaggaagttgccgcctgggccgcaagcctcgcggcacgctcggaccatcctgtgtctcaggccatcgcccgcaaggcgaaccgtgacggcatcgcgctgcacgaggtcgacgacttcgcggcgctgcctggccgcggcgtgcgcggccgcgtcgccgggcgcatgttgcacatgggcaaccacaggctcgcccaggagctgggcctgagcgaagcgacgctccaggctcggctggagaccctggagcgccaaggcaagacagcgatcctgctgatggacgatgcgaccgtgctcggcatttttgcagtggccgacaccgtgaaggaaaccagccgtgaggcggtggccgacctgcaggcgctgggtgtgcgcacgctgatgctgacgggggacaaccagcacacggccgcggccatcgctgcccaggtcggaatctctgaagcccgtggtgaccaactgcccgaagacaagctcaagaccatcgaaagcctggtcggcggcgagggccaggtgggcatggtgggcgacggcatcaacgattcgcccgcgctcgcccgtgccgacatcggcttcgccatgggcgcggccggcaccgacaccgcgatcgaaacagccgacgtcgccctgatggacgacgacctgcgcaagatccccgccttcatccggctgtcgcgtagcactgcggcgatcctcacgcagaacatcgttctggcccttggcatcaaggcggtgttccttgcgttgacgttcacagggcatgccaccatgtggatggctgtgttcgctgacatgggggcaagtcttttggttgtcgtcaatgggctgcgcctcctgaagttcaaggcggcatga

SEQ ID NO: 323914 - DNA, 501 bp, Pseudomonas aeruginosa
atggatgaaccatctcttcgcaagacgcagtggtactcactcgcgatcgttatattcgccggcgatcaggcagctaagagctacattgacgcgacaactcccttgggttggtcgcacgaggtggcgtcattcttcaacctagttcacgctctcaatcccggcgcggcgttcagcttccttgctggcgcgggcggctggcagcggtggttttttctggcgatcgcgttcgcaatatcggcatggctcgcatggctgctctcccggccgctgcgcaaaacggaaggcctttcgtacagcctcattctgggcggcgcattgggcaacgcgttcgaccgcgccacgcgcgggcacgttatcgactacatcgactttcacctgcacggctggcactggcccgccttcaacatcgctgacatggccatcgtgggcggggcgatcgcgctggtggcccagtcgttcatgagcgtggagaacccggccgccacaaaggagtcccagtga

SEQ ID NO: 323915 - DNA, 213 bp, Pseudomonas aeruginosa
atgtcccagcaagcctctttcggccagttggccttgatccattgcggcaagttcctgccgctcgaaatcctgcatagcgccgccggccactacatcggcacgcgcgatacagaaggtcccgtttcgcgggaatcctgccagtacttccgcagctatgccgcggctcaacgtgccctcgaaagaggcggctggtcccagctcgccacaccctga

SEQ ID NO: 323916 - DNA, 393 bp, Pseudomonas aeruginosa
atgaaccagcttttgccccaggaagtcgtcgatcagatcatgcgggaagagcagcatttcgccgccgcgccccaagccttcttcgaggtctggaagcgcggcgtcgagatcgcaggcccgcaatggtttggcgacggcacgcgcgaaggcctgaaccaggcaaagagcaagtgggatctgcgtcccgacatgctgcgtgccaacgacgcactcggcgtcctgagcagcggggaacgcatgttcctgtccgccatgttcagcttctacaacgcgcgcgagggcggtgccatgctcaagcgctgccacttccaaggactgtcggacttcgatggtctcgatctgcaacgccgcaaggtcatcgccgatctgttggtgaactacagcggttggtga

SEQ ID NO: 323917 - DNA, 738 bp, Pseudomonas aeruginosa
atgacccagaatcccaatccctttgtacgcggctactggaatctgagagtcgtccgaacgctgtgcatctgctacggggacggaagcccgcatgtctggcgatccatccacacgagccaagcgcatctttccgacaacgacctgatctcatcgccttgcatcgtcaccagcgacttcgcgttgatcaaaagcggcactgacgccatcagcgacgagctgattgctgaatgtgatgctgttgaaggcatcaacggcgaaggcgtggtgggcgccgtggtctatgccatccatggcgacgacctcgacggccgcccggtccatgtcggtgatacctattcggccgaagccgcgcgagacgtggtgcagcggttgagtttcgagaccggctattacagccggtgctgggaagtcagcagcgcgcacatctgccaggaaaccggccagtacctcgccaacctggcagacctcgccacgccggaggcttttctgttcatcgcctttcgggttccgtacagcccggcgattggcgtcaagctgatctccacgccctggacagacaagaacctggaatatgccgagggcatcagtgctgagcagcttcgacaggagcaccgcgacaagggcatgcctgacgacctggcgaacatccttgaactggccggccaggcagatgtgcgcatcctcatcctcgatgccgacgcacccgcgctactgggcttgccactggccgagacctag

SEQ ID NO: 323918 - DNA, 279 bp, Pseudomonas aeruginosa
atgttccccgatctcatcttgcccacgcccgacttcgagaatcagcttggagcctgcgtcaacgccatgagccaggacgacgccatcggccagatcctggtgttcgagcgcatgagcggtacgctgcacatgcgccatatcgacagcgccgatctggtggacaccgacattgacgactacgaaatggtcgtattcgacggtggcaacacaagcggcgacacgtggaagcacgtgttcttcccgcgtcagcgagaacactacttcgtgtacgaagcctga

SEQ ID NO: 323919 - DNA, 813 bp, Pseudomonas aeruginosa
atggaccgttccctcatcaaatccatgatgccttcgctagtcgcaggccacgtgccccgcaacgtgcggtcgttcaagtaccgcgtgttcgacgatcagccgcaatcttcgacattgggcttcgccgtcgacccccagcccttcgacgggaaggtagtcgccatcaccgacgatgccatcgtcgtcaagctcaagccgagcgagttcgctgtgctcgattccaagctggtgaccaccgtccccgacgaaggcgccaaggtgcatgtccaaccctacgcacggcgccgtttcgatgggctgcgggcggacacgccggaagagcgcaccgagatgacgtccgacggcattccctacaccgtcaagacgcacatcctcggctccgcgccggccaagctgcccattcccgagccgcagtgcatggagctgggtcagctcatccagcagttggaggaaatgccggcgcccgatggcttccggcgcatcacccacatgctggtcgatgcgggtgcccgggatttcacctgggtcgatccgacgccgtccaagatcatcgagacgcctccggcgatcagcttcacggtctcgaccgcgaagttcgagggccgggtgacggtgctgtacgaccgaggcggcgacacctacgtggtggagctgcatcgcgacggcgaattggtcgatcggcatgacgaggtgtatttcgacatgctcggcgaagtgctggagcgactcatcgacgacggacgttggcgcctgatcgatgtgagcgtgatcgacgccaaggctacccggcagcgccaggcggtgccggcatga

SEQ ID NO: 323920 - DNA, 354 bp, Pseudomonas aeruginosa
atgtcactgcgattcaaaggctccgacctgcgccccgtgctgaccgaggccatcgccagccaatgccgcgtcatcctggtcaaggaccagggcgtgtacttcctcgccgagcagggagagcgccgcccggatgggcgtgtgaagctgctggcctatgccgtcggctgcaacccggataccgacccgttcgacgactggtgggaactggcgcgcgccgaactgggcggcgacgacttcggggagtacttcgacccgaaggacggcgtattcacgcgcatcctgcacaccgaagacgacctgatgctgtcggccaccgccacacatctgtcgctggaggtggtgcctcccgcatag

SEQ ID NO: 323921 - DNA, 930 bp, Pseudomonas aeruginosa
atgaacaccacttccaacgagaaatcgtatttcgacctccacacctcgggcatcggctacctccagcgtgtccgtgaggtgcccgtcaggggcggccgccgtgcgcagcccttcctggcctgcaccatcgccgcgctggtcggccccgccagggacccgagctaccgctacttcgacgtcaaggtctcgggtgccgaggccaagaagctcgttcagcgctacatcggcgttgacgattccaagcagcgaccgctggtgcgctttcgcctcggcgacctctggggcgatgcctacatccgcgacaagggcgaacagaaaggccaggccgccgcatccctcaaggcgcgactgctcaaggccgagctgatcgagcgggccgaactggcttcgatcgagcagcacgagttgatcacccgtggcatcggctacctcaaccgtccgaaggacgtcacccccaaggatggtgacccgttcctgtcgtgctccatcgccgcgctggccggacctgtcgatgaaccggaatatcggtacttcgacacgatcgtcgccacccctgaagccgagcatctggttcgccgatgcgtgcaggccatcgagggggatcgcaaggtgctgatcgcctttcgtctgaacgacatgaagatcgatccgtacatccgcaccaagggcgagcacgctggggaaccggccgcaagcctggaatcgacgctggtccacatcggtctgatcaagatcgacggcacccaggtctatccgacgagccaggcgcatgccgaggcagcgccagcggaggacgcacccgcgtccgaagccgccaacgccatcgacactgccgccgacgccgtttcctaccaatctgccgagcccgccgagcgcgagcccgaatgtgcagtcgaggagcaggagccggcattggctgcttcgttctga

SEQ ID NO: 323922 - DNA, 690 bp, Pseudomonas aeruginosa
atggcagccacatcggcacctacgagatcagccctacccatcgtcgtcccgggccagctcacgttgcggaccatccggggcaagaacggcccgttcacggtcgggcgcctttctacccccatcggcgagttcgcggttaaagacgcggagttggagcagtaccccgaaggaaagtacgacggggatttcgtcattcgctacatcttcgcgaagtcctatccggtcgcgggcggcgcgcggtttgaagtgcgcgcaaacctcgacggcatgacgctcaacggcatcgacaaactgagtcgtgatgaggcccgcagcttcgccacccaggaagtcgatccactcgatgaagagctggggacgcagcctgcggaaacgccggccaagcccgccaaggcctccagacccgccaagcccgcacccgtgcaggcctcggcggacccgctggtcgataccacgcccttcggtgtggatgcaccgacgcccgctgcggcggctgcccctggcagcaccgaagagggcgacgttgctttgttcggcttgctctggccgctgggcgattccgtgaaattggattcgaccatcgaccgccgcgccctgcgcgcgcagatcgcccgcctgggcgatctgggctacgcgctggacttcaaaacgcaggagtggagccgccaggccgaactgcaacctgcgtga

SEQ ID NO: 323923 - DNA, 327 bp, Pseudomonas aeruginosa
atgtccaccatcgattgcgatacaccccgttcttcgctgggtgaacccgcgtggcgagctgtttgcaagacagccgccgagcacgcccagcgtggttgtggcctgtcctgggaccactgggtcacgcttttcagttcggagatcgacgcgcaagccagtcgattgccggaagagcaacgcgcacaggcgctgcagatcgcacaggaatggggctacgccacaccggccgaaaggcaggaaacccaggactggaacgccgaaaacggctactgctcgcacggaatcgaactgggttattgcccgtccggttgcgattcggactattga

SEQ ID NO: 323924 - DNA, 342 bp, Pseudomonas aeruginosa
atgagtcggcactacttcgacaccgttcacaagggctttcccatcaccgtcgtactgggctgggaccggccggcaaattacttcttcctattcatcgaaaagccggccgagctgatcgacgataccgcgaaggtcgagagcgacgacttcttgtacagcaacctgcacgagagcgacccgttcaaccactacctggactactaccgagtggtcctgcgccatttccacatcgacgtgcccgaaagcatgttcaccgaagtccaacaggactgcgagggcaacattggcaaccgtgtagtcaagcatcaggccgacggctcgttcaccgaacagacgttctga

SEQ ID NO: 323925 - DNA, 651 bp, Pseudomonas aeruginosa
atgcacgcacacacttcatccaccacgctgttccacatcgacgaatgcccggacgttatggccgacgcttgcgtcggcgatgaccagggcaacctgatcttcctgtccatctgggcgcgcgacaccgccgtccagcagttccttgcccgcctgaccctcgggcgcgacgagcagggactggaccagttccacatcatcaccgacgagggcggcagcgtcccggtgttcatcggcaacgtcgatcgtctggagaagcgcatcacgcgcgcttaccgacgcacgctgttcggttcgctgtccaacgtgtggctgttcgaccggcgctgcgtcaagcccgatagggccaacgccagcgcattggcactgctgccacgcgacagcgcccaccggctcgaccgcttgtggacgttggtgcgggatacctgcccgttaccgctactcgaccactggcgcgagaccgtgctggaactgctgcaaagccgcgagatgctggcccgccttccgttcgccctcgggccgctggaaggccatcggctcgccatcgacgtgccggcgctgagcttggcgctgggctccctgatccgcagtgacgcgctcaccgcctatccctatccggccaagatttggacgccggaagcggtagcggcttga

SEQ ID NO: 323926 - DNA, 1110 bp, Pseudomonas aeruginosa
atggctctcatgttcccgcggctcgcccgcaatttcgccaaaaatgggtactacccgaccgacgaacccacgctcgaaagagccctcaacgcactgatgcccagcgacgggccgatgtgcatcctcgatccctgcgccggtgaaggcgtggcaatcgccgaagcctctcatgccctcgggcgcgaacaggccaaggcgttcgccgtcgaattcgacgccgagcgggcgcgccatgcccgcggcctggtcgatcactgcctgcacgcggacctgatggacacgatgatctccaagcagtccttcggactactgtggctgaatccaccgtatggcgacctgtccaaggacgtcaacggcaacatcggctatcagggccagggccgtgcccgcctcgaaaagctgttctatcagcgttcgctgtcgctgttgcaatacggcggcgtgctggtcttcatcgtccccggctacgtgctcgacgcggagctggtcggctggttgacgcgccactacaccgatctgcgtatctaccgagcggtggaaacgcagttcaagcaggtggtgatcttcggccgccgggtccgtcagcgggagctggcacccgatggcgtcaaggccgtgcgcaatctgctgctgcaggttgggcttggcgaagtcgaagccgaggaactgccgagcgaatggccgttcctgccgtacatcgtccccgccagtccggccgagccggagcatttcttccgcgtgacgatggagcccgaacagttcgccgacgaggttggccggctgcaaggcctttggccgtcgctggacacgcacttggggaccgcgcagcagtcgctgcgtccaccggcgcgggccttgtcccactggcatctcgccctggctctggccgcgggcgcgatctccggcgtcgtgcgctcccagacggggcgcgtgctcgtcgtcaaaggtgacacccacaaggacaagacgctccagcgggaattcaccgaacgcgaagacggctccatcgccgagacacgcatcctcaccgacaagttcgtgcctgtcatccgcgcgtgggacatgacgcctggctccccgacacggggcgaggtgttgaccattcgctga

SEQ ID NO: 323927 - DNA, 321 bp, Pseudomonas aeruginosa
atgatccccaatccgttcaagcggcctgcgccgcacaagcaaccgttgttcacaccgagtacgttgaagttgagcgagaaggtgcattggctggcccggcgaggcctgattgaccccttggcctatgtccagcgccatgtgcgcggggactggggcgagatcgatgaggccacccgccaagcgaacgacgtggcgatccaacaggacaacctgatgatttcgcagttcaggatcacgccggacctggcgctgatcgtcaagaccagcgaagaccaccagaccacggtggtccagcttcccgaagagcgggacctgatctga

SEQ ID NO: 323928 - DNA, 228 bp, Pseudomonas aeruginosa
atggcatcgcatcgtatcgaaacctactgccacaggctgacgttccccattggggcgctcatcttcagcagaggtatcaaccgcctgttcaacgcgggtcgcctggacccgattccgtacttcagacggcacgcccgcggcgactggggcgacgtcaccgcccagcaatgggggaggccaacagctctgcgcttcaatcaggcgcgccgctggaatcgcactacgtga

SEQ ID NO: 323929 - DNA, 2280 bp, Pseudomonas aeruginosa
atgtccctcgatctcgaaaccactgccgctgaagccacgcccgtgcagggcgaactgctggacgcggaatccaaccctctgaccctgagccttcaggatttcgtcggcgagttcggcgacgaactgctcgacgccctcaacagcgccaacccgccggtctataccggccaaccgcaggcgcaccggcaactcgtcgtcgccagcctcaagcgcaagctgttcccagcacaggccgaagtcgtccacgccgccgccgagctgctgatcgaccgtggcgaacgcgccgcgatcgtcaatggcgagatgggctgcggtaagacgaccgtcggcatcgccgcggccgccgtgctcaacgccgaaggctaccgccgcactctggtcctgtcgccaccgcacctggtttacaagtggcggcgggagatccaggagacggtggccggcgccaaggtatgggtgctcaatgggccggatacgctcgtcaaactcatcaagctgcgtgagcagttgggtgtgcagcccacgggccaggagttcttcgtcctggggcgcgtcaggatgcggatgggtttccactggaagcctgtcttcaccacgcgacgcacccgccacggcgacgtggcggcttgcccggactgcggcacggttatcaccgacctcgacggcgagccggtcaacccggtcgctctccaagccgatgagtaccgcaggaagtgcagccattgcgccgcgcccctgtggacgctgatccgcccgcgcagcctgtccggcagcgatcaatcctcggccgtgctcaaagccttgaagcgcattccgacgatcggggaagtcaccgcgcagaagctgatgcagaagttcggggacgggttcctggcatcgatgctcggcgacaacatccacgagttcatcaacttgatggacggcaacggcgagctggtgttttctgaccgtcaggccacgcgcatggaacgtgcgatggccaacatggagttcggcttcggcgagggcggctaccaaccgtccgagttcatcaagaggtacctgccgcaaggcacgttcgacctgctgatcgccgacgaggcccatgagtacaagaacggcggcagtgcccaaggccaggccatgggcgtgctggcggcgaaggctcgcaagaccttgctgctgactggcacgctgatgggcggctatggggacgacctgttctatctgctgttccgagccctgcctgggcggatgatcgaagacggctaccgcccgaccacgagcggcagcatgacctcggctgcgatggcgttcatgcgcgatcacggggtcttgaaggacatctactccgagagcaccggcacggcgcacaagacggccaagggcaccaaggtatcggtgcgcacggtcaaggccccgggcttcggccccaagggcgtcttgcgctgcatcctgccgttcacgatcttcctcaagctcaaggacatcggcggcaacgtcctgccgccttatgacgaggagttccgtgaagtcgcgatggacacggcacaagccgcggcctaccgcgatctggcgggtcggctgaccgccgagctgaaacaggctctggcgcgacgcgatacgaccttgctgggcgtggttctcaacgtgctgctggcctggccggattgctgcttccggtcggagaccgtggtgcatccgcgcacgcgcaacaccttggcgttcgtcccggctcagttcaacgagttcgaggtgacaccgaaagagcgcgagctgatcgacatctgcaaagaggagaaggcacagggtcgcaaggtcctggcctacacggtctataccggcacgcgcgacaccacgtcgcgcctgaaggtgctgctggagcaggagggcttcaaagtggcggtgctgcgcgcgagcgtggacgccagccgccgcgaagactggatcgccgagcaactggaccgtggcatcgacgtgctcatcactaaccccgagctggtcaagacggggctggacctgttggagttcccgacgatcgtgttcatgcagtcgggctacaacgtgtactcgctccagcaggcggcacgccgctcctggcgcatcgggcaaaagcagcccgtgcgcgtgatctaccttggctatgccggttcttcgcagatgacctgcctggagctgatggccaagaagatcatggtctcgcagtccacctcgggcgacgtgcctgaatccgggctcgatgttctgaaccaggatggtgattccgtcgaggtcgcactggcccggcaattggtcgccgcctga

SEQ ID NO: 323930 - DNA, 738 bp, Pseudomonas aeruginosa
atgagaaaggccgtcgtgtctgaagcccgcctcgacctgccaaacatcgacgcggcgctgttccagcaaccagacgccgaacacctgttcgcgccggcacggaccacccacgcgccgcgcttcctgctgctctacggctcgctgcgcgaacgctcgttcagccgcctcgcagccgaagaagccgcccgcatcctgcgggcgctgggcggtgaaacccgattgttcaatccgtccggcctgccgctggtggacgatgcacccgctgatcaccccaaggtcaaggaactgcacgaactggtgcaatgggccgaaggcatggtgtggagttcgccggagcgccacggcgcgatgaccggcctgatgaagacgcagatcgactggattccgctgtcggtcggcgcggtgcgcccgacccagggcaagacgctggcggtgatgcaggtgtcgggcggctcgcagtccttcaacgcggtcaaccagatgcgcgtgctcggccgctggatgcggatgctgaccatcccgaaccagtcctcggtcgccaaggcataccaggagttcgacgaggtcgggcgcatgaagccctcggcctattacgaccgcatcgtggacgtgatggaagaactgatgaagttcacgctgctcacgcgcgacgcggtcccgtatctggtggatcggtacagcgagcgcaaagagggcgctgaatcactgtccaagcgtgtacggcaaggtgcaatttga

SEQ ID NO: 323931 - DNA, 423 bp, Pseudomonas aeruginosa
atgagcaccatcacgatctaccacaacccagcctgcggcacatcgcgcaacgtgctgggcctgatccgcaacagcggcgaggaaccgaccatcatcgagtacctgaagacgccgcccggccgcgacacgctccaggcgctgatcgcggcgatgggcgtgccggtgcgggacatactgcgcgagaaaggtacgccctatgccgaactcgacctgggcaacccgaagtggagcgacgacgacctgatcggtttcatgctccagcatcccattctcatcaaccggccgatcgtggtcacgccgctgggtgtgcgcctgtgccggccatcggaagccgtgctcgaccttctgccgcaaccgcagcgcggcgcgttcaacaaggaagacggcgagccgctggttgatgagaaaggccgtcgtgtctga

SEQ ID NO: 323932 - DNA, 1077 bp, Pseudomonas aeruginosa
atgagcgcaaccgataccgccggccccgcgccagcaaactccgccatgagcggctttgagcgttacctgacgctatgggtggcggtgtgcatcatcgcgggtatcgctctgggccagttcgcgcccgccgcattccaggccatcggccgcatggagatcgctcaagtcaacctgccggtgggcttgctgatctgggtgatgatcatccctatgctgctgaaggtggacttcgccgcgctcggccaggtgcgccagcattggcgaggcatggggatcacgctgttcatcaattgggccgtcaagccgttctcaatggcacttctggcgtggatcttcatccgccacgcttttgctgattggctgcccgccgaccaactcgacagctacatcgccggcctgatcctgctggctgccgcaccgtgcaccgcaatggttttcgtttggagccgactgactggcggcgatccggcatttacgctgtcgcaagtggccttgaacgacaccatcatggtgctcgccttcgcacccatcgtcggcctgctgctgggcctgtcctcgatcacggtgccttgggacaccttgctggtgtcggtgggtttgtacatcgtcattccggtcatcctggcccagctttggcgccgggcgctgctgcgcaagggacaggccgcgttcgacagggcactggaacgcatcggcccgttgtccatcgccgcgctgttgctgacgctggtgctgctgttcgccttccaaggcgaggccatcatccggcagccgctggtgatcgccatgctcgcggtgccgatcctgatccaggtgttcttcaattccgggctggcgtactggctcaaccgccaggcgggcgaaaagcactgcgtcgctgggccatccgcgttgattggtgccagcaacttcttcgagctggccgtggccgccgccatcagcctattcggcttccattccggtgcggcactcgcaacagtggtcggcgtgctcatcgaggtgccggtcatgctgctggtggtgcgggtggtcaaccgctcacgcggctggtacgaacgccgcgcgaccacttcgtaa

SEQ ID NO: 323933 - DNA, 531 bp, Pseudomonas aeruginosa
atgcgaggtttctccatccaagacctgctgctgaccatgaccgataccacttacaacgccttgttcatctgtacgggcaattcggcccgctccatcctcgccgaaggcatcctcaacgacatgggccaggggcggtttcacgcctggtcggcaggtagccatccgaaaggcgaagttcacccgctggcgctcgccacgctggagcggctgcaccttccgacaacgggctaccgcagcaagagctgggacgagttcgtgaagcccgatgcgccggtgttcgatttcatcttcaccgtctgcgacaacgcagccggcgaggcttgtcctctatggccgggcaagccggtgtcggcgcattggggcgtgcctgacccggctgccgtggaaggctccttggaacgacaaagcaaggcgttcttcgataccgccatgacgctgcgccgacgcatcgagttgttcctgtcgctgccgatcaagagtctagatgccatgtcgttgcagcgcgaactgcgcgacatcggccgccagtga

SEQ ID NO: 323934 - DNA, 321 bp, Pseudomonas aeruginosa
atgcaagaagatcaagccatttccgccttaaacgccctggctcacacccagcgcctgcgcgtgttccgcgccttggtcgttgctggcccgggcggactgacgccaagcacgctagccgaccagctcgacgtggcccgcaacaccttgtccttccacttgaaggagctggcccatgccggcctcgtcaccatcgagcagcagggtcgcaacctgatctatcgggccgagtacggccacatgaacggcctcatcggctacctgaccgagcattgctgccaaggtggcgtatgcgaggtttctccatccaagacctgctgctga

SEQ ID NO: 323935 - DNA, 579 bp, Pseudomonas aeruginosa
atgcccgcaatccatgtatcccggcacttggtcggcgccggcctcctggccgcagccctgcccagtggctgcgcgaccaccacggcgccgctcgcacccgatgccatcgaggaagtctcggccgcgcccgaacccgaggcgcccgagtacatcccggtcgtgcgctacggccgctacacgctggtcgagttggcacccacggcagcgcagcgcgacctgctgttgcagaccatcgacgtgtccatgcccgaggatgcccgcgccacggtcggcgacgggatgcggcatgtgctcaagcgcagcggctacggcctttgcgagaccgcgcatgccgtgatcgaactgtacgcgctgccgctgccggcggcacatctgcatctcggccccatgaccttgcgccatgcgctgctcacgctggctgggccgtcctgggaactgcacgcggatgaccgcgcacggcaaatctgcttcgatcggcccggcgaccgtgcagtcgccgagtccccatccgggccactcgccaccgagacggtgcagacgttcccgctggcgcctgcggtttcgggaggccagccatga

SEQ ID NO: 323936 - DNA, 645 bp, Pseudomonas aeruginosa
atgaatgcctcgcatcccgcccaacgctcaaccgcggcggttgtcatacagagcctgttctggctttggctgatcggcctcagtgtcatcgtggcgctgggctacctggcgatgcgcgatcaaaccgaccaggatcggctggattcccgcctgcagcgcctggaagcgcaggcgactggcctggccgagaccatcgaggccatccagcagcgcccagccgtcgcaacggccgctgacctcaaggacacccgccaagtcctggaagcacgcgctgcccaggtcgagaagtcgctgagcggctatgccgccgctgatgaccttcaggcgctacgcgccgaaatcgagcagatcaagacgcgccagaccgccgcgcgtgccgcagcccccgcccagccgcgcgcatcacgcccggccgccgcctccaaggccgaaccgccgccgctgccgttccgcgtcgtcggcgccgaactgcgcgctggccagcgcagcgtgtccgtcgcgccgagcaccggggacttcatgcccgcccaacttcaggtgctgctgcccggggatgcggtcggcccgtggcgcctgcaggcgatcgagggcaacaccgcagtgttccaggccggcaaccagacccgccgtgtggcgattccctga

SEQ ID NO: 323937 - DNA, 603 bp, Pseudomonas aeruginosa
atggcagcgccagccgtagctgcccccgtatcgcagttcttgcgcgcactggtgctctctgcaggcgtgtatgccagcaccccccatgcccaggaggtgccgccaccggcctaccagcttgccgcccagcgcgcgggcatcccttcgacggtgctctacgccgtggccttgcaggagagcggcatccggcgcaacgggcgcatcgtcccatggccgtggtccctcaacgtcgccggccaatcgcgccgcttcgccacgcgcgccgacgcctgcgctggcctgcagcaggcgatgcgcgcctcgccgcacacgcgcatcgacgcgggcctgggccagatcaaccttggctaccacaagcaccgcttcaccggcgcgtgcgatctgctggacccgtaccgcaacctcgccgttgccgccgagatcctgaaggagcagcacacccccggcgaggactggctgctggcgatcggccgctaccaccgccccgctggcggcgagcccgccgtccgctatcggcgcagcgtgtcccgccaccttgcccgcgtgcagggcacgcgcccaaccgccgcggtcttcgccgcgcgccaggagacctccccatga

SEQ ID NO: 323938 - DNA, 867 bp, Pseudomonas aeruginosa
atgactgcggtcgcatttctcggcctgggcacgatgggctacccgatggccgggcacctgcaacgagagggctacgacgtctgtgtctacaatcgctcgtcggccaaggcgctgcgctgggtcgaggagtacgccggacggcgcgccgatacgccgcgcgaggcctgtgctggcgccgagctggtgttctgttgcgtcggtaacgacgacgacctgcgtgccgtggcgctgggcgagcagggcgccttcgccggaatggcgccgggcagcctgttcgtcgaccacaccaccgcttcggcggaagtcgcccgcgagctgtcgctgctggctgccgagcgtgagctgggctttctcgacgcgccggtctccggcggccaggcaggcgcggtcaacggcgccctgacggtgatggtcggtggcgaggaggccttctatcgacgcgccgaaccgctgttgcgcagctatgcgcggatggtccggcgaatgggcgacgtgggtagcgggcagttgaccaagatggtcaaccagatctgcgtcgcggggctgctccagggcctggccgaggcgctgcacttcgcccggtgcgccggtctcgatggcgaggcggcgatgcaggtgatcggcaagggcgcggcccagtcctggcaactggaaaaccgccaccagagcatgctggccggagagttcgacttcggcttcgccgtggactggatgcgcaaggacctgtcgatcctgctcgccgaggcgcggcgcaacggcgcgcagttgccggtcacggcgctggtcgaccagttctacgccgaagtgcaggcgatgggcggcggtcgttgggatacctccagcctgatcgcccggctgcgttcgtga

SEQ ID NO: 323939 - DNA, 1200 bp, Pseudomonas aeruginosa
atggcaaagatcaagctcaccaagaccgccgtggaggcggcccagccccaggccaaggatattgaactgcgggataccgtggtgcctggcttcctgtgcaagattaccccgacgggccgccgggtgttcatgctccagtaccgcacgaactccggccagccccgcaagccctcgctggggctgtacggggagctgaccgtcgaacaggcacgagtcaaggcacaggactggctggccgaggttcgccggggcggcgaccccggcggcgccaaggccgaggcgcgcaaggcgcccacgatggccgagttgtgcaagaagttcatggaggactactccaagaagcgcaacaagcccagcacgcaggacggctatcagggcgtcatcgaccgcaacatcatcccgctgctgggccgcaagaaggtgcatgacgtgaagcggcccgacattgctggactgatggagaagctggcctacaagccgaccgaggcgaacaagaccttcggcgtgctgcgcaagatgttcaacctggccgaagtgtggggctaccgcccggacggcacgaatccgtgccgccacgtcccgatgtacccgccgggcaaggaaacccggctcatcgtggacgaggaaatggtgcggatcttccgccatctggagaagctggaggcggaagggctggagaactacgtcatcccgttggctatccggctgcaattcgagtttgccgcacggcgctccgaaatctgcccgctccaatggagctggctggacttcgagaaccggcgcgtggtgtggcccgacagcaaggtcggcggcatttccaagcccatgagcgaagaagcgtatcggctgctttcgacggcaccgcgtcgggagggctgcccctatgtcctgccatcgcccaatgacccgaccaaacacctgacttttggcgagcactatggcggctggtgccgggtgctcaaggccgccggcgtcccgcacgtcggcacgcacggcatccgccatcgctcgaccaccgacattgccaattcgggcgtgccgaccaaagtgggcatgaagttgacgggccacaagaccgtggcgatgttcatgcactacgtccacaccgaagacaagccggtgcgcgatgcggccgagctggtggccagccggcgccaggctatcacgggcacgcggcagcttgcggaggcggcggcatga

SEQ ID NO: 323940 - DNA, 1065 bp, Pseudomonas aeruginosa
atgaatgggcgccggtcatccgcagcatcgtccgcagcgcctttggcgctgctgggcgacattcgggtactgattgaggaggcgcgcaagcgcgccgcctcgacggtgaatagcgagctgacgatgctctactggcgcatcggccagcgcatccacacgcaggtcttggatgggcgccggggcgcttatggcaaagaagtcctgcccaccttggcggcgcagttggtgaaggaatacggcagcagctttgccgagcagaacctgcgccgcatggtgcagttcgcggccaccttccccgacgagcagattctcgtatcactgatacgagaattgagctggacgcacttcatcgccctaatgccgctgaaagacccgctccagcgggactactacgcgcagatggcgagcgccgaacgctggagcgtgcggacgctgcgcgagcgcatcgactcgatgctgtacgagcgcacggcgctgtcccaaaagccgggcgagacgatcgcgcaggaactggcgacgatgcgcgatgcgcagcgcatgtcgcccgccctggtcatgcgcgacccgtacatcctcgacttcctggggctgcgggacacttggcaggaaggcgacttggaggcggcgatcatccgcgaaatggagtcgttcttgttggagcttggcgcgggcttcagcttcgtggcccggcagaagcgcatccaaattgacggcgaggatttccatctcgacctgctgttttacaaccgcaagctacggcggctggtggcagtggagttgaaggtcggcgagttcaaggcggctttcaagggacagatggagctttacctccgctggctggacaagcacgaacgcgagccggaggaagcctcgccgctggggatcatcctttgcaccggcaagaaacgcgagcagatcgaattgctggagctggacaagtcaggcatccacgtcgccgagtacctgaccgccttgccgccgaggggcgtgctggtggagcgactgcaacaggcaacgcagcgggcgcagttgcagatcgagcagcgcaagaccgacaacgagtag

SEQ ID NO: 323941 - DNA, 393 bp, Pseudomonas aeruginosa
atgaacgacaaatcacacgtttccctcgaacagcacgtttgcctggtctgcggcacgacgttcgataccggcgcgatcctgctggacaagcgcctgcgcgcgagcctggagcgccacacggcgaccggctggggcctgtgccccgagcatcagaagctggccgacgatggctttgtcgcgctggtcgaatgcgatccgcagcgcagcggctcgcaggctggcgggcgtatgaagcccgagcaggcgtaccggacgggccggctggcccatctgcggcgcacggtgttcgcgcaggtgttcaacgtgccgatcgcggacgagcaggcttgcgtgttcgttgagcctggcgtgatcgagcacttgcagtcgatgacggcgccgacggcgggctga

SEQ ID NO: 323942 - DNA, 258 bp, Pseudomonas aeruginosa
atgaacgcgacacacaagcactcaacccatcccgatctcgtgaagcggctgaaacgtgccgatggtcatcttcggcacgtcatagggatgatcgaaagtggggaatcctgtctcgacatcgcccgccagctcgcggcggtggaaagcgcggtcacggccgcaaagcgcgtcctgatccacgaccacatcgaccattgcctagcgcatgacgaagactccgttttgaccgaaatgaaggcactgaccaaactgctttga

SEQ ID NO: 323943 - DNA, 1311 bp, Pseudomonas aeruginosa
atgctctccgtcctgaagaaccgtacctaccgtcacctgttcgccgctcaagtgattgcgcttgtcggcacgggcctgatgacggtagcccttggcctgcttgcctacgatctggccggggcgaatgccggcgcggtactcggaacggcacttgccataaaaatgcttgcctatgtcggagtcgccccggtcgcgcaggctttcgccgaccggctgccgcgacggtcgttgctcgttgcccttgacttagtacgagcatccgttgcgctctgcttgccctttgtcagcgaaatctggcaaatctatctgctgatcttcgtcttgcaagcggcgtccgcaggcttcacgccgacctttcaagccactatcccagacatccttccggacgaagacgagtacacgaaagcactgtcgctttcccggctggcctacgatttggaaagcctgatttccccgatgctggccgccgcgctactgacagtcatcagcttccacaacctgtttgccggaacggttctcggcttcctcgtgtcagccgcgctggtggtcagcgtgaggcttcccacaaccgttcccggcccgcgtcgtggcatatgggatcgcactacgcggggcacgcgcatttacctcgccacaccgcgccttcggggtctgctggcgatcagcctcgctgtggcagcagcggggtcaatggtgatcgtgaacacggtggtcatcgtgaaggcacgcttcggcctgggcgaatccgaggtggcgtgggcgctggcggccttcggaggcgggtcgatggttgcggccttcgcgctgcctcgcctgctcgacaagattgctgatcgacctgtcatgattgcgggagcgacgatgctggttgtgggaacggcagccggggcaatgattccgacctatgccgttctggtggtgatctggtttgtggtcggcttcggctacagcgtggcgcaaacaccttccggccggctgttgcgccgctccgctcatcccgaggatcgccctgcggtctttgccgcgcaattcgccctgtcccatgcgtgctggctcatttgctatcccttggccggtcgcttcggcgctgcctttgggctgcaatcgaccttcatcatcatgtcgctgattggtcttgtcggagtgggactggcgctgtggctctggcccgctagagattcttccgacatcgcccacgatcaccctgatctaccgccagatcatcctcacttgcgcgaacatgcagaccgaggcgggcaccgtcatcccatgatcgttgacgatctgcaccgggactgggcgcgcatttaa

SEQ ID NO: 323944 - DNA, 351 bp, Pseudomonas aeruginosa
atgaacaacgcactcatcaccgacgagcagcgcatcgtgctgctgaccaacggccgcgaatccttggagaacccggacttcgatccggcccccgtggtcaagctgttcacgccggacgccggcgcgacctggctactgaccgagattgatcccgatgaccacgaccacgcctttggtctttgcgacctgggcttgggggcgccggaaatcggctgggtcagcctgggcgaactggcgacggtgcgcggcgggctgggcctgccgattgagcgcgacctgtctttccgcgccgagaagcggttgagcgcctatgcgcgcgatgcgcgcttggccgggcggatcgctgtctga

SEQ ID NO: 323945 - DNA, 279 bp, Pseudomonas aeruginosa
atgagcagccatcacgaccacatcatcgaaatcacagcacagcacgatgcgctcaagccgttcgcgccggagaacggccagcccttgcgcttcaagatcggcgacgcggtgatctacgccaacgagtacggcgcacagttccggcgccgcgtcaccgggttctaccagcccaccgggctgtcgggtctgtacgcgcacggtgcgcgctacctgctggactcgtcatcgccgtggatgccggtatcggaatccagcctgcgccctgacgactcggcgtga

SEQ ID NO: 323946 - DNA, 825 bp, Pseudomonas aeruginosa
atgcaactcgcatcccgcttcgcttcccgttccccggtgctgcgttcggaacgtcccttgtccgacgaccaaatccgggccgtggccccgtccatcttcgcggacgccccgcacgaaagccgctccgagcggtacagctacatccccaccgctaccgtgctgcaagaactgcggggggaaggcttcgagcctttcatggtgacgcaaacccgcgtgcgccacgacgaccgccgcgactacaccaagcacatgatccggctgcgccacgccagccagatcaacggccgcgaggccaacgaaatcatcctgctgaactcccatgacggcactagcagctatcagatgctcgccggaatgttccggttcgtatgcagcaatggccttgtctgcggcgacaccgtggcggacgtgcgcgtaccccacaagggcgacgtagccgggcacgtcatcgaaggcgcttacgaagtcttgcacggctttgaccgggcgcaggaatcccgcgatgccatgcgcgccatcacgctcgacgccggggaatcggaagtgttcgcccgcgctgcgctggcgttgaagtacgacgaggacaagcccgcgcccatcacggaatcgcaaatcctgatgccgcgccgccatgacgacgaccgccgcgacctgtggagcgtgttcaaccgcacgcaggagaacttgaccaaaggcggcctgtccgcccgcgccgcgagtggccgccgccagaccacccggcccgtgcagggcatcgaccaaagcgtgcgcctgaatcgcgccctgtggctgctggccgatggcctgcgccagttgaaagcctga

SEQ ID NO: 323947 - DNA, 2052 bp, Pseudomonas aeruginosa
atgaacgccgtactcaaaaccgaagccgtcgccatcgaagccgccgcaccgctggaaatggccgacccgtccaagaacctgattctggttccgctctcgcagttgctgccgcgccgctccaagcgcaacgcccgcaagatgccgcgcctgtccatccccgaactggccgcgagcattgcccgcatcggcctgctgcaaaacctgatcgtcatcctttccgcagatggcgaggcttacgaggtggtggcaggcgaccgccgactgaccgccttgaagctgctggcgaagaagaagcgcatccccgccgactacgaagtgccgtgcctgctggtgcccgatgcttcggcccgtaccgtcagcctcgcggaaaacctgatgcgcgagcagatgcaccccgccgaccagttcgaggcgttcgccgcgctggtcaaggaaggccggcccatcgaggacattgccgccgacttcggcgtgtccccgctggtggtgcagcgccgcttgaagctcgcccacatcgcgccgcgcctgatggccgactaccgcgccggaaccgtcacgctggaacagttgatggccttgaccatcaccgacgaccacgccgcgcaggaagccgcgttctttggtgcgccggaatggcagcgcagcccgtccaagctgcgcgagcgcctgaccgaacgcgaaatcgacgcctcgcacgcgctggtgcgcttcgtcgggctggacacctaccggcaggcaggcggcggcgtccgccgcgacctgttcgcagaaggcgatgccggaacctacctcaccgataccgcagtgctggaaacgctggtgcgcgacaagctggcaacgctggccgaggacgtgcgcgccgaggggtgggcatgggtggaggccgtgccgcatctggcctacgaggaacggcaggcgttccagaacgccccgcgccatcgccgcgagccgaccacccgcgaagcccgccgcatcgcctcgctggaaacccgcctcgaaaagatcgacgccgaactggaagaagcctgcgacgccgaggacaaggccaaggccgagaagctggaacagcggcgcgatcaggtggtcggggaactgcaagacgcggaggatgccttgcagggctatgcccccgaggtgcgcgaggtggccggtgccatcgtcaccatcgaccgcaacggcgaggccgtcattcatcgcggcctgctgcgcgaagccgaggccaaggcgctgcgcacgctggaaaagctgcggcgcggtttcggcagtgccgaaggcgaagccgccaacgacgagcacgaggacgccgacgacgcgcccaaggccgcgagcctgtccgaccggctggcgcagcggttgagcgcccaccgcacggcggcgctgcaaatcgaagttgcacggcatccgcatgtcgcgctggccgcgctggtgcatggcatggtgcagaccgtcttgcagcccgacgcctacggcgatggcctgccgctgggcgtgcgcctcacggcgcaagaccgactggaaggcatggccccggactggccggaatcgcccgctgccgtggcgctgcgcgaactgcaacaggtggccggtgaagccttgccggaggacagcgccgaactgctcgctgtgctgctggcgaagtcgcaagacgaactggtgcggttgctggccgtgtgcgtggcttccacggtggacgtggtgacgcctcgcgccacggcgcaccagcccggcgaggaactggcgcaggccgtgggcctcgacatggccgcatggtggaagccgaccgcagaaggctacttcaagcacgtttccaaggctgtgattctggatgccgtgggcgcgtttgcaccggaatctgtcacccggctggcgaagctcaagaaggccgacattgccagcgaggccgagcggctggccgatggcacgggctggatgcccgccatcttcaaggccgcaggcccgcagaatgccgcgcaggaggcaggcccggagcaggacgccccggaggatgccgaggcaatggcggatgaaccagccgaggcgctggccgcttga

SEQ ID NO: 323948 - DNA, 210 bp, Pseudomonas aeruginosa
atgacccgcaccaccaccagccgcccgcgcatggcggcgatctacgcccccggcacggtgcgcgcccgccgctggcacggcgacggcgacgtgcgcggctaccgcccgcccttgggctggtcggcttgcgctgacctcaccgacattcatcccatcacgggccacgccttgccgcgtgccgtgtggtggctcatcgagacgaagaaataa

SEQ ID NO: 323949 - DNA, 162 bp, Pseudomonas aeruginosa
atgcctctgatgaaattggcgcggcctacgctgcagggtatgcacgcggcaagtcgaaaaccgctggtgattcccgcgcactgcgggcgcttcggcttgcaggcccatgcgggccggccattgccgggcgggaagcccggtcacgtcaacgccgccgcctga

SEQ ID NO: 323950 - DNA, 315 bp, Pseudomonas aeruginosa
atggccaacatcggcaccttcaccaccgacaaagacggcttcaccggcacgctgcgcaccctgacgctcaacgtcaaggtcaagctggttcccaacgacaagggcagcagcgagaacgcccccgacttccgcctccaggccgccggccacgacatcggcgcggcatggaacaagaccagcgaggccgggcgggaatacaagtccgtgaccctcgacgatccttcgttcccggctccggtctatgcccgcctgatcgaaggcgaggacggcacgcacgacctgatctggtcgcgcagcaagccccaggcggcgtga

SEQ ID NO: 323951 - DNA, 306 bp, Pseudomonas aeruginosa
gtggcggctaagaactcattggcgaaggcgttgaagacagtcagaaaggcgcgtggcttgagccaggaagccttttctgacgtgtccagccgtacctatatgagtaccctcgaacgcaaccttaaaagcccgaccctgcataagctggccgagctgtgcgaggtgatgaagatccacccgctcacgctgctgacgctggcctatgcgggcgacagtccgcgcaaggccgacgagctgctggcgcaagtgcgccgggagctggaggcggtggccaaggaacgcgactcggcgaagcctcgtgcgtga

SEQ ID NO: 323952 - DNA, 351 bp, Pseudomonas aeruginosa
atgccccagccactcgccaccgccccggagcgcgcgcaactgctcgccaacggcgaggcccgcgccgctggccgggccatcgacccggtgcccgtggtgcggttgttcacgccggacgcgcatgtgacttggctgctggccgcgctcgaccccgccgatggcgacaccgcatggggcctcatcgacttggggttggggatcccggcgcagggcactgtcaagctatccgatctggccggcatcgtcgggccgtgcaagcagcccgtgttacgcgacacctatttccgccctacgcgcacgctgtcggaatacacccggctggccgagcgcgatggcgcgatctcggattga

SEQ ID NO: 323953 - DNA, 762 bp, Pseudomonas aeruginosa
atggtcaatcctcatcacctcgcacactggtatccgactgccgcatacctgtatgtctttgggctggatgcgctcgcgctcgcttgggagtatctgcgcaggcatcccgactaccggctcgactggcttcgccgtcatcgccggccagacacggcgcatcgctggggcttacgcctactggaagacccggcgctcgatgcgcgcgacgcgcatccggcttggctgcccggccatgccgccgtggtgcagctctaccccgatgccgatccgtcgcaggatgcggcgaccttcgcgttctggcgcatccccggtcacaagcaactgctgcatgacggtaaagggctggcgctgatcgcgcgcagcccaggtcattgcctgcgcttcgcgttcgcgcccggcctggaagacggcatggccgtggcctatgcccaacggagcggcaccgccgcgcctgcgcgcggtcgtgcgctccacggagcactggcggccgccaagcccagaccgacacctaccgcactgctggaactgcacagcttgcaggcgctcgacgcgaccctggcgggcgcatccctgcgtgaagtcgcggaaggactgttcggcgtagatgccgcagccgattggtacagcgatggcgggctgcgctccaaggtacgccgcctggtacggcgcggtgatgcgctgatgcgcggcggctatcgccgtctagcacagcttccgccgcttgagaagggtcgttttgaggacgacgcaaaacgaccctga

SEQ ID NO: 323954 - DNA, 282 bp, Pseudomonas aeruginosa
atgcgtcccgctcccttgcggcctgccgccactgtctcgaccgctgccgcgcagccccaacgctatctcaccaacgacgaagccgccgaatacctgcgcctgtcgccgcggacgctggaaaagcagcgtgtgatcggcggcggcccgcgctttcgcaagttcggccgccgcgtcatgtacgccgtggccgacctcgacgcctgggctgccgaccgcagtttcgagacgacttccgatcccgaatacgccgaacaccactcggccgacagccgtgcgcgctaa

SEQ ID NO: 323955 - DNA, 858 bp, Pseudomonas aeruginosa
atgtccagcaccgcgctgccgtcccggcagcggccgttgcaggagcgcgaacagctcgacctgttccgcgccttgcccggcgacatggcgccgcgcgacagccaggacttgatggcctatccgttcttctcgctcggcaagtccaagcgggtcaagcccatcgacttccgtgcgggcaacgtgacgatccgcgtggaaggcacgcaggagcacggcatcgccacgatttgggatgcggacgtgctgatatgggctgcctcgcagatcgtggaggcaaaggacgcgggcctgcgcccgtcgcggctgatgcgcgccacgccctacgagatcctgcgcttcatcgggcgcggcaagtcgctgcgcgactaccagcgcctcaaggccgcgctcgaccggctgcaatcgaccacggtggccacgtccatccgcgagacgaccgggcggcgcctgcatcgcttctcgtggatcaacgaatggaaggaactggccgatgccagcggtacgccgctgggcatcgagctgatcctgccggactggttctacgcgggcgtgctcgacgccgccctggtgctgaccatcgacccggcatatttccggctcaccggcggcatcgagcggtggctgtaccgcctggtgcgcaagcacggcggcaagcaggcatacggctggcagttcgacttccgctacctgcaccagaagtccggcagcaccgccaagccctacgacttcgcctgcgacctgcgcgcgctggtcacgcggcagtcgctgcccggctacgtcctgggcatcgagcggatgccggacaacggcatggagctgctgacgttccggcccgtgccgcagacggcacggggataa

SEQ ID NO: 323956 - DNA, 639 bp, Pseudomonas aeruginosa
atgatcgtcgctctgctcaaccagaaaggcggcgtgggcaagaccacgctcgccacgcacatcgccggcgagctggcgatgcgcggccagcgcgtcgtgctgctggacgccgacccgcagggttcatcgctggactggacacagcgcagaagccagcaaggcttgccacggctgttcagcgccgtgggccttgcacgcgaaacgctgcaccaagaggcgccagaactcgccaggcgggccgatcacgtcatcatcgacggcccgccacgcatcgcggcactggcgcgctccgcgctgctggcggccgagcgcgtgctgatccccgtgcagcccagcccttacgacctgtgggccagcgccgagatggtggcgctgatccgcgaggcacaggtgtttcggcctgcgctgcgcgcggccttcgtcatcaatcggcgcatcagtaccaccgtgatcgggcgcgaagcgcgccaggcgctggccgaccaaccgcttcctgcgctgcgcgcggaagtgcatcagcgcatcgtgttcgccgacagcgtggccgctggccggcttgcacgcgagacggcgccggacagcgccgccgcgcgcgaaatcaccgcgctggtggacgaactgctgcggtggccgacatga

SEQ ID NO: 323957 - DNA, 273 bp, Pseudomonas aeruginosa
atgacagcgaagccgccacctcgcgcaaagcgcgtcggcatcggcgcgcgcccaccggcgaatccgcacgccgaggcgtggattcgccagggcgatgccgatgcacttggcaagggcgacctctacacggctcgcctgaccctcgacatcacgcccgcgatgcgggcgcgcatcaaggtttcggctttcacgcagggcgtgaccgtggctgacctgctgcgcggcctgctggagcgggagtttccagagcaccgcagggagaacaccccatga

SEQ ID NO: 323958 - DNA, 534 bp, Pseudomonas aeruginosa
atgaccgcatccgcttcgcctgccgctggcgcggccacggctgcgctcgcagcaccttccggccatccagccagcgcgccgctgacgcgcgtggcgctggcctacatcgaaccgcgcttcaagctctacctgcgcttcggcgaacctgcgcgcacgctccagctcgaccgctggcggcgctgcgcggtgttcctgccgggtgccatgttgtgccgcatccggtggcaggccaacgactacggcacgatccgctggcagctcatggtgatgcaggcttgcacgccgctcgacgcggcgcagcgcatccccggcgtgcagccgggcgcgcgcctgctgctgcacgccgagggcgagatgcaggtgcgcgccgtgctggagcgcatcgacgccatcgaggcgcagggcatcgcgcctgtcgccgcttcgcccgcgtactggcgcacgctcgccaaccggctcgctgcgcgcctgccactgcccgaatacaccgccgagcggcacgccgcctggctgaccgggagggcgctgccatga

SEQ ID NO: 323959 - DNA, 603 bp, Pseudomonas aeruginosa
atgacgcttccatccgccgttgccggtacagcagcgggcattccgccgcgtcctcgctcgcacctgcgcgctcgcctcgtgctggcgggcctgtccgcctgcggcctggctgcgctggccttggcgtccttcgtgcatccgctgccgcgcctgatctacaacccgtccgacagtgtggcggtcggctggtatcgcgtcgatccgctgggccacgataccggctcgctgccacgtcctctgtccgtgggcagcatcgttctgaccacgctgccgccagacgctgccacgctggccgcgcagcgtggctacctgccggcgcgcgtgccgctgctcaagcgcgtgggcgccgttgcaccgcaggaggtgtgcatcactggccgcgttgtccgcatcgacggcgtgccttcggccgccgtgctgcctgctgaccgctggggccggccgctgccatcctggcagcaatgccgccgcctcgaacccgctgaactgttcctcttgagtgtgaccaacccggcgtcgttcgacagccggtatttcgggccggtcagcacatccgccgtgatcggcgtcgcgcatccggtctggctggaatcccgcccatga

SEQ ID NO: 323960 - DNA, 1983 bp, Pseudomonas aeruginosa
atgaccgaccgccgcgatgacgatttccgcatccgccccagcgccccgaggaaccggggccagggcttcgtttccaaggtgctcaagcaggcaggcaaggccagcagcggcaagtccacggtgcgccgtcctggcggcagtggcaagggcgccggcaccggccagcggcccggctcacgcttgggacgcggccacacggcggcgcgcttcgccggagcgaagctcacgcccatgtcgcggcgcgtgaccatcaagacgctgctggtcaaccagcagcgggccagcccacagtcgcttgccaagcacctgcgctacatcgagcgcgatggcgtgggccgcgatggcgagccgggccaagcctacgggccgcagaccgatgccgccgatctcgacgccttcaaggaacgctgcgccgacgaccggcaccatttccgcttcatcctctcgcccgaggatggcgccgagctggacgacctgcgcacctacacgcggcacctcatgggccggatggaggccgacctgggcacgggcctcgattgggtggccgtcaaccactggaacaccgacaacccgcatacgcacatcgtcgtgcgcgggcgcgacgacaccggcaaagacctcatcatcgcgggcgactacatcgccgatgggttccgccatcgcgccgccgaactggcgaccgaatggctggggccacgcaccgagctggagatccagcagaccttgcggcgcgaggtggatcaggagcggtggacgagcctggatcgcaccttgaagcgcgaggccggcgaggatggccgggtgcagatcgaacggttcaacgaaccgcgactgcaacgtcagcgcctgctgctgatcggccggctgcaacgcttgcagcgcctaggcctggccgacgagacgcagcccggcacctgggccgtccatgccgatgccgaaaagaccctgcgcgccctgggcgagcgtagcgacatcatccgcacactacagcgcgccatgcgcggcgagccacgtgggctggcggtgttcgaaccgggagacgatggccgaaccatcatcggccgcgtggccgcgaaggggctggccgacgagttgcgcgaccggggctatctggtcatcgacggcgtggatggcaaggcccactacgtcgcgctcaacgcccgcgacgagctggcgaactatcccaccggcgcggtggtggaggtgaagggatcggccgacgtgcgcgcggccgacaaaaacatcgccgcgctggcgagcgatggcctgtaccgcaccgaccaccacctcgccattgcacaggggcaggccatgccgggccgcgatccgcaggaagtcgttgcggcccacgtccgccggctcgaagccctgcgccgggccggcatcgtggagcgcgtggccgtggggctatggaaggtgccggatgacctgcccgagcagggccgccgctacgacgcacagcgcctgggcggcgtggccgtggagctgaaatcgcacctgcccatcgagcggcaggcccgcgtgatcggggccacctggcttgaccagcaactgatcggcggcggctcgggcttgggcgatctgggctttggcggcgaggccaagcaggcgatgcagcagcgcgccgacttcctggccgaacaggggctggccgagcggcgcgggcagcgcgtgatcctggcgcgcaacctgctgggcacgctgcgcaaccgggaactgacgcaggccgcgaaggacattgccgccgacaccggcctggagcatcggcctgtgggcgacggccagcgtgtggccggtatctaccggcgcgccgtcatgctcgccagcgggcgttacgcgatgctcgacgatggcaagggattcagcctggtgccgtggcggccggtgatcgaacagcggctggggcagcagcttgccgcgacggtgcgcggcggcggggtgtcctgggagataggacggcagcgtgggcctgccgttggttag

SEQ ID NO: 323961 - DNA, 399 bp, Pseudomonas aeruginosa
ttgaccaatcacaacgtaccaacacttggcgatctggaaatcgccgtgctcgaagacatctggcgtttcggcccgtccgataccaaggcggtgtacgcgcgcattgggcagtcccgctcgatttctttgaacaccgtgcaatctacgctggaacgtctatttcgcaaggccatgctccagcgcgaaaagatcagccatgcctatgagtattcagcgcgagtttcccgccgggaattgatccagaagctggtggaatccacggtgcgtcgtgtcgcaggcccgcagccggatgcgttgctgagcgcctttgtcgatcttgctgcaagggcggatgacgaccagctcaagaggctggaggagttggttgcccgtcgtcgtgctgaattagatcagacgtga

SEQ ID NO: 323962 - DNA, 996 bp, Pseudomonas aeruginosa
atgacgagttatggcccattacttcagtttgcattgctatccggcttcgtgctggcggtaacgcttaccctgctgattggagccttcgagcgcccattgcgccgtgcgctgtggggaaaggcaccttctcagcgagcaagggtatcttggtggatgctggtaacacctgcgttggcgggtattgcctacacggccctgaccattgccatgccgtcgatgtttgatagttcggcccgatttgccgctacctgctctgcgcacgctgacgcgctcttgcatctgtgcgtttggcacccgagcggcaatgggcaaagtgcttggctatggggagcattggcattgttggcgggatacgcggcttggctggcttcacgggccgcagtgggtctttggcgtgctcggcgaacccttgcctcgatggtgcgcctaagctggcgtccggggcacccagacaaacttcgcgtgcttgatgtcgatcagcctatggcgctggcctgtggcgtcgggcatggccacatcctgctttcaacctcgttgatgcggcgacttgatccaacgcaattgcgtgtggtgttggcgcacgaacaggctcacatcgccaatcgcgatgtgctgcatcgcttgatcgctgtcgtgttgtcgagcatacagttgccaggtactcgtcgccggttgttgcgtgatctggaactcgccttggaacaacgttgtgattttgccgctgcaaacgaagtggggtgtcctgtcgccgtggccgagaccatcgttgcagtggagaagatatttcggcaacacgccaaggaacaggtgccattggcgatggcgttcttttccgattttatccctgagcgtgtcgaggcgttgctgtcgcccaagcactcgtctgtctcatacttggggccgatgctaggcattcttgttctggcgttttgcagcctatctacaggatggctgcattctgtgaccgaatctctcatcactgtgatgacgaggtaa

SEQ ID NO: 323963 - DNA, 1248 bp, Pseudomonas aeruginosa
atgaatttgatccgcttagtagtcttggtgttcgtcggagcctgcggtacgtccgcagccctagccgccgaacccctgcggttggaggaagcagtctcccgcgcgctggccgcccatccatccattaccgccgaaacggcgcaactccaggccgttcgagcccgcacgcagcgcgaagccctgccaccgccttacaccattggcggcgaggtagagaacgtcgccgggaacggcaacctgcgaggtattcgctcggccgaaacgacattgcgcatcggtcgggtcatagaactcggtggcaagcgcgaggctcgccaaacgctgggacaagccgaactgagagaacaagagcatcaggccaccaaaacgcggatcgacctggccagttcaactacggcccgcttcattgaagtgctcgctaggcaacagcgattgacgtatgccgaggagcgtatcaagcaagcggagcgcacccgtcgagaggttgcagcgtgggtaaaagccgctcgcaatcctgagtcggatttgcaggccgccgatattgcggtcgctgaggcgcagctcaatcgcgagagtgctgaactcgaattggcgagcgccaagatgactttggccgcgagctggggggcaatgacccccgacttcggcgaagtcgtcggcgacctccaaaccttgccgaccgtggcgccattcgagacgttggctacccgtttgcctatgacgccggaactgtgggcttcgcgcttgcgggccgacaccatcggcgcccggcgccggctcgcggaggccgaagccaaacccaacattgacgtcagcttgggcgtgcgacgtttggaagccttcaaggatcacggcgtggtgatgtcgatctcggtgccgttgggtagcccgacgcgctctggatacgcggtgtcccaggcaaatgcggagcttgctgcgctggaagcgcggcgtgacgccgaacgcttcgagcgccaccagaccctgttcgacaagtatcaagaactcacgcacgcgcgaacagaggctgaatcgttacgcgcacgaatgctgcctatggctgaaagcgccctgacaacaactcgtcgcggctttgagcaaggccgattctcttatttgtcgctggcccaagcgcagcggacgctgttcgatctgcgtgcgcgtgctgtcgaagccgccacccgctatcaccttctgctggtcgaggtggaacgcctcaccgccaccgttgaggacaccgcaccatga

SEQ ID NO: 323964 - DNA, 1230 bp, Pseudomonas aeruginosa
atgattcgcattctctccctgttactcctttgcgtatttgccgctgcatgcagccctggcggcgacaaacccaaagaggaggccagtgcccaagccagcggaagctatgagcgcgggccaaacaatggccgactactccgtgatggagacttcgccctggaagtcaccatctacgaaaccaatgtgcccccgcattacaggctctacgcctatcgcgacggcaagccagtcgctcccgccgatgtcgttgcgactatcaaactctcccgtttggatggcgaggtcaaccagttcacgttcacgccagagggcaactatctggtcggcagcggtgaagtgatcgagccgcattcgttcgatgtcgccgtgtccgccgaacatgccggaaagaagtccacttggtcttaccagtcctatgagggccgcgtaagcattccggccggcatcgccaaggatgccggtatcaaaaccgaatcagcagggccggcagtcatccgagacgttgtgcggttgatgggaaccgttgtcctagatgccgacagacacgcggcggttggcgcacgcttccctggcatcgtgcgatcggtgaacgtgcagcagggcgagcgagtccgccgcggccagacgctggccgtcgtagagggcaacgacagtatgcgtacctacccgattaccgcaccgttcgatggcgtggtgctcgcacgcaatacgaacgtcggtgacgtggccgaggcaggtgcgctgttcgagctggccgacccgtccaacgtatggatcgacctgcgcgccattggcaccgatgccgaagccctaaagccaggacagccagtacgaatccggtcagcgactgggaagaccgaagccagcggaaagattcagcgactgttgccggtggccggcagcggccagagcgtcattgcccgcgtcagcatcccgaacttggagggacgttggcgcccaggtatgaccgtggcagccgaggtcacagtaggcacgcgcaacgtaccgctggcggtaaaagagtcggggttgcagcgattccgcgacttcaccgtggtgttcacgcaagtcggcgagacatacgaagtccgaatgctcgaacttggcgatcgtgatggtgaatacgttgaggtgactggaggactcaagcccggcacgaactacgtggccgagcaaagtttcctgatacgccaagacatcgaaaagtctggcgcaagccacgatcactga

SEQ ID NO: 323965 - DNA, 3141 bp, Pseudomonas aeruginosa
atgctcgaacgtatcattcgcgcgtccatcgcgcatcgctggctcgtgcttctattggtgctcgccctgtccgggctggggatctggaactacagccgcttgccgatcgacgcgataccggacattaccaatgtccaggtacagatcaataccgaggcgccaggctactcgccaatggaggctgagcagcgcgtcactttcccggttgagacggcgctggctggcctcgctcggctcgactacacccgctcggtttcccgctacggtctgtcgcaggtcactgcggtctttgaggacggcactgacatttactttgcccgtcagcaggtcgccgaacgcttgcagcaggcatcttcgcaacttccggcgggcctgaatccctctctcgggccagtggcaaccggcctgggcgagatattcatgtacaccttggaacccgaaaagggctacgaggaaatatggacgccgaccgcgctgcgcacgttgcaggactggtcggtgcgtccgcagctccgcaatctgaaaggcgtcaccgaggtcaacaccatcggcggctacgtgcgtcaattccacatcacgcccgatccggtcaagctgctggcctacgagttgacgatgaacgacgtgctgaacgccgtcgcgcggaacaacgccaacgtcggcgccggctacatcgaacgtcatggcgagcagtacctgatccgcatccccggacaagtgcgcgacatcgagcgactgcggaaaattgtcgtggcaacgcgcgatggactgccactccgaattggcgacgtggcggaagttctagagggtagcgaactgcgaaccggcgcggccacgaaagacggcaaagaggtcgtgctgggtacggcattcatgctgattggcgagaacagccgagcagttgcacagcgcacagtagaaaagctcgctgagatcgacgcgacacttcccgagggagtccgcgcgcacgcggtttacgaccgcactcaactcgttgatcgcaccatcgcaaccgtgcagaagaatcttctggaaggcgcgttgctggtgatcgccgtgctgttcctgttgctgggcaacttgcgtgcagccctgataaccgctgcggtgattccgctcgccatgttgctgacgatcactggcatggtgcagaaccgcatctcggccaacctaatgagcctgggcgcgctggatttcggcctgattgtcgatggtgcggtcatcatcgtggaaaactgcttgcgcaggttcagtgaacgacagcaccagctcggtcgcctgctgacccgtgatgagcgtttctcgctggtttcgagcgccagcgcagaggtcatcaagcctgccctgttcgggttgttcatcatcacggctgtttaccttccgatcttcgcgttgtctggtgtggaaggaaagatgttccatccgatggccctcaccgtcgtgatcgcattgactggtgcgatggtgttgtcgttgaccttcgtgcctgctgcggtcgcactgtttgtcaccggcaaggtttccgagaaggaaaccaaggtgatgcgcggcatcagccgcttctatgcgccacttctccagaaggcaatcaagctgagagtcgccgtcgtcgcggcggcggcagtgctggtggtgctatctggtttgcttgcgacgcgcttgggcaccgagttcatccccaatctggatgaaggtgacatcgccttgcacgcgatgcgcattcccggaacgagtctgacccaggcgattggtatgcagcgccagttggaggcgcggatcaaggagtttccagaggtggaggaagtcgtcgccaagatcggtactgctgaggttgcgactgaccccatgccgccttcggtggctgacactttcatcatgctcaaggatcgtagcgaatggcccgatccgcgcaaaccgagagccgtactgcttgccgaactggagaaggcggtgaacgccattcccggcaacaactacgagttcactcaacccgtgcagatgcgcatgaatgagttgatcgcaggtgtccgtgccgaggtggcgatcaaggtgtatggcgatgacatggagcaactggcccaaataggctcgaagattgaagccgtggccgagagtatcgaggggtctgccgacgtggcgctcgaacagattacgggcctgccgctgatgacgatcacgccgaacgtggatgcgctgtcccgatacggcttggcgatcgacgacgtacagcaaacggtggcaatcgcccttggcggtgccgtcgccggccaggtgtttgagggcgatcgccgattcgatatcgtagttcggctgcccgaagcgcaacgccaagacccgaaggcactggcgacactgcccattccggttccggccggcgctgctgccgggctgggccaagccgcctacgtgccgctcgggcagcttgcgtcgatcgaagtggcgcccggccccaatcagatcagccgcgagaacggtaaacgccggatcgttatcaccagcaatgtgcgcggacgcgatctagggtcgttcgtggaagaactgcgtgaacgcgtaagccgtgaaatcacgctgccagagggctattgggtcaactacggaggcacgttcgagcaactcatctcggctagccaacgcctgtccgtcgtcgtaccggctgtactggttctgatcttcggcctgctgttcatggccttcggttcgggccgggatgccactgtcgtctttagcggtgtgccgttagcgctgacgggtggcgttgccgcattgtggctgcgcgatattccgctttcgatttcggcaggggtcggcttcattgccctatccggtgtggcagtgctcaacggcctggtgatggtgagcttcattcgcaagctgcaccacgatggcgcgccgattcaggatgccattgtgaatggcgcgatgacgcggctacgcccggtgctgatgactgcgctggttgcaagcctcggtttcgtaccgatggccatcaacgttggaacgggcgcggaagtgcaacgacccctcgcaactgtcgtcatcggcggcattgtctcttcgacgctgctgacgttgctggtactgccggccctgtatcgcctcattcatcggcgtaccgaccgccagaacaccgcgccagcgtaa

SEQ ID NO: 323966 - DNA, 738 bp, Pseudomonas aeruginosa
atgcgtgaaagatcacttgacgtaatactggatcgctatcgaccgatctggcaacggatttccctgtttctcatggcgacggttctcctgttgttcgcgtgtgcgaatcaggcgctcgcccatgccgttgccgagggtgataagggctacatccaggaaatatccggcgtcaacctcatcccttttatgtatctaggggcgaagcacatggcgacagggtacgaccatatcctgttcctgctcggtgtgatcttcttcctgtaccggatgaagcatatcgccctgtatgtgacgctatttgccatcggccactcgacgacgatgctgcttggcgtgtatttcaacgtcgggatcaatagctacatcatcgacgcgatcatcggcctttcggtggtttacaaggcactcgacaacatcggcgcatttcagcgatggctcggctttcagcccaacacgaaagttgcaacggttgtatttggactatttcacggatttggcctgtccaccaaaatcatcgaatacaacatctcacctgatggcctgattccaaatctgttggcattcaatgtcggagttgaaatcggacagttgcttgcgctcggctccattctgatcgcaatgagctactggcgccgaaccgcaagtttctggcgccatgcgtacaccgcaaacgtagcgatgatgtgtgccggcttcattctgatcggctatcagctcaccggctacttcgtttcctga

SEQ ID NO: 323967 - DNA, 633 bp, Pseudomonas aeruginosa
atgtacaacgtatccaagccaaccctcgacgatcttccttcatcgaaacaactgctgcgctcgacgtttattgcactcgtcgctgccatcgcaattctggtcgccatcgtccttccctccgagcatgcgatcgatccaacaggaattggccgcgtactcggcctgacggaaatggggggaatcaaaacgcagttggccgaagaagctgctgccgacgccgcaatggatgcggccaaggccgttgccgtgacgactgggaatgcaggcaccgtcgtgcctgcacaggcgcaaagtaccgcacaggtgacgaacgattctgcttggcgcgatgaaatgcgcgtcgtactcaagtccggccaaggggccgaagtgaagttgagcatgaaggccggcgaacaggccgagttcagttggactagcgaaggcggcgtagtgaatttcgatacccacggcgatggcggcggacagtccatcagctatgaaaaaggtcgagctgtgcccgcaagtgatggcgtgatccaggccgcctttaatggcaatcacggttggttctggcggaaccgtggcgatgctgatgtaacggtgattgttcgcactcgcggccaatacgcggaaatgaagcgtgtcttgtga

SEQ ID NO: 323968 - DNA, 264 bp, Pseudomonas aeruginosa
atgaaaattcgtccgtttttgattgccgttctagcaagcgcctcgctcgcttcgccgttcgtgatggcccatcccggtggacatgacgacgacgagaaggcgatgccgaagacatgcgagcaattggcagatacgaagcggtacatcagtgacgtggcttatcccgaagtgaagaagctgaaagagcagtgcgacgccgcgaagaagaagccaaacgcggcacagtctcccgcagcccgcggttcatccaacgacggcaactga

SEQ ID NO: 323969 - DNA, 945 bp, Pseudomonas aeruginosa
atggagttgagacatctgaaatactttctcgccgtagcggaggagcttcacttcgctagggcagcggagaagctgcacatcgaacaatctccactttctcgtgccattaaggagctagaggaggaactaggtgttgtgctgtttgcccgcaccacacgcagcacccggctaacacgtgctggcaagctgtttctggagcatgcccgccgggtattcgctgttctgcaacaggcgcgcgacagcgtaaaagcagcagccaatggatttcacggtcagttgcgggtggccttgtcggacggtattacaccatcgcgccttccggcagtgctcgccctatgccgacaggaagaacctgaagtcgaaattcgcttttccgaagtgccgttgtcgcaacaaatcaaggggctacatgacgatctttatgacgtaggattcgcgcaatcagacgaagtgggcgatggcatcgtcgctataccagtctggagcgatgcgctcatggtggctgtgccggctcggcatcctctgctggcacataagcgcattccgttggaggaactgctccgctaccctctggttctatgcgacccgcaggtttgcgaaagccacgcgaaacacgttgatcggatactgcgccgggcggacatggaacccttgatcgcggagcgcgtggcctcctgcgatttgatgatggcgcttgtatcggccggcttcgcgcttgggcttacgggtgcagcacatattacagccagcagagagccgggggtggtggctcgtcccctggcatcacgtgtcccacccctgacaacctatctgctgcaccctataggcgaaccatcggaggttctggcccgattcattgagcgcgtacaggccatcgaatctctggaatctcccaggcccatgctgggccgcaatcttgatcccccggaggaacctgcgccatga

SEQ ID NO: 323970 - DNA, 279 bp, Pseudomonas aeruginosa
atgaagaagatcattccgttcttactggtggcggcgttgaccgcctgcggccagtccgaaacgcctcagagggccaacaccacagaagcgaatgtcccgtcggtggaagaactggcggccaaccccgaacggctcaaggagcttcgccagcagtgcaagaccgatcgccccaagctgggcgacgtgctgtgcaaccgagtggctgaggccacacgcaagcggttctatggcgacggtgaaacgccgtacacgccgccgaaggaacctcccaagttctga

SEQ ID NO: 323971 - DNA, 2007 bp, Pseudomonas aeruginosa
atgcaagggacgaacgtgctgttcggtcagatcgccgtggtattcggcatcgtgatcgccggtgtgtggggcgccacacaatggacagcagccgcccttggctatcagctacgccttggctcgccctggttcgatcttctcggcacgccgatctaccacccgtggaagctgtttgagtggtggttcttcttcgacgcctacgcgccgcgcgtgttcgataccggcggcgccatcgcgggcggcagcggcctgctggcggtggtggtcgccatcggcatgtcgatctggcgctcgcgccaatcgcacctcgttaccacctacggttcggcacgctgggcgaatgcggaggacattcgcaaggcgggcctgacgcaaccggccggcgtattcctcggccagcacgatcgcaagtacctgcggcatgaaggcccggaacacgtcctgaccttcgcgcccacgcgctcgggcaaaggtgtcggtctggtagtgccgacgctgctgtcctggccgacctcggccgtcatccacgacatcaagggtgagaactggcagatcaccgccggctggcgcagccgattcagccactgtctgctgttcaacccgaccgatgcgaagtcggcggcctacaacccgctgctggaagtgcggcgcggcgcgcatgaagtgcgcgacgtgcaaaacatcgccgacatcctcgtcgatcccgagggcgcgctggagaagcgaaatcattgggaaaaaaccagccacgcgctgctggtcggggccatcctgcatgtgctctacgcgggcgaagacaagacgctgcgcggcgtcgccaacttcctgtccgacccggccagtccgttcgagctgaccttgcaccgcatgatgaccacgccgcacctcggcgattggccgcatccggtcgttgcatcggcggcgcgcgaagtgctcaacaagtcggacaacgagcgttccggcgtgttgagcacggccatgtcgttcctcggcctgtaccgcgatcccacggtggccgaagtcacgtcgcgctgcgactggcgcatcgccgatctgatcgctgccgagcatccggtatcgctgtacctggtggtgccgccttcggacatttcgcggacgaagccgctcattcgcctgatcctcaaccagatcgggcgtcgcctcaccgaatcgctcgacggctccgacggcatcgggcgccgccacaagctgctgctgatgctcgacgagttcccggcactcgggcggctggacttcttcgagacggcgctggccttcatggccggctacggcatccgcagcttcctcatcgcgcagtcgctcaaccagatcgacaaggcgtatgggcaaaaccactccatcctcgacaactgccatgtgcgcgtgacgttcgccacgaacgacgagcgcaccgccaagcggatctccgagacgctgggcacggccaccgagttgcgcgcccagcgcaactacgcgggccaccggcttgcgccgtggctgggccacctgatggtgtcgcgccaggaaaccgcgcgcccgctgctgacgccgggcgaagtcatgcagcttccgcctgacgaggccgtggtgatggtgtccagcgtggcgccgatcaaggccaagaagctgcgctactacgcggacgccaatttcaagcgccgcgtgctgccgccgcccgcgctggcggacgggcagtacgccgacgcgccgccggcccgcgccgacgactggagcgggctggcgattcctgccgtgcccgccgcaccggccacggcatccgccgatggcttggagaacttgggttcggccgacgacggcggcccgcgccgtcagcccgaactaactgaggccgtcgcctacgaccccgagctggccactcccgcggccgaccttgggttgctcgacgacgacgacctgccgcttccccttccgcgccagcttgatccagccatgcagcgcacggcccggctggcttccctcgaccccaacgacggaatcgagctatga

SEQ ID NO: 323972 - DNA, 465 bp, Pseudomonas aeruginosa
atgagccactaccgcctcaacttgttcatccagccggagcacgccaagcgcctggacgaactggccgccaagaaaggcgtgtccaagtcgtccatcgtcgcggcggcgctcgcatcgtggctgtcgcccgatgccgccgaccagcgcgaggcggccattgccaagcggcttgatcgcctgtcgcgccaggccgagcgcatggagcgcgaccagaacatcgccatcgaaacgctggcgctgttcatccgctactacctgaccgtgagcacgccggttcccgaggcgcaccaagacgcggcacgcgcgcagggcaaagcgcgcttcgagcagttcaccgagcagcttggccgccacctgctgcggggccgcagcctggtgcgcgacgtggtggaggaactgcatcccgacccgatgcggatggaagacgcggcggcagcggcgcaagcgcaggagcgtgcgtcatga

SEQ ID NO: 323973 - DNA, 1053 bp, Pseudomonas aeruginosa
atgagcgccgttccgcagtccatgagtgccacgtcgctcgaccgccgcatccagatgctgcgcacggcgatggggccgctgatcgccgccgcgctcgaagaccctgacgtggtggaggtgatgctgaatcctgatcgcaccctttgggtggatcggctttccagcgggcgcgcgccgatgggcgtggaactgcccgaggcggacggtgagcgaatcatccgcctggtcgcggcccacgtcggtgcagaagtccatcgcggccagccgctgctgtccgccgagttgcccgaaacgggcgaacgcttcgagggcatcttgccgccggcagcgccggggccggccttcgcgctgcgcaagcgtgctatcggcgtaattccgctggagcggtacgtcatcgacggaatgatgaccagcgcgcaagctggcttcctcgttcgcgccgtgcgcgagcggcagaacgtgctgatcgccggcgccaccagcagcggcaagaccacgctcgccaatgctttgctcgccgaaatcgccgccaccggcgaccgcgtgctggtgctcgaagacacggtggagctgcaatgcgcggcccgtgaccacgttcccctgcgcacccgcgcaggcgtggtgtcgatgaccgagctggtgcgctcgtccatgcgcctgcggcctgatcgcgtcgtcgtcggcgaagtgcgcggcgccgaggcgctggatctcatcaaggtgtggggcaccggccatcccggcggcatcgccacgatccatgccggctccgcgctcggcgcgctgctgcgcctggagcaactgattctcgaagtggcggtgaatccgccccgtgcgctgatcgccgaggcggtcaacgtggtgatccacatcgccgggcgcgggcgcaagcgccgcatcgagagcatcgcccgcgtcgtcggcttcgacggcgtgggctaccaactggcggatgcgctggaaacgccgtttcccgagctgccgccacttcccgatgccgcacctgctgcggcgacttccccatcccctgactcacttggagaactgccatga

SEQ ID NO: 323974 - DNA, 384 bp, Pseudomonas aeruginosa
atgacgcagatgaccattcctgctttccgtttttctgcaaatccggctttgcgtcttgcgcggctgcgctgcctggcccgccctgcggggcaagggctgctgctggccgcgctgctgttgttcctggccggaaccgcgcaggccgccggttcctcgatgccgtgggaaggcccgctgcaatccatcctcgaatccatccaggggccggtggcacgaatcgtcgccgtcatcatcatcatcgccacgggcctcgcgctcgctttcggcgacacgtccgggggattccgcaagctgatccagatcgtcttcggtctgtccatcgcgtttgccgcttcgagcttcttcctgtcgttcttcagcttctccggcggggcggtcgtatga

SEQ ID NO: 323975 - DNA, 273 bp, Pseudomonas aeruginosa
atgaatggcccggacacctttgcggacggcttcgaggtgccgctgcatcgctcgctgaccgagccgattctgcttggcggtgcgccgcgcaccgtggcgatcgccaacggcacgctggccgccgctgtcggcctgggcctgcaactgtggattcccggcgtggtgctctggatcgtcggccattcgctggcggtgtggggtgcgcgcgtcgatccgcagttcatgcaggtcttcgcccggcacatcaagcaccgcccgctgctggacgtgtga

SEQ ID NO: 323976 - DNA, 2454 bp, Pseudomonas aeruginosa
atgctgaacctcgccgaataccgccagcgccctgccttgcttgccgactggctgccttgggccgggctggtcgcaccgggcgtcgtcttgaacaaggacggcagtttccagcgcacggcccggtttcgcgggcctgacctcgacagcgcgacgcaaggcgaactgatcgccacgtcggcgcgactgaacaacgcgctgcgccgcatgggatcgggctgggcgctgttcatcgaagccgagcgccatgcggccgccgactatccgcgctcggagtttcccgagccgctttcgtggctggtggaggaagaacgccgggccgcgtttgaggaatccggccatcacttcgagagcggctatcacctgacgctggtgtacctgccgccggaggaatcccgcgctcgtgcagccaagatgctctacgagaacacgccgacgaatggcgtggactggcgcgagcggctgcaagccttcgtcgcggaaacggatcgcgtctttgacctgctcgacggcgtgatgccggaaattgactggctcgatgacgcgcagacgctgacctacctgcacgccaccatctcgacgcgacgctatcgcatcggcgttcccgaagtgcctttccacatcgacgcgctgctgaccgactccccactggttggcggcattgcgcccatgctaggcgatcagcacctgcgggtggtgtcggtgcggggcttcccgacctcgacctggccggggattctggacgacctcaaccgcctcggttttgcgtaccgctggagcacgcgctttctctgcctcgacaaagccgaggcggaaaaggaactttcacgcctgcgccgccagtggttcgccaagcgcaagaacgtcatcgcgctgctgcgcgaaacgatcttccagcaggaaagcccgctggtcgataccgacgccaacaacaaggccgctgatgccgacgctgccttgcaggagctaggcagcgatcaagtcgccttcggctatctgacggcgaccgtcaccgtcatggacgaggacgctgccgtcgcagacgagaagctgcgcatggtggagcgcgtcatccagggtcgtggcttcgtcaccatgcctgaaacgctcaatgccgtggatgcctggctgtcctcgctccccggcaacgcctacgccaacgtgcgccagcccatcgtctcgacgctgaatctggcgcacatgatgccggtgtcggcggtatgggctgggccagagaagaacgaacacctcgacggccccccgctgatcgtgacacgtaccgatggcgccacgccgttccggctggtgacgcacatcggcgacgtgggccacacgctggtcgcggggccgactggcatgggcaagtcggtcttgctcgccacgctggcgatgcagttccgccgctatcgcggctcgcgcatcttcgccttcgacatgggccgctccatgcgggccgcgatcctcggcctgggcggcgaacactacgacctgggcacggatggcgaaatcgccttccagccactcgcgcgcattgaccgtgagggctaccgcacgtgggccgccgaatggatcgaaggccgcttgctgcacgaaggcgtggcggtcggccccgacgagaaggcggctatctggtcggcgctgggaagtctcgccggtgcgccggtggagcagcgcacgatgacgggactttccgtgctgctgcaatcaaacacgctgcggcaggcgctgtctccctatgtgctcggtggcgcgcacggcaagctgctggacgccgaccacgaccggctgggcatggccgacgtgcagtgcttcgagatggaggagctgatgcacagcaaggccgccgtcatggccgtgctgcattacctctttgcgcgtttcgatgaacgcttcgacggggcgcccacgctgctgatcctcgatgaagcgtggctgttcctcgatgacccggtgtttgccgcgcgtatccgccagtggctcaagacactacgcaagaagaacgtcagcgtcatcttcgccacgcagagccttgccgacatcaaggattcgagcatcgcgcccgcgatcatcgagagctgcgcgagtcggatcttcttgcccaacccgcaggcgaccgagccgcagattcgcacgatctacgagggcttcggcctcaacaggcggcagatcgaaatcgtcgccaccgcgcagcccaagcgcgactactactaccaatcccgcctcggcaaccgcctgttcgacctcgacctggggccggcggcgctggcgtttgcgggcgcctccacgccgcaagaccagcgggacatagaccgcgtgctgctggacgccggcgtgcccggcttcgcgggcgcctggctgcgccatcgcggcctcgattgggcggccgacctgctgccctcgttccccggcctcgcgccgggttccctcgctgaccaacccctggagaacctgtcatga

SEQ ID NO: 323977 - DNA, 726 bp, Pseudomonas aeruginosa
atgaaaaagcgccttatcgccgccgccatcgcggccatgctgtgcactgccaccgcccatgcgcaatgggtcgtggtcgatcccacgaacctcgtgcagaacacgctgaccgcgatccgcacgctggagcagatcaacaaccagatccagcagctccagaacgaagcgcagatgctgatgaaccaggcgcgcaacctcgccagcctgccgtccagcgtggtgaaccagttgcgcgccaatctggcgacgaccgagcggctgatcgcccaggccaggggcttggcctacgacgtgacgagtctggatcgggagttcgcgcgcctgtatcccgagcagtacgccgccaccgtcagcggcgaccagatgtaccgcgacgcgcaggagcgttggcggaacacgctaaacggcctgcagaccaccatgcagatgcaggcgcaggtgtcgcagaacctgggcgaagacgaaagcgtgctggccgatcttgtgggcaagagccagtcggccgaaggtgcgttgcaggcgatgcaggccatgaatcagttgctggccttgcaggccaagcagtcgatccagtcgcagcggctccagatcacgcaagaccgggcggcgtcgctggagctggcgcggcaggcggcagccacggagcgcgcccgcgaggtgcggcggcgcttcctgggcgacggcacgccgtacacgccgcagtccgtgaacttctacggcaactga

SEQ ID NO: 323978 - DNA, 321 bp, Pseudomonas aeruginosa
atgcgatgcgtcctcgtcctgtgtgtcgcgctgctcgccgcttgcggcgagcagccggccgaccaccttgccgatgccctggccgccgatcccgtgcggctgaaggcattgcgcgcgcaatgcgcggccgaccggcaggccacgggcgaggacgcttgccgtgccgccgccgaagccttccggcggcgcttcttctccggccaggccgggccggatgaataccagacgctgggcgacctgccgccgatcccgccgagcttcgaggaaccggccgatggcatggcgccggccgttcccgccgaaccggaggacacgccatga

SEQ ID NO: 323979 - DNA, 1386 bp, Pseudomonas aeruginosa
atgaatgacgtgaccatcatcgaccagttcctcaacacctttgccgcttatatcgactcgggtttcgggctgctgcggggcgaagtggcgttcctcactgccacgctgatcgtcatcgacatgacgatcgccggcctgtattgggccatgagccatgccaccggccagggcgaggacgtgatcgccaagctgctgcgcaaggtgctctacgtcggtgccttcgcctacatcatcaataacttcaactggctggccagcatcgtgttccgctcgtttgcgggattgggcatcaccgccaccggctcggccatcacgatggagaacttcttgcagccgggccggctggcgaaaaccggcatcgacgccggggcgccgattctggagcagatcggcgagatggcgggctttcccgaagtgttcgtgaacctcgaccccatcgtggtgatgttcctcgcgtggctggtcgtggtcttgtgtttcttcgtgctggcgatccaactgttcatcacgctgatcgagttcaagctgaccacgctcgccggattcgtgctggtgccattcgcgctctggaacaagaccgcgttcctcgccgaaaaggtcttgggcaacgtggtggcctccggcgtcaaggttctggtgctggccgtgatcgtcggcatcggctcgggcttgttcgctcagttccaagtccatcccgccgagccgtctattgaccacgcgctggtcatcatgctggcctcgctcaccttgctggcgctcgggatcttcggccccggcatcgccacgggcctcgtctccggtgcgccgcagctcggcgcgggtgcgatggctggtgctgccgtcggtgccgctggcgcggccgttgccgtcggtgctgccgcgacgggcgtaggtggcgcagtcatggccggggcgcgcatggcgcctgccgccgccaagcttgccggcagcggcgcgcgtgccgccgcctcgacggccagcagtgcgaagtcggcgtttcaggccggttccgccgccgctggcggcggcgcaaagggcgcgatggcgggcctgggcaacgtcaccaagaccggcgcgcaggcagccgggcgaggcgctgcatcccgcgcttccgctgccgggcaacgcatggccgctcccttccgcgctggctggaatggcgctgctgccgatggcggcgcgggtgcggcatccggtcagggtgccgcaggcgaggccgcatccggcgccgctacggcgcagacacaggaacagcccgcttgggccaagcgcctgcatcgccgccagcaactcacccacgccgcgaccaccaccgcccacgcgctgcgcggtggcgatggcggcggctccggccaggggccgagcctgcgcgattccgattcataa

SEQ ID NO: 323980 - DNA, 705 bp, Pseudomonas aeruginosa
atgcgattcaagaaaccgcaggtgcgctacgccgacacgccgcagcctgccacgccgtaccaagctgccagtcaggtgtgggacgagcgtatcggctcgccgcgcgtgcaggcgaagaactggcgcctgatggccttcggctgcctgacgcttgcgctgctgatggccggcggcctggtgtggcgctcggcgcaatccatcgtgacgccctacgtcgtggaggtggacagcgcgggccaggtacgcgccgtgggcgaagccgccacgccataccggcccaacgatgcgcagaccgcgcaccacatcgcgcgcttcgtgacgctggtgcgctcgctgtccatcgaccccatcgtcgtccgccagaactggctggacgcctacgactacacgaccgacaagggcgcggccgtgctcaacgactacgcacgggtcaacgacccgttcgcgcgcatcggcaaggagtcggtcacggtgcagatcaccagcgtcgtgcgcgccagcgacacgtctttcaacgtgcgctggacggaacgccgatacgtcaacggcgccgcggcgggcttggagcggtggacggccgtggtgtccatcgtgctccagccgccgcgcaccgaagaacgcctgcgcaagaaccccctgggcatctacgtcaacggcctgtcgtggagccgcgaactggattcttccgaaggagccaagccatga

SEQ ID NO: 323981 - DNA, 993 bp, Pseudomonas aeruginosa
atgaatgatcttttccgtaaatccgccttgccggtgatcttgcttgccctggcgggctgcgccacgcagggcaagccaccgccgaccatctcgctcgatgagccggtgcaggcccagccgctacccgagccacccgcgccggtggaggtggtggcggtgcccgaggtactgccgatgccggcgcagttgaagccattgcccgaagccgaggacgccaagcccacgccggagccagccgacgagaaggtgcgcgtctcacgggccaatgccgaggcgcgcgtcgcacccacgcgcgagggatacgtcaacgcgattcaggtgtggccgttcaccgatggcgcgctctaccaagtctatgcagccgtgggccgcgtgaccgtgatttcgctccagccgggcgaggaactggtgacggtggccgctggtgataccgtgcgctggatcgtgggcgatacgtcgagcggcagcggtgctgacctgcgcgttaatgtgctggtcaagccgatccgctcgggcctcaagaccaatctcgtcatcaccaccaaccgcaggacgtacctgctggagttggcttcgacggaaaagacgtggatggcatcggtatcttgggagtacccgcgcgaccggatgctggccttgcaacgccaggcgcaggcggccagcgccgcagcgccggtcgatagcgggctgtcgctggagaacctgcgtttccgctacgcgatcagcggcagcaatccgccttggaagccgctgcgcgccttcgatgacggcgagaaggtttatatccagttcccggcgggcatcgcacaaggtgagctgccgccgctgttcgtcatcggcacgcagggcgacggacaactcgtgaactaccgcttccgctcgccgtattacatcgtcgatcgcctgttcggtgccgccgagctgcgcctaggcgctgacaagggcgacgtggtgcggatcgagcgcacggacggcgttacacggaggaactga

SEQ ID NO: 323982 - DNA, 1287 bp, Pseudomonas aeruginosa
atgagccaggacgacactcccgaccttgccacgccgcatccgggcaaggtcgcgcccgaagcggtggcgctgcgcgcccagccgcgcccggtcacgcgcctgaatcggcgcacgctggccatcctcgtcggtggcctgtcggtcgtcgtgctcggcgccacgatctggtcgctgcaaccgcagcggcgtggcgccaatgagcagaccgagctttacaacgtcgatcgcgtgtcgaagtcagaaggactggatgcgttgccgacggactactcgaagctgccgccggccttgccgcccgatgtgcccgagctggggccgccgctgccgggcgatcttggcccggcaatcgtgaactcgcagcagccggtgacgccggcctatgcgccaccggggcatgatcctgcggatgccttgcgcaaggaagctgatgcggcggcggcttcgtcggtgttcttccgctcgggcggccaaggccaagctgccgccacggtggcgcaggcggcgccgggtgcgcctggtggtgcaagcgcgctcgcggctttcgatccactcggcgctgggccggcctcgaccgcggcccagcctgccgacccgactgcggtgcagaaccggcaagaccagaaagaggcgttcctgaaaggcggctctacggaaacccgcaattccggcaacctggcgctgccggcatcgccttatcaggtgatggcgggcacggtgatcgccggcgcgctggtgacaggtatcaagtcggacttgcccggcgacgtgatcgccacggtgacggagccggtctttgacacggccacgggcaagttcctgctgatcccgcagggatcgcgcatcctcgggcgttacaacagccaggtcagctacgggcagagccgcgtgcaggtcgtgtggaaccgggtcatcctgcccgacacgtcatcgctgacgctcgacaacctcgtgggcaccgacccggccggctacgccggcctggaagacgacgtggactggcattggaatcgcatcgtcgcgggcgcggtgctgacgacgctgctaggcgtgggcgccgagcttgccgcgccggagaaccgccaggacggcaaccgcatcgtcatcgccgggcgcgacagcgcacaggacagcatcaatcaagtcggccaggagatcacccggcgcaacatgaacatccagcccacgctgaccagccggcccggcctgccggtgcggatcatcgtcaaccgggatcttgtgctgcggccgtaccagccgctgttcttcaaccggggagcctcgcaatga

SEQ ID NO: 323983 - DNA, 246 bp, Pseudomonas aeruginosa
atgagcacgaccaagaagctgcggctcgggccactgcccaagaccgagagcgtcaagatgacctttgcctgcccggccagcctgaaagccgacctcgaacgctacgccgcgttgcacgcgcaggcgtatggcgaggcggtcgatgcagagaaattgatcccgcacatgctggaggcgttcatggcgggggatcggggattcaggaagagcacggcgacccggagcacgccatcgaagccgacatga

SEQ ID NO: 323984 - DNA, 1287 bp, Pseudomonas aeruginosa
atggctgacaaaaaagcgcagttgatcatcgagggctcagcccccgtcgaactgcccgtcctatccggtaccatgggtcccgatgtagtggatgtacggggcctcaccgccacgggccacttcaccttcgatcctggcttcatgtcgaccgcctcctgcgagtcgaagatcacctatatcgacggcgacaaaggcgtcctcctccatcgcggctaccccatcgagcaactggcggagaaatccgactacctggaaacctgctacctgctgctgaacggcgagctgcccaccgccgcgcagaaggaacagttcgtcggcaccatcaagaaccacaccatggttcacgagcagctgaagaccttcttcaacggcttccgccgcgacgcccatccgatggccgtgatgtgcggcgtgatcggcgccctctcggccttctaccacgactccctggacatcaataacccgaagcatcgcgaagtctccgcgcatcgcctgatcgccaagatgccgaccatcgccgccatggtgtacaagtactccaagggcgagccgatgatgtatccgcgtaacgacctgaactacgcggaaaacttcctccacatgatgttcaacaccccctgcgagaccaagccgatcagccccgtgctggccaaggccatggaccgcatcttcattctccacgccgaccacgagcagaacgcctccacctccacggtgcgtctggccggctcctccggcgccaatccgttcgcctgcatcgcctccggcatcgccgccctgtggggaccggcccatggcggcgcgaacgaagcggtgctgcgcatgctcgacgagatcggcgacgtgtccaacatcgacaagttcgtcgagaaggccaaggacaagaacgatccgttcaagctgatgggcttcggccatcgtgtctacaagaacttcgacccgcgcgccaaggtcatgaagcagacctgcgacgaggtcctccaggagctgggcatcaacgacccgcaactggaactggcgatgaagctggaagaaatcgcccgccacgacccctacttcgtggaacgcaacctgtacccgaacgtcgacttctactcggggatcatcctcaaggcgatcggcattccgaccagcatgttcaccgtgatcttcgccctggcgcgtaccgtcggctggatctcgcactggcaggaaatgctctccggcccctacaagatcggccgcccgcgccagctctataccggccacacccagcgcgacttcaccgccctcaaggatcgcggctga

SEQ ID NO: 323985 - DNA, 2025 bp, Pseudomonas aeruginosa
atgagcgatcatcagaacgggctgcatcttgaggcggaaaactggccgcgcgcgttgttcgccgtggccctggccttttccgtgttccaggtcgtcaccgcggcctttcccctgatttccacccaggtcctgcgggcaatgcacgtcggactgctgttgctggtggtgtacatcagctatcccgccttcggcataggtcgcccctggcagccgctggcctggttgctgggcatggccggcctgggcacggcggtctaccagtgggttttcgagggcgacctgatccagcgctccggagagctgacccaggccgacatggtcgtcggcgtggtgctgatcgtcctggtcttcgaggcggcgcgacgggtgatgggcatcgccttgccgatcatctgcgcgctgtttcttgcctatggcctgttcggcgaacacctgccgggcgacctggcccaccgcggctacggcttcgaccagatcgtcaaccagctgtcgttcggtaccgaaggtctctacggcacgccgacctacgtatcggccacctacatctatctgttcatcctgttcggcgccttcctcgagcaggccggcatgatccgcctgttcaccgatttcgccatgggcctgttcggtcaccgggtcggcgggccggccaaggtctcggtattctcctcggcgctgatgggcaccatcaccggctccggcgtggccaacgtggtcaccaccggacagttcaccatcccgctgatgaagcgtttcggctacaagccggcgttcgccggcggcgtcgaggcgaccgcgagcatgggcagccaactgatgccgccggtgatgggggcggtggcgttcattatggccgagaccatcaacgtcccctacgtggagatcgccaaggcggcgctgatcccggccctgctgtatttcggctcggtgtactggatggtccacctcgaggcccgccgggccgatctaaagggcctgccgcgcgatcagtgtcccagcgcctggggtgccgtccgcgagcgctggttcctgctgattccgttgctggtgctgatcgcgctgctgttctccgggcgcacgccgctgttctccggaaccatcggcctggcgctgaccgccatcgtcatcctcggttcggcgatcatcctgcgggtgtcctcgctcggcctgcgcatcgccttctgggtggcgctggggctgctctgcgcggggttcttccgcctcggcatcggggtgatcttcgtcgtgatcgcggccctggccctggcctgctggttcgtccgtggcggccgggaaaccctgcgcatctgcgtccgcgccctcgccgaaggtgcgcgacatgcgattccggtgggcatcgcctgcaccctggtgggagtcatcatcggggtgatttcgctgaccggcatcgccaccaccttcgccagctacgtgctcgacctgggacgggagaacctgctgctgtcgctggtcctgaccatggtcacctgcctggtcctgggaatgggcatcccgaccatccccaactacatcatcaccagctccatcgccgcgccggcgctgctggaactgggggtgccgctgatcgtctcgcacatgttcgtcttctacttcggcatcctcgccgacctcacccctccggtggcgctggcctgtttcgcggccgcgccgatcgccaaggaaaggggattgaagatcagcttctgggcggtgcgcatcgccctggcgggtttcgtggtgccgttcatggcggtgtattccccggcgctgatgctgcaggaaggcggttggggggcgacgctctatgtcacctgcaaggcggtgctggccatcggcctgtggggcatggcttccatcggctacctgcaggggccgctggcctggtgggagcgcctggtggcgttcgccgcgggggccagcctggtcctggccttgccgatcagcgacgagctgggcttcgtcctcggcgcgctggtgatcggctggcacctctggcgccagcgtgcgcgcgaggcggtggcgtga

SEQ ID NO: 323986 - DNA, 504 bp, Pseudomonas aeruginosa; identical to SEQ ID NO: 319292

SEQ ID NO: 323987 - DNA, 1302 bp, Pseudomonas aeruginosa
atgctgatcatcatccactccgagaccaacaagaccaccatccggcagaacctcgggcgcccggagtacagctattacttcgtcctcaaggaattccgtccgctgctggaagagatcggccaggtggtcgaagtcagcgatcccgacgaactggtggaccgcctctaccacgactgccgcaagcgcggcgaaccctgcgtcttcctctccttctcgccgccccatcgcacgccgatccaccatgcctgcccgaccatcccggtgttcgcctgggagttcagcaccctgcccagcgaaacctggcacggcgaaccgcgccacgactggcgacatgtgctgcgccacagcggacgggccatcacccactccagcttcacggtcgacgtggtgcgcgccgccatgggtcgcgactacccggtactgagcgtgccggcgccggtctgggatcgcttcgccaaccgcgcctcgcagcaggcgggccgtcccgaagcccgggatgtgcgcctgcgcctggacggcctgctggtggacagccgccagctggacctggccgtccatgccgaccccgagccgtcggcggaggtcctggccctgccggaccgcgcggcgaaacaggtcgagctgagcctcgacggggtcatatacacctcggtgttcaacccctacgacgggcgcaagaactggcaggacatgatcagcgcgttctgcgccaccttccgcgacgagcccgacgccaccctggtgctgaaactgacccaccacaacgtcggcgaagcgctggccgacatgcttcaccacctgtacaagaaccagtcctaccgctgccgcatcgtgctgatccacggctacctcgccgacccggactacgagcggctggtcgaggccaccagctacgtggtgaacacctcctacggcgaaggccaatgcctgccgctgatggaattcatgtccagcggcaagccggccgtggctccgcgcaataccgcgatgatcgactacatcgacgccgacaacgccttcatcgtcgactcctcggaagaagccaccgcctggccccacgacccgcgcgcggcctaccgcacgctgcgctacatcaccgactgggagtccctgtgccgggcctaccgggccagtttcgaggtcgctcgccaggagccggagcgctacgcacgcatgtccgcgcatgccagcgccagcctcgaacgcttctgcagccgcaagctggccgtggagcgcctgcgtcgcttcctcgacgaagcggcacaaggcgacccctccgccttgcaaagcatcccggcatga

SEQ ID NO: 323988 - DNA, 2202 bp, Pseudomonas aeruginosa
atgcgctcgaagccgcttcttcccgccctcctgctggtgggcgccggtctctccccgctggcccaggccagcagcgacgactcctgctatcccgattggtcgctggtcggcggcggtgtctgcgataccctgccgttcctcgccccgggcaacgacacccgcgccaacctgcgcctgctgctggccgacgccggccactggcggctggtggaggcgccgccgtcggaggaagagaagctcgaaggctacggcctggtaccgttcggcctgttccgcctgctgcccggcgacggcagccagccgcccgcgccgccggcggcgagcgaggccgagacaccgccgcctgcgccagcgccctcgccgctcgccgaactggcccggcagatgggcgccgaagcgctaccggaaaagatcgccggcgccgaattcttcgagggcgagggcagccgctgccgcagcaacgaccaggacagcgcgctggcgtttcttcgccaggtgcgtgacgccgggctgggcgaggcggagaccaaggccctggccaacagccgcctggacctgctcggtgcctgcggctgggaacaagaggaactgggcggtgtgctcgcgcaaggcgtcgagtcggccgcaggcaaggccttcgccacgtacctggaggctgcggccaacttctacagcggtcgcttcgacgaagccgaacagggcttcaaggcgttgcaggacgtgtcgcagccctggctgaaggaaaccgccctgtacctgcaggcgcgcaccctgctcaacgccgcccagcagaacgccttcgacgacatgggcttccccgagctgcagaatgtcgacaaggctcgcctggaacagacccgcagcgccctcgaggcctacctgcaggcgtatccgaaggggctctacgccgcctcggccaagggcttgcaacggcgcgtgcattggctggccggcgaccagaagctgctggcccaggactatgccgcgcaattcgccgaagccgagcaagggcagcgcaacatggccctggaagacctggtccaggaggtcgacaacaagctcctgaccggtatccagctcggcgacatccagactccgctgctgctggcggtggccgacctggtgcagatgcgcgcccacgatccgtcgaccccgcgcagcttcacctgggaaacgctgcaggcccaacaggccagcttcgccgcgcatcccgaactgttcgcctacctgcaggcggcctatcgcttctatgtcgaccaggatccggcgaagaccctcgaagcgctgccgcaaaaggtcggcagcctcgactacgtcggcttcagccagcagaccctgcgcgggctggcgctggagcagcagaaggactggaaagccgccgaggcgctctggctggaactgttgccgcaggccgcgcagccgtaccagaagggccagttgcagctggccctggcgctcaactacgagcgcagcggccagttggaaaaggtcttcgccgaaggttcgccggtccaggagccgctgctgcgcagcatcctcctgcgcaacgtcgccgacgccgcgctgttgcgccgccaggccaagcagggcgcgacggcggaagagcgcgataccgcgctgttcactctcctttacaaggacctgcgccgcagccgcttcgccgacttcggcaaggacttcgcgctgctcggcgaaaccccctcgcagaccaagctgggcaccagcctcggctatgtctacggcgccggtaacagcctggagctgttccgctggaagggcgacaaggccgagtccggctacgtttgcccggccatcgccgagtcggctgcggcgctggccgccgatgacaaggacccgaagggcctgaactgcctgggcgaattcatcctgcgcaacggtctcgacggcatgccgctggacagccagcccgaggccaacgagctgggcggcaccccgagcggcttcaagggcgaggtgtactcccggctggatggctatcgcctggtcatggacaaccccaaggctccgcgcgaagacaaggcctacgcgctgttccgcgcgatcaactgcttcgccccggccggctacaacacctgcggccagcaggacatcccgcaggccgagcgcaagcaatggttccgtacgctcaagtcgacctacgccgacagctcctgggccaaggaactgaagtactactggtga

SEQ ID NO: 323989 - DNA, 216 bp, Pseudomonas aeruginosa
atgccccgtcatagcgatgccaatgcccagcacgtggattcgaaaacccgccgcaagctcgaagaccagcggcgcatgcaattccgtcgggcgatcgaggaccactgcgaagaactgcgcctgcgccaggaactggccgactaccccgagctggtagccgccgcctacctcagctcgaaccgccagggccggcgaagcgcccagcgagctggctga

SEQ ID NO: 323990 - DNA, 294 bp, Pseudomonas aeruginosa
atgcaggtgcggagaaacaccgatttcactggctggccctccaccgagggccagacgggaagtcaacacgccctggaggagcagaaaatgaatgaaaaatcctcacgtgctgtacgccaggcacttcgggtcctccgcaaggcggaagacgatcgcgaggcgcgcattgagtaccacgaaacggttggaatgctgcgcggcctgtactacggcggtgagatcgattcgatggagctagttgcgctcacgcaactcgcaggaaacgcatacatcaacgctggtaaaccctggtaa

SEQ ID NO: 323991 - DNA, 666 bp, Pseudomonas aeruginosa
atggacttttcagacagactcaaccagcgcatggatgccttaggcatcagcgccgcagacatctccagagagatcaaggtctccaaggggactctctcccactggaccaatggcaccaacaaggccagaggaaagaacctgatcgccttggccaaggtgcttcgatgcagcgcctcctggctggaaaccgggaagggagaaaaggagcttcccgcacatgaaggggctccttcagaggccgactacgctcttattccccagctcaccgctaagggttcgtcgggaaatggctacctaaacgatcatgttgaggtcaagggtggattggcatttaagcgcgactggcttcgacgcatggggctgaaggctgaaaatcttcgcgtagcctacaaccagggagacagcaactggcctaccctctccgacggagaggtcgtcctgatagatgtttcctgcaaggagcccgcgaacgggaagatgttcgccctgcatgatgccgaccaagaagtgatcttcaagcgccttatccgagagatatcaggaggatggctgatccgatcagataatcaggacaaaaatcgatacccagaccagcctgtcactgatgacggaatgcgcggcgtagacattatcggtcgtatcgtttggcgtggcggcgcgatgtag

SEQ ID NO: 323992 - DNA, 486 bp, Pseudomonas aeruginosa
atgcgcaaggcactcccggcgagcattctctttcgcgatatggctgtagctctgcttgatctgctgggcggcctgcagagccatctgctggtgaaactcgacgcttcccgccgggactggtacggctctaccgagcccgctcagcacgcaatcgagtacctcggtgaccgggcgagcgtccggaccacggagctcttcgccgtccggctggccaatctggaaggacggcattcagtcccaacccagcggtcccggccgcttcttctcggcctgaaggcccaactcagccagcgtcttgagcgcctgaatgtactcgaatggatgacactgagccgacattgggacgacctgaagctccagaagcgcaagcaccttgcaccaccgctctatctcgccctctttccagcggctgacagtagattcgctcacgccgattgcatcagcgacggtcttctgcccaaccgacaaaagccggttcaggactag

SEQ ID NO: 323993 - DNA, 183 bp, Pseudomonas aeruginosa
atgcaaatccctgagccacttgttccgctcgagtgtgacgtgcgggactcacccattccgaccgacatgctcatagaactggccatgaccatatttggcctcagcatggaagaggccgagagcaaggtccgcgctgcgatctccgacaaccccgtaaatctttcggagattggccatggctaa

SEQ ID NO: 323994 - DNA, 801 bp, Pseudomonas aeruginosa
atggctaaccaatggttccgcatgtacgcggagttcgccaccgacccgaaggtccagatgctgagcgaggtcgaccagcgccgttacatcatgctgttgtgcctgcgttgcggaaacggcgatgtaacgtttcatgatgatgaggtcgcgttccaactgcgcatcaattccgaggagtgggccgcgtcgaaagggcgcctactggggaaggggctgatcaccgaagacaacattcccgccaactgggacaagcgccagttttcctcggactcaagcacggcgcgggttgcagcccatcgtgcgcgaaagaaacaagaatgtaacgtttcacgcaacagcaatggaacaaaagctaacgccctagatacagatacagatacagaaagagatagtcctactgacgtaggactcgttgacgcttcgcctcaaccgggtcagtcgaacgaccaagacctgttcgaacctgatcaacccgaacacctcaacggacaccagcacggaatcaaaccgtgcccggcacaggccattgcagacctgtaccaccaggtgctgccagagctcccagcagtcgccctgctgaacgacacccgacggcgccacctgcaagcccgatggagggagcacgaagcccaccgctcgctggacttctggcgagagctcttcgaaaccgtcaaggcctccccgttcctgatgggcaatgtccccggtcgcaacggtgcgaagccattccgcgccacgttcgactggatcatcgcgccgtcgaacttcgtgaagatcgtcgagggaaattaccatgcgtga

SEQ ID NO: 323995 - DNA, 1416 bp, Pseudomonas aeruginosa
atgcgtgacccgttcagcctggaagccgagcatggcgttctgggtgccatgctcctgcgcaacgagttgatcgacgtgctgtcggcagagctgaccccggaggatttctactggccagagaacggcgacctgtaccgcgccatcctggctctgcacagcgacagccagccggcagacatcgtgaccgtcggtgaattcctgggcgaccggtaccaggtccaaaccactgacgggatgatcaccgggctggcctacatcggccagatcatccagaacactcccagcgtggcgaacgctggaacctactcgcggatcgttcgggagcgagcggttgaccgagctctggcggctgcgggggacagacttcacgagttggcgctcagcgaggccgcccaggccgacaaggtcggcgccgcccaggccatggtcatggcgctggactcgaagacttcgacgcacgaggtgcgccatgccgctgacgtgctgaccgaccacatcgaggagttgcagcgccgctccgacctcggcgggaagctggatggtctggcaaccggcatcggcgacctggaccagaagctcatgggcctgaagcctggcgacatggtcgtgattgctggtcgtcctgcaatgggcaagaccgcgctggcgatcaacatcgccgagcacgtcgcctgcgacctgggtgacccggccctggtggtctcgctggagatgaccaacggcgggctgatggatcgcatcctggcatcgcttggtcggatcccgctcaccgcgatcaaggacggctccgcaccgtccagccatggtgccgagctgggatctgcctctctgaaggtcaagcgctcgaagttgtacatggccgatcgccccgggctgaacgccgctcgactgcgggccctggcccggcgtcacaagcagcgccatgggttgagcctgctggtggtggactacctgcagctcctggagagctccggcaagtcgactcgcaccgaggacgtcagcgacatgtcccgccagtgcaagctgctggctatggagcttggtatccctgtgatcgtcctgtcgcagctcaaccgatcgctggagcagcggccgaacaagcgtccgatgatgtccgacctccgggagtccggcgcgatcgagcaggacgccgacgtgatcatgttcgtgtaccgagacgaggtctatcacccggacacccagtaccgcggcgtggctgagttgatcatcgcgaagcaccgcaacggcgagccaagcactgtccggtgcgcgttcctgggtaagtactcgcgattcgagcagctcgctccgggcgcgctggacgagttcgatttcgacgagcctcagcaggcgccgaaggtcaccagcatggcggagcgctaccgcgggatgaagggagggcgcgccaatggctga

SEQ ID NO: 323996 - DNA, 444 bp, Pseudomonas aeruginosa
atggctgacctccgtccagtgatgttcaccgtacccggcgagcctcaggggaaggggaggccgcgtatcggccgcgtcggcgcccacgcccggatgttcactcccgcgaagaccgtggcgtacgaaggcctggtggccatggccgcacagcaggcaatggcggggcgcccgctgataacccggccttgcctcatcgagatctggatgtaccaccaagtgccagcctcatggtcgaaacgcaagcgtgcacaggctctggccggtgagatcgccgccatgcgcaaaccggatgcggacaactgcctcaaggccatctgcgatgcctgcaacggcgtcgtatggcgtgacgatgttcaggccacccgcggcatattccagaagctctggagcgaaacgccaggcgtgcgagtgaagatcgtccctctcctcgagggcgagcagtga

SEQ ID NO: 323997 - DNA, 870 bp, Pseudomonas aeruginosa
atgagactgatcagcgcgcgccaggcttggcacgacgccttctacgagagtcggagctcagtgctggcggtggcggccgacaaggccgcgctgggcaagaaggggcgggtggccaacgagacgcaccccgaccgcaaggacaccaacgggcgtagcgcccacatgctggccgccggcctggtgcaggctgccatccgctcgctgccgaagccgctgcagcacttcggccacacgctgtactcgccgctggccaccggtgacgacgtggcgatcgctcacggcctggtctggatcggcgccggcctcggccaactgactcagcgccagggcgagcgggcttactggatggcgctggcggcgatcaactcgcataagcgcgccgtcaatggccgcgacacactgcgcccggccgaggtctgcctcttcatcgaggagcgcctcggctgccggatcgaccccggcaactgggcgcgggactacgccagtacctgggagcgcctggcgcgccacatcgacaagctcgacgctcaggcgctgaggccggtcgccgaggtagtggcgaagcagagcggcctgcggaaggggccgggctggcgctggcaccaggtcgaccgcgatgtggtggcgttgcagcgggccgaggcctacgccgagcgccgggagcatcaccagcagcgcttggctgaacggctgcgcgggatgtcggaccaggagctggcgcggtgggcggcgaggatgaagcggtacggggaggcataccgggaggagtggggcgaggacatcctggaatgccccagtgtccatcagcgctaccatgaccgcgtggcggcctactggacccagcgggaacgcctgaaacgggtcgcttga

SEQ ID NO: 323998 - DNA, 390 bp, Pseudomonas aeruginosa
atggctgaaccgacgagcagcggagcagtagcagcagccggcgccgtcgggctcactgccaccgcgatcattcctggagttgatgtgaatgcagtgatcggcggcttcgccggcgcgctgctgttcgtgctctgggctcacgacctgaccatcgcaaggcgcgtcggctacctgctggcgtcctgggtcggcggctactacgccgccaccgaggctgtcgggcggggcgcgacccagttctccgggctgcccgcactggtcaccgccgcgctgatcgtcacgatcctgatcggcgtgctcgactggatgattggtggccgcgcgccggcatggctccagatcgttctgcagcgcatcgtcggcatgatcggaggccggaaagatggttga

SEQ ID NO: 323999 - DNA, 285 bp, Pseudomonas aeruginosa
atggttgatctggtgaccctgacggctgcggccgtctgcggcgctatcagttgccgcatcttcacgtaccagcgccacggcgccacgtaccggttcggcgtctcgctctgcgcgtacatcctcgccgctgggaccggcatgcaggcgctgtcgatcagcctggccgtgctgatggcgcgccacgcaacgccgatatcgccctacctgctggcggtcctgctggtgctgctggtgctggtctaccgcaacaagggcaacatcgcgcccatcctgaggctcagttga

SEQ ID NO: 324000 - DNA, 543 bp, Pseudomonas aeruginosa
atggcgctaacagcaaaacagcgccgcttcgtcgccgagtatctgctcgacctcaatgcgacccaggcggcaatcagggccgggtacagcaagaatcgcgcgtccgagatcggttaccaactgctgcagaagccggacatcacatccgccatccaggcggctatgaaggagcgcgccgagcgcaccaggtctgacgccgactacgtcgtccggcgcctggaggagatcgatcagatggacctcctggacattgtcaacgatgacctgaccctccgcccgctcagccagtggcccaaggcctggcgccagtacctcagcggcttcgacttggccgagatgttcgagggcaagggcgattcccgcgcggcggtcggcatcctcaagaagatcaaatggccggacaaggtgaagaacctggaactgctcggccgccaccacggcgtgttcaccgacaagttcgagcactcgggccccggcggcggcccgattcccaccatgccgaccatgatcgaactggtggcgcctggtgaaagcacggattga

SEQ ID NO: 324001 - DNA, 1254 bp, Pseudomonas aeruginosa
gtgaaagcacggattgaactcccaccgaagctgattccggtcttctccgggcccgcgaggtacaggggcgcctacggcgggcgcggcagcggcaagacccgcagctttgccaagatggcggcgatccgggcctacatgttcgccgaggctggtatctccgggcagattctctgcggccgggagtacatgaacagcctggaagactcctctatggaggaggtcaagcaggcgatccggtccgaaccctggctcaacgcctacttcgagatcggcgagaagttcatccgcacccgcaaccgacgggtgtggttctcgttctccggcctacgccacaacctcgatagcatcaagtcgaaggcgcgcatcctcatcgcatgggtcgatgaggccgagaacgtcagtgagatcgcctggcagaagctggtgccgacggttcgcgagtgcgactccgaagtctggatcacttggaacccggagaaggacggcagccctaccgacacccggttccggaaaaacatgccggccggcgccaagatcgtcgaactgaactacacggacaatccctggttccccgacgtcctcgatcaggagcgcctgaacgacagggagtcgctggacgaccagacctacgcttggatctgggatggcgcctaccgcgagaacagcgacgcgcagatcctgtccggcaagtaccgggtggcggagttcacgcctgaaccgggctgggatggcccctactacggcctggactgggggttcagtcaggaccccacagccggcgtgaagctctgggtgcacgatcgccggctctgggtcgagtacgaagccagcaaggtcggcctcgaaaacgacgacatcgcccagttcatgatcgaccgtctgcctggcatcgaactgcacgccgtgcgggccgattcagccaggccggagacaatcagccacgtcaagagcaaggggcgagaccacaagcgcgccaacttgccacgcatcgagccggtggcgaagtggcaaggcagcgtcgaggacggcatcgcgcatctgcgcagctacgtcgagattgtcattcacgtgcgctgtaccggcttcctgcgcgaggccaggctctacagctacaaggtcgaccgcctgaccggtgacgtgctcgccgagatcatcgacaagaacaaccacttcatggacgcgagccggtacgcgttgggcccgctgatcaagcgccgcggcgcggtcggtatgctgctacccggagcccgctga

SEQ ID NO: 324002 - DNA, 198 bp, Pseudomonas aeruginosa
atggccatcttcatcctcaaggagcgcgctaccagccgctccatggttgtccgtgcgcgctgcactacatgcgcccgcaccgtggcggtcgaaaacgccggtgccgaagggacgatggtatggcgtgaccccaacctctcttctgtcgaactggtccgcgagacggacaagccaggcctcatcctgaaatcggactga

SEQ ID NO: 324003 - DNA, 1320 bp, Pseudomonas aeruginosa
atgactgacaaactcgacctcgcggtcaatcacgcgatgagcagtgccatcgcgcgtgcccgaatgagcctgctgaaccagggcattggccatgacgcgaagcggccacaggcatggtgcgagtacggattcccccaggaaatcacgttcaacgacctgtacaccatgtaccgccggggcggcatcgcccatggcgcggtcgagaagatcgtcaccacttgctggaagacgaatccgcaggtcatcgagggtgacgaccaggaccgctccaaggacgaaaccgagtgggagaggaagaacaagccgttgatagcaggcggcaggttctggcgggctgtctccgaagccgaccggcgccgccttgttggtcgttattccgggttgctcttgcacatcagggatagccagccgtgggacaggcctgtcacgggaaaggtcaatggcctggcgaaggtcaccccggcctgggccgggtgccttaagcccaagacgtttgacgagaaacaggatagcgagacctacgggcagcccaccatgtgggaatacaccgaggcctcccaagccggtcgtcccggtctggtgcgagatatccatccggaccgggtgttcattctcggagactggaccggcgatgcaatcggattcctggagcctgcctacaactccttcatcagcttggagaaggtcgagggaggcagtggcgaatcgttcctgaagaacgccgcacgccagctcctactgaacttcgacaaggaaatcgacctcaacaacatcgcctcgatgtacggcgtctcgcttgaccagctgaaccagcggttcaacgatgccacacgccagctgaaccgcggcaacgacgtgatgcttccgacccaaggggcgacggccactcagctggtctctgcggtatccgaccctggcccgacctacaacgtcaacctgcaaaccgccgccgccggcgtcgacatcccgaccaagatcctggtgggcatgcagaccggcgaaagggcgagcagtgaggatcagaagtaccacaacgccagatgccaggcgcgccgggtgcaagaactgacgttcgagatcaacgacctgttcgggcacctgatgcgcatcggcgtggtcccgctgaaggccgagttcacggcaatctgggatgacctcaccgttccaaccaaggccgagcgcctggccaactccaagaccatgagcgagatcaacagcgccgcaatcggcactggcgagccggtattcaccgcggaggagatccgcgaagaggctggctacgacccgctcgtgggcggtgacccgctgcctgatacctaa

SEQ ID NO: 324004 - DNA, 924 bp, Pseudomonas aeruginosa
atgccgcgcgcaccgatcctaccggcgagcagcagtgacccgaccggggtagatcgactggaaaggggcgcaatgcgcgagttcgacaggcgcatgcggaaaatccgggatggctatgtcgctgccttggaccgaatcccggcccagccggtggtgaatgagcagtacacctaccgtctcgaccaggcccttctgtccgcgatcttcgccgacaccaacctgatggtcgacgagatactgcaggagggcggggagcgcgacctctggttcttcgaatcctatgtcggggttgcctacatccgcggtaccgcacagacgcatgccaacctggcgcagcaatcgcctgcataccgagccggccgggaatcgctggatgtcctgcttcgatccgacgcctaccgcgcgcggatggcactgcttcgcgcccgagagttcgaggagatgaagggcttgtccggccaagtcaaggccgacatggcgcgcattctcgccgagggcatggggcgcgggaagaatccccgcgagatcgcacgggacctgaccgcacagaccggcatcgaggcgcgtcgcggccatcgcatcgcacgtaccgaagtcacaactgctctccgaagggctcgctgggacgagaaagacgctgctgaggccgattacggcgttcagtcgaagctgatgcatatgtcggccctgtcccccagcaccagggcaacccatgcggccaggcacgccaggctctacacctcggacgaggtgagggactggtacagccgagacggaaactcgatcaactgcaagtgcggccaggtcgaggtcctggtcgatgacgaagggaacccggttgtcccggccatcgtcgagcgcgcgcgccgcaactaccaagtcatgaaagccaaagggcgcgggccctgggcgaaagaggattga

SEQ ID NO: 324005 - DNA, 1278 bp, Pseudomonas aeruginosa
atgcccatgcaggtcaacatcaccacccaggtcaacagcgccagcattcggcgtgagacgcacaacgggcgcgaacatctggttctgccgagctacaccctgccggccggcgtgatcatgaacggtggtctctacaccgccgagcagatcgacaagcactacccaggcctggagggaacgctggcgccgctcgggcacccgatggtcgacgggaagttcgtgtctgcgttctcccctgaagggatcaacgccgcccacgtcggcgcctggaaccgcaacgtgaagaaatccggcaaccgggtctacatggagaagtgggtcgacgtcgagttcgccaagtccacggagggcggccgtgaactgttgcagcgcgtcgaagcgctggagaagggggaggacgcccccccgatccataccagcgttgccgcattcctcaatcgcatcgagccgaacgaaagccagcgcgcccagggcgcggagtgggtcgccgacatccagagcatggaccacgacgcgatcctgctgcacgaagtaggggcggccactcctgagcagggcgtcggcctgatggtaaacgccgatcaggctgtcccgcttcagccgaattccggcgctctggttggcgagtcctatcgggagcgggagcagcgtctcgatcgcgccgcaaaggagcgattcgcctccgggcccgatcagtacgcatgggttgccgacttcaccgactctcaggctgtgatcagccgcaatggcggtgtgaccgaggtgtacggctacaagctcgaggcagggaagatcgtcttcgacgaatccggccagcccgttgtcaggcaagagtcctgggtcgccatggtggccaacagcatcaagaacattttcacccatcgtcaggctcggcctgatcaacctgagaaggagggcgacatgcccctgacccccgaagaaaaggccgaaatcgtgaaggaaatcggcaccaacacctccagcgccatcaaggaactggcggacaccatcatcaagcccctggccgacaaggtcgacggcctggtcgccaatcacaaggcgctggccgatacgctgaccgccaaccagcgcgccgaggaagacagcatgcgcgaagcggtcaaggccaagtttggcgaggtcatcgccaacagcctggccggtgacgcgctcaaggaaatgttcaagcagtgcggcgaatccgctccgctgggcgccaatgctgccaccgacaaaggcggactcaccgccgatatcgccaacctgccgaaggagtaa

SEQ ID NO: 324006 - DNA, 450 bp, Pseudomonas aeruginosa
atgtctcgctatcgtcgagtgaacatcgacggcaagtcgctgttcaagaccgaaacccgcaagaccgccgcggaactcctgcccggcacgttcgccgtgatcaatggcagcgacctgttcgcccaggcaagcgccagcgttggccgcctctacgtcatcgactgcgctcaccacgaagggctcaacatccgcgatgaggttcccgccggccattcggccgtgggcaactacgtcgaagagggtcgcgagctcgccgtgctgtgcccggccggcacctacaagaaggacacgccgatcaagctcggcaccagcggccagggtgccatcgcgtcgagcgataccgacacggtcctcgggtacagccaggacgatgcagtcatcgcctccggcgaaaccgacttcatccgcatccgcttccgtgtcggcagtgtcgccgccccggcgccctaa

SEQ ID NO: 324007 - DNA, 1095 bp, Pseudomonas aeruginosa
atgttcctcacccagcaagcaatcgccgcccatcctcgcctgatgggccactaccaggagttgcaggccaaccgcaacatctggaacaaccagaacgctgcgatgatcacccaccaccgcggcgccatgacccccgaaatgctggcctgcaacgcgctcgccggcctgggtcgtgagttctgggccgaggtcgacgcccagatcatccagtaccgcaaccaggaaaccggcatggagatcgtcaacgatctcctgcaggtgcagaccgtgctgccgatcggcaagaccgccaagctctacaacgtggccggcgacatcgccgatgatgtgtcggtgagcatcgacggccaggccccgtactccttcgatcacaccgagtacaactccgatggcgaccccattccggtgttcaccgccggctacggtgtcaactggcgccatgctgccggcatgaacaccgtcggcatcgacctggttctggactcgcaggctgcgaagctccgcaagttcagcaagcggatcgttgcctacaccctggacggcgccaccaacatccaggtcgagaactacccggctcagggtctgcgcaatcaccgcaacaccatcaaggtcaacctgggctccggcgccggcggcgcgaacatcgacctgaccaccgccacgccgcagcagatcatcgacttcttcaccaaaggcgcattcggccaagctgcgcgtgccaacaaggtggacgcctacgatgttctctgggtttccccggaaatcaacgccaacctgtcccagccctacatgatcaccatgggcggcggtgccaatgcggtggtggccggcaccgtgctcgatgcggtcatgcgcttcatcccggcgcgcgcggttcgccagactttcgccctgtcgggcaacgagttcctgggctaccagcgccagcgcgacgtggtcaccccgctggtcggcatggctaccggcgttgtgccgctgccgcggccgctgccgcaggtcaactacaacttccagatcatgagcgccatgggcatccaggtgaagaaggacgacgaaggtctgtccggcgtgatctacggcgccaacctggcgtaa

SEQ ID NO: 324008 - DNA, 459 bp, Pseudomonas aeruginosa
atgcccaaatacgaggtgatcaaaccctggaacggcgtttccaagggccaggtgctggaactcgaatcacttgccgctgcgctcctgccgaacgtgcgcgaggttggcgcactcaagaacggaagcctgaccttggacgtttcggcccaggttgacgaagcggccaggcaagctctcgccgaagcgcgtgcatccgtcgatgccatgatcgacgaagccaaggcccaggccgaaggcatcatcgccgcggccaacgcggaagcagcgagtatccgggagcaggccaaggcccaggccggcaccctgaccccggcgatcccggacggaagcgagcgccgcgagctgatcaaagcgcgcctgaaggaactgaagatcgagttcgatggccgccagggagaggaagcgcttgccgccctgctgccggagggcgaactggcgaagctgttcccggccaagtga

SEQ ID NO: 324009 - DNA, 402 bp, Pseudomonas aeruginosa
atgatcacatttgaacaggcccggcagtacctgcagagccagggcatcgacaacgtgcccgatttcatccttgcggcgtggatcgagcaattgcagcagatccaggactgcctggatgcccattacccggcatcgacctcgctgctaattcaggcctacctgctggcgctgttcgccctggcacaggccgacaagtacatcagcagccagacggcaccatccggcgcttctcgatcgttccgctaccaggcctttgctgatcgctggaaggcgcagttggccctgctgaacgccctggacaagtacggatgtgcgacggggctgattccaccgaacccaacccagaccgcacacggcggtctttggatcgcgcgcggtggctgcatgtgtggtgactcatga

SEQ ID NO: 324010 - DNA, 321 bp, Pseudomonas aeruginosa
atgagcacgacggcgaattggagttacaccaacacggcgacggttcggccattcctgcacttcgacctttcgacccaggaggctgtttacggtcccgagtacgagatcgcctgcacctgggtagcgaagggtgagcaggtccgcgataacagcggcgccgaattcgtatcgcgccaccagatattcaccgaggaccgccggccgaagtacctggacctgatccagttcgacggatccaacggctgggaagagattcgctcggtgacgaactgggacatgtccttcttcggtgaacagccggactttctgctggtgacctga

SEQ ID NO: 324011 - DNA, 405 bp, Pseudomonas aeruginosa
atggcaatccaaggaatcgaccgcgtccggcggaatcttcgtgtggctgtcgaaaacatcgccggcggtgtttccgagcgcgcagtttacgaggtactgagccagggcgccgcaatggcgcagaccatgacgccgatcgacacatcgactctcgtcaacagtcaaacggccccccagatcactgttggccccaacggggtcgaggggagcgtcggttacaccgccgcttatgcggcggcagtccacgaagcgccaggcactctcgccggccagccgcgcgacgagaacgaccccagccggggagactactgggctccgaatgcggagcctgagtttctcacgaaaggttttgaccagatcattccagctatcccggccatcctccgcaggacctaccgcgtatga

SEQ ID NO: 324012 - DNA, 375 bp, Pseudomonas aeruginosa
atgaccccctacgacgccttccaggactggctggcttcgatcctgggcgagggctaccagtacagccgtgggatgtgggtcgaccacccctcgctcgactcggcattcatcgcagcgatccagcaaaccggcggtccgccgactcaggtcgacgtccgtcgcctgcggttcaaggtgatcctcctcggcccgaagggcgtccggaaacacgttgtcgacgtcggcaactcaatcgagaccctggcgcaggcagcgcttggcgacagcgtcccctgtggcgccgcatctgttcgggcaatcggagagccgatcgggcccggatacaccacggaaaaccgggcctggtacagcctggaccttgaagttctctactaa

SEQ ID NO: 324013 - DNA, 996 bp, Pseudomonas aeruginosa
atggcttgcaagaagctcaaatttccgggccgcgacgtcgtgctcgagtattacatcgggtgcggcgatgcgctgccggcggagaatgactggcgccgtttcgggtcgctccgcacgaaggagttcaccgtcgagtgggacaccatcgacgcaaccgattccgactcggtcggcgcgctgcgcgagaacctggccagcttccagacgctgaccatttccggtgacggtaccgtaaaggcctccggcgctggcgcgcagaacctgatcgacctgacgaagcatgtcgtgaaacctgactcgactggcggacagcctgttgtctggatgcgcatgactttcccggacctgaccttcaccgcattcatgctcatcagcaacctcagtcgatccgcgccgtacgacgatgtcaccacctacagcttcgaggcttcggcgaccgcttccgacttcggcctgatcgtcgaggatacccccgatgcggatgcgccggaccccaccagcattcaggtcgtgccggagaccctctcccttaccgttggcgagggcttcaacttcgaaggcgtcgtgctgcctgttggcgctccgcaaggcctgcgctggacctcgaccgctccgaccgtggccgcagtgaacgcggttaccggcgaggtcagcgcgctgtcggccggcagcgccacgatcaccgctgcctccagcgtcgtgccaggcgttaccgataccgcaaccgtcacggtcatcccgctggtgcaggggattaccgtctcgccgacctccgtatcgatcgctgaaggcgccacccagcaactgaccgccgctgtatccccgactggcgcggctcctggcctggtctacgaaagcgcggcgccggccattgccaccgtgagctcgagcggcctggttaccggcgttgatgtgggcaccaccacggtgaaaatcaccagtgcggcacgtccctcggtcagcgtgaccgttccggtaaccatcactgcaccgtga

SEQ ID NO: 324014 - DNA, 618 bp, Pseudomonas aeruginosa
gtgatcctcaccgagatcggtgagataggcgtacacacggcctcgggggagtgctttctcctgcggccgtccctgtacgccatgacccagctcggtacgccggccgagattgtcgacgtcttcgcgcgagtcatgagcgacccgatcaccgagaagcaccaggcggaccagttcgccgacgccctggccgtggtggtggcctgtagtgagcaggacctgtccgacgtgtttggctactacgaccaggacctggtctaccggccaggaactgcggacgtcgagcaccttgtgcctctcgcgcgctgcctgctgaagcacggcgtcacaggagcgcttccgccactcccccggcgccacgacgaagagccgaactactcgggggaattcgttgcgcgggagtacgtcgcgacggcgatagcgcacctggggctgagcgagcgcgaagcttggtccatgaccatgaccggcctgatcggcgctctgcgcgcgaaatatcccccaaccgaatcgaacgctccgggcgccagagccccgaccgcggcagagcatgacgcgacgatggagtggttcgacaagatcgaggccaagcgcaaggcgcgggcgaaaggagcaccctga

SEQ ID NO: 324015 - DNA, 1116 bp, Pseudomonas aeruginosa
atggaggatcagcgtcgcgctgccttggacaatgagaagactatcggagacctttcccagcaactggcacaggctggactgaagggaaaggaactggcagaagctggggcgcaatctcgccttaatccattcgccacgccggagcaggtcgcccaggtccgcgcgctcgccgcagctctgtacgaagcgcaacaggtcgaagccaacaagcagttgctggggcagatggacccgatcgccggcgaagaccagcgctaccagaccgaactggagaatctgaaaaagctgaacgaggccaagttgctcgaggaccagcgctacctggaactcaaggcgcaggcagagcaacagcacgatgccacgatgaagcaactggaggaggagcgattccgccgccaggctgccggcaacgagatgatcatggcaacgctggatcaggtgcagcaggccggcacgaacgctctgacagggctgataaccggggcgaacaacggtgctgacgccatgcggcaactggccggcgccatgctgaaccaggtcgtgggcgccctcgtcaaggtcggcatcgaacaggcgaagaacttcatcatggggcaggcccagcaggcggctgcggcgacgacagccgcggcgacaggtgcagctatggcttctgcctacgcgccagccgccgctgccgcctcggttgcgtcattcggtggggcggcaacggctggcctgaccgcaatggcggctgccatcccggcgatgcttggcatgttcggtggtggccgacagtacggcggccccgtaggggctggtggcatgtaccgcatcaacgagaacggcgcgccagaggtattccaggctgcgaatggccggcagtacatgctgccgaacacgcgaggcgaggtgatcagcaacggcgacgccaccgcgcagggctcgccgcagatcagcctgcagatcatcaacaacggtcctccggtttccgccaccgccaccatggacgggaacaacctgcgggtaactctcgatgcggtcgagcaggactttgccaacaaggtttcgtccggccaggggctttacccgaaagcaatcgaaggcgcctatggattcaagagggcagggcgatga

SEQ ID NO: 324016 - DNA, 468 bp, Pseudomonas aeruginosa
atgatcaaatggcctgatggccttcccttcccgctcagggaggggtacggcttcaagacggtagagcctatggccaggacgtccctccagagcggccgggcacgctacaggcggaacttcagcaatgtgccggtcgcgctggaggtttcctggctgttcactgctgagcaggctcggctgttcaaagggtggtaccgagacgtcctgaaagacggcgtcaagtggttcgagtgcgatttgcgtacggaagagggaatcgttccgtgcaacctgcacttcgaggggatctacgacggtggctatctcgtcgggcgcgaccactggcgtttcaacgcaaccgtcgtgatgcgagagcgctcgatcatcgatccagggtgggccgagattctgcccgagtacatcctcctcgccgacatcttcgacatcgcgatgaacagggagtggcctcgacatggcgacggctcttga

SEQ ID NO: 324017 - DNA, 492 bp, Pseudomonas aeruginosa
atggcgacggctcttgagcggttctatgcatcggatgggccggatattccgattgcaacgatcgagattactcggccctccaggcccgatccgatcctcatctgtcaggggttcaaagacctgacctgcatgacagaagacggacggctactgacattcatcgctggcgctatcgacgtttcgatcccgaagcgcgacaacagcgggaaccagaatgttggctttgcgatcgacaacgtgactggctttgctcagcaatatattgccgaggccatcgacgccggagagccggtcacgcttgtcctgcgaatctacctcggaagcgacctgactgcgcctgccgagcggccgtatcggatgcgcgtgaaaggggtcgacttcgaaagcctcactgtccaggtagaagccggctactacgacctcatcaacaccgccgcgctgcgccacatctacaacgttagcgagttccctggcctcaaatactggccctga

SEQ ID NO: 324018 - DNA, 408 bp, Pseudomonas aeruginosa
atgccgaacagatacctcaccgccatctataccgagggcgggcgggccctgccgtgccttgactgctggggcctgacgctcatcgcgcgggttgagttgttcggtctgccgatgctgaccgacttcggcggtgtcacgcggcgcaccccggtttcgatgcaaagggcgtgcgatgcggagatccaccgcgcgctcgagcaatgcgagccaggacctggggtcatcgccgcggcctacagagggcggctgctcgatcacgtaggtctgctggtcgaagtggatggacgcctccgggttctcgaaatcaacccgggaagcggggtttcactcaccccgctccagaagttctccgacaaatactccaaggtggtcttctaccgtgatcgaaatctacccatcgctccttga

SEQ ID NO: 324019 - DNA, 2730 bp, Pseudomonas aeruginosa
gtgatcgaaatctacccatcgctccttgacggagaaccgctggagcggcatccgatcggccgcaggatgacgattcatgcctggctgaccgcgaattcgcccgggtaccgctgccacgacgtccacccgttctctatcggtgttgtccccgctgaggttgcgctctgcgatgacctcaccgacaagcagaaaaaggcccatgaggatttcatccatcccggtgagtgggccgagcgcatcatcgaccgcggcgacattgtgaggatctacaagctcccgcgcgggactgatccgttcacgattactgcggcccttttcaagggggcgcaatcggtttttcggatgctcatgcctcaattgcccggcatgccgacgaaccccgggcagggcgcgtcgctctctgaaactagcgcgcgcgggaacaaggtaaaactcggcgatgcgatccgcgaagtcgctggccgtcgtctgatttatccagactacatcctgccgccccggaagtacttcgccggtccgcgtgagcagtggaccgaaatgctcctgtgtattggccgtggtcggttccagatcgccgaaggggcagcgaaaatcggtgacacgtcgttcctggcactgggcgctgatgcctctttccagattttcgaaccagggcagaacgtcagcgggcacccggcatcggtctggtggcacctggttgaggaagttggtgcgagctcgactggtaatgccggcctggacctgaccgagagttccaatctcaccccgaacccgtcggcaactacgttcacgttttccggaacgaacatcattatttctgccggagccgggtcgttcccctctgactgggttgcggggacgatcctgcgggttgaggcgatgtacccctattcggtgaacgatggcggcggcacgaatcgcgacgtcgtgacgggggatatcgctcagctcgggctggatgttggcgatgagatcgaggtggtcggcaccaacggcggcctctacctggtgaacgacatcacctcaacgtcgatgacgctcaactacagcaacggttcgccggccaatgcgttgcagaccggctccggaaatgcagcaatcggcccgcgtgggctgcgctatcggatcacggcgtacagcgcgcagcaactcaccgtcgagcggctgaccagtgcgggcggtgtcgatgttgactggccaggattcaccgctctcaactcgtctacgtcccgagtcaccattgatccgaccagcctagaagggggctggcgcggtcccttcccggcgtgcccagtatcggagaagaccaacttcgtcgagatcgacgtattttgcccggaagggctttgcggtgtaggcagggaagggcagatctaccagatccgcacctattacgacatccagtggcgagacatggccatcggcggcgcatggacgacggtcagcaagaaccatgctggcagttctctcgaccagcagggttttacggacggcatcccgctgccgtacatgatgcggcccgagtttcgcatcagaaaagtgttcgtcaaccagggcggcaactcaacatccgagtaccgagaccgcacccagtggtacgggatgcgcgcgcgcctccaggctccatcgtcctacgccggcgtcacgacaatggccgtcaggtatcggtcgtctgaccgtatcgcagcgcagaccgaaagccgcgtttcggtggaagctactcgcatgctaacgactcggcagaacggtgcatggacgagcgagatcgctacgcgagacatcgtcccgttcctctgctacatcgcgaaggaacgcggctataccgatgcggatctcgatcttgaggaactcgatcggctggacgcaatctggaaggcccgcggcgacaagtttgacatgatctacgaggacggcaaggtcacggtcgcgcagatcatggatgacgtacttgcagccggatatgcggagaagaccattaagcgcggcgtgatctctgctgcccgagacgagcctaggaccacgttcgggcacatgtactcgccgcagaacatggatggtccgctgaagatcagcatcagtgcgccgtctgaggacgactacgacggcgtcgatgtcgagttcgtcaatgccaacggctggatcgaagataccgtccagtgccgcctccccggcgatgtcggcaggaaggtcgagaagatcacggccgtcggcgtgacagaccgaaaccgggcgtggcgatacggaatgcgccgccggatggcacagcgataccggagaaccgagtattcgttcgataccggcctcgacgcgctgaacagcgacttctgggattacgtggcccttgccggcgatgttcccggcccaggactggcgcagagcgcatacctgaaatcgttcgtgatctctggaagctcggtcctgatcgagtccagcgagccgctcgactggtcactgctgaactcgccagcgctctacctgcggcgcccagacggaacggtttccggtggatatccggcgtcgaggatcgacgactaccggctgagcattcccagcatcgatttcatccctgatgtttcttgggagatcgaacctccacacctgctgctgggaaacccatacccggccctgatcagttccatcgatcccaacggcaatacctcggcatccgttcgtgcggtgaactacgaccccagggtctacacctacgacaacgccagcgccccaaactga

SEQ ID NO: 324020 - DNA, 1680 bp, Pseudomonas aeruginosa
atgactacatacgccactggcaacccgcttggctccaaagacccgcgtgatctgtacgataacgccgagaacttcgacacggctatgaacgaccgcgagaatttggcatggagcgatcgattcggcgtttccagaaaaacctggtttggacttgagcagcaagtcgctgactttcttgccgctcagggctacgagccggtgccgctggagtatgtcgacggctctccgctgaccgtagatcgtccgacccaactcatcgagcgtgatggcaacctctacagcgtcaagctgccggcatcgttcccggttgagctgaccggtaactgggcgaccgatcagaatttacttgtcgcccaggtagaccgctcgctgcgtcagcaactgagagattctggcggatcagggatgctgggattcaatgcgtctgaatcttacccatcagatacaatcggctacgaggtaaatacccttatggcgctcaaggttgtcgtagttactaattacggtgccactggcaacggaacgactgatgacacggcagcgattcaggctgccattgcagcagcagggccgtattcagatgttgtattcccgtctggaacctacctgatcacctctacgctcacctccctgactggacagcgctggcttggcaggggcggacaacgagggaccactatcaagaagggcgccaacatcgacatggtggtagtaggtacgctatccaccattcttgatatcaacctggaaggcgttggtgctacctatacaggtaaggggttccgtatcgtctctggatttagccaaacgatcacccggtgtcgtgcggtaaacatgggtggtgagcctctttacttcgacagtaacgcgggcggaggggctaacgtaacagtattcgaagggtaccctgtcgatacggatgcttatgctggctgcgctattgcgggagatactgctcctcatcctcggtttttccgtggtatgtggctcagtggtgcgaattttgcgcttggaccaggggctggtaacggcggatctatgaccgaattctatattcgtgacttgagattcgacgcgacttctacactgttccacatttccaatgggcgctgcgcgacgcttggggctacgacgacccttaagggctttgaccactcaattgatggggttgcttttgcaggccctgttgcgctcgactctgcccaaggcatcaaccttggtccgtcctgctctgtaccgtcgctcacggagaacgcgaccaactcgcaatacaactccgtctatgtacagcgtaggacctacaccccaacttggacgcagactagcgccactcctgcaattggcaatggtaccttgactggtaactatgttcgagctggtcacatgtgtcatgtgcagattgagttggtagcaggttcgactacaaccttcggggatgcagcgtcaggttataggttctcccttccgttccctggccacctttctttcaaccagagagggtttcctgtgcggatctatgatacgagcgctggtgcggatttcactgggtgggcatccattggcgcaggtcagggctacattactatctccgtgggagcgcagcaggtccgcgccacgtcgcccatgacgtgggcgaacggcgacaccttacagtgttcgttctcctatatgacacgctag

SEQ ID NO: 324021 - DNA, 2076 bp, Pseudomonas aeruginosa
atgatcgccggtcctcacggcggcgatcatggagaactcgcggtgtcatcaatgaaatacattccaggggttgacggactacgctcgattgctgtaatgagcgtcctcctgttccacgcagggtttagctctctagctggcggattcgttggcgttgatgtcttctttgtgatcagcgggttcttgatcactcagttgatttacaaggaaatatcgaccgctggaacctttgactaccataggttctattcaaggcgcgtgagacgccttttccctgctttattcgtaacagttttagttagctttatttgtgccaacctttttttcagtccagagcatctaagtagattttctggagaggttatttactctctattctcgttgtctaatttttacttctggagtgagagcggttattttaacaccgcgtctgatttcaagcctcttctgcatacatggtctctatctgtagaggagcagttttatatattctggccaatccttgtcgttttctttggaaagaaatttggttccaagggagtggtttcgttcctattgatttccggtattgctagccttctaggaaacgtttcctttattgatggctctagcgtccttgtttcatgggctggaaaggttgtatctgggtggttctctgatggcgcatcgacaatattttatctaactccatttcgcgtcttcgagttttgtctaggtgctatcattgtatttcttccaaaggttaactcttcttctgttcataactttctgttcgcatcaggcgttgcgctgattggatattctgtttttgagttcaatgcacttactccattcccaacctataacgcattgattccatgcgctgggtctgctcttgtaatatattcttccggctcttatttttccaggttgacaatatctacgtcgccatttgtattcctcgggaagattagttattcgatatacttggttcattggccgattattgtattctataaatactattattcaggggatgtatcgatatctgctaaggttgccattgtcatagtgtctgttgtgctcggatatctgctgttcaggttcgttgagactccatttcgcagccagagtggcaagactatatctagtaacggtttcaatttgtcctgcctgatgctttcttgtcttcttgtggttccatctgcaaccgcatggggaaattcaggctggacgtggcgagtatccgaaccgccaaaagggattgctgctcaactggctgattctaagaaattccacatagaccagtatggaggaaacggatatcaggagaggggatggattagcgggggaggtattgcggatgtggttgttattggtgatagccatgcacgacagtatgcatacggactagatcaagtcctcggcacgccagagaagctcaacatttaccttagctctgttagctgcattctgcttcccggtatgaccaggttgacgcccggaaccgattgggattcgctgtgctcggcagcactcgatgatgcgcttgcggctctggacagaaacccaaaggcggttcttgtgatagctcaactatgggttgaccagttaacgatagctgcgacaaaccctgggcacgtacctgttccagatagtaaaggcgctggtggatacagcctgcttatcgagaagatacgtgaactcaagagccggatcggatcgcgaaaaatgatcgtgatcggaaatgtgcctggtgctggctctccggatattgccgggtgctacaaccgaccgagctttgcgagaggctactgtctttcgaaaattggcattccctattcggatgttaggtctgtagcgattaacaaggctcttgccgacgtctcaaaaatacctggcgtgctcttcataaatccgcatgatgttttctgtcatgatgggttctgcaaatctattgcgaacgacgcaattttgtacagcgacagtaatcatctttctaaagctggttctgaatattttgtgtcaaaagagaaggacaatatcctgacgcatataaagagacctccagaattgtccttgtcaaaaggtagctag

SEQ ID NO: 324022 - DNA, 630 bp, Pseudomonas aeruginosa
atgcctatcactgagcagcagttgctgcatgtcctcccgaacgccggccctcgagccggcgtttttgttggtgcgctgaaccgcgggatgacgcgcttcggtatcacgtcgcctgtgcgagtcgccgcgttcctcgcccaagttggccacgaaagcggccagttgacccgcctggtggagaacctcaattacagcgcccaaggcttggcggcgacctggccgagccgatacctcggcgccgacggccagcccaacgccctggcgcagcgcctggcgcgcaactcccgagccatcgccaacaacgcctacgcctcgcgcaacggcaatggcgacgaggcatcgggcgatggctggcggtaccgcgggcgcgggctgctgcaaatcaccggccgggcgaactaccgcgccgccggcgccgggctgggccagccactggagcaggaacccgagcttctcgagcaaccggagtgggcggcgatctcggcggcctggtggtgggccagtcacggcttgaacgacctggccgaccgcggcgaattcgccgccatcactcggcgcatcaatggcggcacgaacggccaggcggagcgcctggcgctgtgggagcgggccaaggcggtgctgtcgtga

SEQ ID NO: 324023 - DNA, 369 bp, Pseudomonas aeruginosa
gtgatctcggcccgcgtgatttcgatcgcgctggcctgcctggtgctggtcggcctcggcaccgctggcggtgtctggatcggcgcgcggcactaccggccgcagctcgatgctgcgctggcggatctggctgcctgccgttccgctcgtgggagcctggaggccgcagtagtggagcagggcgggcagattgccgcgctgcgtcaggctggtgagcagcgcgcccgggatgccgcgcaggctgtggatcggggacggcagcaggccgcggagcagtatgccgcggcacagcgcctgttgcgtgagcgctccgctggtgatcagtgcttggcagccgaagtggtcatcgatcaggagttggggctatga

SEQ ID NO: 324024 - DNA, 264 bp, Pseudomonas aeruginosa
atgagggtggtgctgatgctggtgatggttgcgctggcgggatgcgccggccggcaggaagccgagccgcgcacggtgcgcgtagaagtgccggtggcggtgccgtgccgggtgccggcggtggaggtgccggcatgggcagcggctgggctgaagaagagcgacgacctacagaccaaggtccgtgcgctgctggccgagcggcggcagcggattggttacgaggcgcagctcctggctgcgaatcaggcctgtcaggattag

SEQ ID NO: 324025 - DNA, 264 bp, Pseudomonas aeruginosa
atgctggtcattcgattcaagggctggtcggtgaaactcgaccaccaggtgggcagcgctgggaaacatggcatctggtcgttccacggctcggagagcagctacgtaccggacatggagacgattctccggcatgctgctattcggcctgcggagccgaaagaaggcggggaggtcgaggtattcatctgtgattcgcgtatgccgcaggacgaatggcgggcggtagggaccggcgtcgcggcttatgaggccgagcgctga

SEQ ID NO: 324026 - DNA, 513 bp, Pseudomonas aeruginosa
atgtcctactccgaccccaggcattgccaccaccagcgcgtcacccaatggctcgccgcgatgcggcagcatgccgcctggctgtacgccgcggatgagcagtacctgtatctggtggccgaggcaaacgaactctatcagtgcggaatcgttggcctgcaggaccgccacgacatggtcaccgacgcgctcggcatgtactcctgggcgatcgagcacggcataacgcgcgagacgcactactgcgcggactgctgctacgacgtgctcgacggcggccgtgctgtcgggacggtggacagcgaggggatctaccacgggcccgcacccgcacgacagcgcctgggctacatcagccgggatccgctcgacgggataacatacctccgcctgggccaggcgctcgagcgcgccggcgttgtgcgcggtctggagatcgaactcgacgccggcggcacgctgcaactcgccgagcagatccctgatgacttccggccctggcggtgggcctga

SEQ ID NO: 324027 - DNA, 1584 bp, Pseudomonas aeruginosa
atgagccagatcgccgtacgcaccttccacgatatccgcgccgctctcctcgcccgccgggagctggcgctgctcgacgtgcgcgaggaggacccgttcgcccaggcccatcccctgttcgccgccaacctgccgctgtccaggctggaactggagatccatgcccgggtgccgcgccgcgacacgccgattaccgtctacgacgacggcgaaggcctggcgccggtcgccgcgcaacgcctcctcgacctcggctacagcgacgtggccttgctcgatggcggcctgtccggttggcgcaacgccggcggcgagctgttcagggatgtgaacgtgccaagcaaggccttcggcgaactggtggaggccgagcgccacacgccatcgctggccgcggaggaagtacaggctttgctcgacgccagggccgacgcggtgatcctggatgcccgtcgtttcgacgaataccagaccatgagtatccccggcggcatcagcgtgcccggcgccgaactggtgctgcgcgtcgccgaactggcgccggacccgcgcacccgggtgatagtcaactgtgccgggcgcactcgtagcatcatcggtacccagtcgctgctcaacgccggcatccccaacccggtggcggcattacgcaacggcaccatcggctggacgctggccggtcagcaactggaacacggccagacgcgacgcttcggtgcgatctcccaggacactcgcaaggccgccgcccagcgcgcccgtgccgtcgccgaccgcgccggcgtcgaacgcctcgacctggccggtctggcccaatggcaggacgagcacgaccgcaccacctacctgctcgacgtacgcacgcccgaggaatacgaagccggtcacctgcctggctcccgctccacgcccggtggccagttggttcaggaaaccgaccatgtcgccagcgtgcgcggcgcgcgcctggtactggtggacgacgatggcgtacgcgccaacatgagcgcctcctggctggcccagatgggctggcaggtcgcggtactggacggactctccgacgccgacttaagcgagagaggcgcctggagcgcgccgctgccgaggcaaccccgggccgacaccaccgacccgaccaccctcgccgactggctgggcgaaccgggcacccgggtgctcgacttcaccgccagcgccaactatgcgaaacgccacatccccggcgccgcctgggtattgcgcagccagttgaagcaggcactggaacggctgggcacggccgagcgctacgtactcacctgcggcagcagcctgctggcgcgcttcgccgtggcggaagtccaggcactcagcggcaagccagtgttccttctcgacggcggcaccagcgcctgggtcgccgcgggcctgccgacggaagacggcgaaagcctgttggcgtcgccgcgcatcgaccgctaccgccgcccctacgaaggtaccgacaatccgcgcgaagcgatgcagggctacctggactgggagttcggcctggtggaacaactcggtcgcgacggaacccacggcttcttcgtgatctga

SEQ ID NO: 324028 - DNA, 1089 bp, Pseudomonas aeruginosa
gtgagcgtggaaattctcggcatgatcaccgccacaccgagttccgaggtggaccagccgttgggggaggctgtggacgccggtttcgtccggcgtttcgcccaggcccatgaggacgccggcttcgaccgggtgctggtggggtatttcagcaatgccgccgagggcgcggtggtcagttccttcgtcgccgctgccacccggcgccttggcgttctcctggcctatcgcccgggggtgattgcagcgccgctggcggcacgccaactggctaccctggatcagttcagcgagggccgcctggccctgaacgtagtcagtggtggtaacgacgaggacctcgcgcgcgatggcgactacctcgaccatgaccgccgctacgcccgtaccgacgaatacctgcaagccctgcgtgctatctggaccgccacgggaccggtggatttcgacggcgagttctaccgcttccagggcgcctcgccagcggtgcgcccgcgccagtcgccgcacataccgatctatttcagtggctcctccgacgcagccatcgaggtcgccgccaggcacgccgacacctacatgctctggggcgagccgctggccgcggtcgacgggcatatccgccgagtgcgcgccgccgccaaggcccagggacgcgatccgcgcttctcggtgtcattccggccgatcgtcgcggataccgaggaggccgcctggaagcgtgccgccgaggtgctcgaacaggtccgcgagaaccgtgcgcgcctcggtctgccgctgcgcgaccaccagccgcagaacgtcggttcgcagcgcctgctggccgctgccgagcagggcgaagtgctcgacagccgtttgtggaccggcgtggcccggctgaccggggcgcgctggaactccaccgccctggtaggcacccccgagcaggttgccgctgcgcttggcgagtactaccggctgggcgtctcgaccttcctgattcgaggcttcgatccgctcggcgacgccgtgcgctacggccagggcctgattcccgccatacatgaccatatcgcccgcctgccgctgttgcggcacgccggttga

SEQ ID NO: 324029 - DNA, 957 bp, Pseudomonas aeruginosa
atgcgtcagaccctgagcctgttcctgcttctctgcctgctcgtcggccaggcctgtgccgacgagcgcgtgaccctgcgcctggccgaccagaagggcaacatgcgcgcccagttggaggctgccggcgcgctggacgacctgacctacgacatccgctggttcgaattccccgccgccgcccccctcgccgaagcactcaatgccggtgcggtggatgccggcatcatcggcgacgcgccattgctcttcgccctggccgccggtgcccggctgaaggccatcgccgtcgacaaatccgatccctacggtaccgccgtgctggtgagaggggattcgccgctgcgctcggccaatgacctgaaaggccagcgcattgccaccgggcgcggttccatcggccacttcgtcgcgctcaaggccttggcctcggtcgggctgggcgagaaggacgtcgaattccgcttcctcggcccggtggacgcgaaaatggccctcgccaatggttccgtggatgcctgggcgacctgggagccctacaccgcgttcgcggagaccgccgacaaggctcgggtactggtcgacggtcgcggcctgtgggctggcaacagcttcctcgctgctaccgatagcgcactggccgacccggcgaaacgcgccgtgctgcaggactacctgcaacgcctggccagcgcccagcgctgggcgtacctgcacctggacgagtattcgcgaagcctggcgcagatcatcggcttccccgaggacgccgcgcgcttgcagttcgaacgccggcgcttgcgttggcaggcgctggatgagcgaacgctcggccagcagcaggagaccgccgatttctaccaggcccatggattgattccgcagcgcctcgatgtgcggccgaccttcgccagcggctttgcggtcaggcaggcgtcggatgcggatatccggtag

SEQ ID NO: 324030 - DNA, 1050 bp, Pseudomonas aeruginosa
atgtcgacgctctgtcttccccacgtactgtttccgcaacacatcattacccagcagcaaatgatcgagcacctgcaacagttgcaccgggaccacccgcagctggccctggccgcgcggatgatccgcaacaccgaggtcaggcaacgccacctgttgctgccgatcgaggcgttgacggcacaccggggcatcgcacggcgcagcgagttatacgaacaggaggcccggcggatgtcttcccgtgcagcccgtcaggctttacgtaacgccggcctgcgcccgcaggatatccgcatggtcgtcgtgacctcctgtaccggtttcatgatgccgtcgctgaccgctcacctgatcaatgacctgggcttgccgggctccaccgtccagttgcccatcgctcagttggggtgtgtggccggagcagccgccattgcccgcgcttacgatttctccaggcagggaccggaccgtcatgtgctgctggtgtccctggagttttcctcgttgtgctaccagccgcaggatgcccaattgcaatccttcgttgccggcgcgctgttcggcgatgccgtctccgcctgcgtgctgcgtgccgacgatggcgcgaagggattcagggtcgaagccaccggctccttctttctgcctgacagcgagcactacattcgctacgaggtactcgataccggttttcattttcgcctggacaaggcggtaatgaaggcgatctcggcggtggcgccggagatggagcggctcagccgcgagcatttcgaccaggtatgcgcccgttgcgactttttcatattccacacgggcggccgcaggatactcgacgaactggtggcccatctgacgctcgccgaggagcaggtcgcgccgtcgagagccagcctcgccgaggtcggcaacgtggccagcgtggtggttttcgatgtgcttcgcaggcttttcgaaaatccgccggaagctggcgccaggggcttgttggccgccttcggcccaggcttcagtgcggagatggcgctgggacagtggacggactga

SEQ ID NO: 324031 - DNA, 1515 bp, Pseudomonas aeruginosa
atgagtcgtacgtacgacatagtcatcattggcagcggtatcgcaggctcgatttcggcagcgattctggcgaagcacggtctgaaaactctcatcctggatgccggtcaacatccgcgattctccatcggcgaggccatgacccccgagagcggcctgctcctgcgcctcctcgcgcaacgcttcgggatccccgaactggccttcatcgccagtcccgaacagatcgtccgacacatcggatcgtccgcctgcgggatcaagctggcattcagcttcgcctggcacgctgccggcgtggacagcgctgccgagcatgtcgtcgccccgccgctggacgctccggaggcccacctgtatcgccaggacatcgacttctacgccttgctgctcgcgctccagcacggcgcgaacgcccgccaccacacgcgcatcgaaggattcgagttccttcccgagggtgtggccatccgtctcgccgacggcgaaagcctgcaagctcgctatgtcatcgatgccgccgcgcagggatcgccgctcgcacgtcaactgggcgtgcgcaccaccgatggcctggcaacccacacctgctccttcttcacccatatgctcaacgtgaaggcttacgaggaagtcgccagcaacaccgaccaatctcccatccccctgttccagagcacgctccaccacatcttcgaggagggctggctctggatcatcccgttcgacaaccactccgagagtaccaacaggctatgtagcgtgggcttccagtacaactgtctgaaataccagcccagcggcacgccggaacaggagttctccaggttgctggaccgatatccgtcgatcgcccggcacttcaccgaggcccgcgtagcgcgtgactgggtgcatgcgccacggctcaactaccgtagccggaccatccttggcgaacgcttctgcctgctggcacaagccgcaggtttcatcgacccgctgttctcccgcggcctgataaccaccttcgaatccatcctgcgcctgatgccccgattgatcgacgccgtgcgccaggatcactggcaactggacagattcgccagcgtcgagcgtcacctgcgcaacgcggtggcggtcaacgaccgcctggtgtcctgctcgtacgaagctttccgcgacttcccgctgtggaacgcctggcatcgcgtctggctcagcggttcgaacctcggaggcgcctatctgggtggcttgctgcaggcactccgcgacggccagtccggctcggcgttcgatgcccacctcgagtcggcgcgctgccccggccacctgtcgttcgacgcccccggatacgaggacttcttcgaaagcgcctgtcgggtgatggacggggtgcgacagaagcgcctgtcatcggcggatgccatctcgaccctgcaccgcctgctcgggcagcacgccgcagacctgctgccgtatgactatgccaacctggacaatcgcttcctgcgcaagtgcagggttcaatag

SEQ ID NO: 324032 - DNA, 969 bp, Pseudomonas aeruginosa
atgaaaacacttggatttagcgatgatttcgacctctatatatccgtagcacttaccggtagtttttcggaaaccggcagagtcttcgagatgcccgcttcatcggtcatgcgccgaataaacaacctcgaggaaaaactcgagaccagactcatcaatcgctcgaccaagaaactggtcttgacggaaaccggtgctctgtttctaaaacacgccaggaaaatatccgagaacatcaaccaggccagaaacgaaataaaggaacacacctcttcggccgtaggtacgttgagagtctcggcaccggtcgcgttcggccggcgacatatcgcaccactggtcagcacactgctgaaaaagaatcccggcctcaaactggatttctccctgaacgacaggattgccgatcccgtcggggaaaaactcgatctctgcatccgtctcggcatcctgccggacagcagcctgatctgctcgaagctggcggggctacgccgggtgctctgcgccagcccggaatacctgctgaagcacggtctgccacgcaccccggaagaactcgaacggcacacctgcctgcaacacaacggctgcagcaacgcctcattgagctggcagttcagcagcgccgacattaccaggcgaatcaggatctcgccggtcagccgcctgtccgtgaacagtgccgagctcctggtggaaggagccttgcaaggcttggggatcattcatgcgccgacctggctggtccacgaagaagtggccagcggcaggctggtgacctttctcgaccgacacgctctgccggagcaggcacagggtggcatctacgcactgcgaccgcagggttcggtggtaccggcgaagatctcgctgtttctcagcgagctgaagagcgcaatcggcgagacgccctactgggacctgccgttccagcagacgccagctcaattggccggctccttctaa

SEQ ID NO: 324033 - DNA, 267 bp, Pseudomonas aeruginosa
atggatatggaagagattaagggaaaaatacgtcgttatattatcgacgaccttgtcggtgatggtgttaaggaaaacgagttgcaggacgatactccgctgctcgagtgggggatattgaattccatgaatatcgtgaagcttatagttttcgtcagggatgaaatgggagtgcatattccctcgacgcacataactggaaagtatttccgggatatcaatgcggtttccacgaccgtcatgcagctcaatgccgaaccggcttga

SEQ ID NO: 324034 - DNA, 1350 bp, Pseudomonas aeruginosa
atgggtgattatgatttcgacgtaggcatcatcggcggaggcccagccggttccacgatggcgtcttatctggccaaagctggtatctcgtgcgccgtattcgagaaggagctgttcgagcgcgaacatgtgggagagtccctggtgccggccaccacgccggtcctgctggacatcggcgtgatggacaaaatcgagaaggccaacttcccgcgcaagttcggtgccgcctggacctcggcggattccggaccggaagacaagatgggtttccaggggctggaccacgacttccgcgcggcggagatcctcttcaacgagcgccagcaggaaggggtcgatcgtgacttcacgttccacgtcgatcgcggcaagttcgaccgcatactcctggagcacgccggttcgctgggcgcgaaggtcttccagggcgtcgaggtggcggacgtcgatttcgtgaagcccggtgatgtccgccttaatgtgaagctcggcaaccagaaggtcggcatcaggaccaggatggtggttgacgccagcggacgccatgtcctgctcgggcggcgcctggggttgcgggaaaaggacccggtgttcaaccagttcgccatccacgcctggttcgacaatttcgatcgtcgctcggcaacgcgcaatccggacaaggtcgactacatcttcatccacttcctgcctctgaccaacacctgggtttggcagatcccgatcaccgagaccatcaccagcatcggcgtagtcacgcagaagcagaactacacgaaatccggcctttcatacgacgacttcttctgggaggcggtgaagacccgcgagaacctctacgacgccctgaaagcctcggaacaggtgcgtccgttcaagaaggaggcggactacagctacggcatgaaagaggtctgcggcgacagcttcgtcctggtcggcgacgctgcgcgcttcgtcgacccgatcttctcaagcggtgtgagcgtggccctgaacagcgcacgcattgccagcaaggacatcatcgctgcggtcaggaacaacgacttcggcaaggccagcttcgccgagtacgagggaatgatccgcaacggcatcaagaactggtacgagttcatcaccctctactaccgcctgaacatccttttcaccgccttcgtgcaggaccctcgctatcgcctggatgtgctccagcttctccagggcgacgtgtacagcggcgagcggttgaaggtcctggacaagatgcacgaaatcgtcgccaccgtggaaagcgatcccgatcacctctggcacaagtatctcggtgacatgcaggtgccgaccgcagaaccggcgttctga

SEQ ID NO: 324035 - DNA, 7266 bp, Pseudomonas aeruginosa
atggttccgaaggcatctgcgggtttcgaacccgtcgcaatcatcggcagcgcttgccgttttcccggcggagcgtcgtcgccggaggcattctggaacctccttcgtcgtgggaccgatttcgtcgggccggtccccgcgggccgctgggatggcgaggcgattcacgacgctggtgcgagccgtcccggtaccacctattgccgggagggggccttccttgatgaggtggaccgcttcgacgcgcgtttcttcgggatatccgcttccgaggctcgcgaaatggacccccagcagcggctgctgctggaggtcgtctgggaatgcatggaacgggcggggctctgctctgaacgcctgaaaggttcccgcactgcggtctacgtcggcatgctgggcatggattaccttaccctgcatgcgcgcgaggccggtatcccggcgatcaatccattctatgcggctggcaaggagttcagcttcgccgccgggcgcatcgcctatcaccttggcgtgcacggtccggcgatggcggtgagcaccgcctgctcctcttcgctggtggcgattcacctgggttgtcgcgccttgcagaatcgcgaggcggacctggcgatagccgctggcgtcaatctgatgctgtcgcccgagctgactatctacatgagccagatcaaggcgatttcgccgagcggacgctgccgggtcttcgacgccgccgccgatggcatcgtccgcggcgaagggggtggcgcgttgctgctcaagcgtctggaggacgctcgagccgacggcgacccgatcctggcggtgattcgtggctcggcgatcaaccaggacggcgagagcgccggccagaccgtgcccaacgccaatgcccaggccgctgtggtacgcgcggcactcgacgctgcggggctggagatcgacgacatcgcctatgtcgaggcccacgggaccggaacgcccctgggcgatccgatcgagctgtcgtcgctggccgaagtcttccgccagcggaagaaacctctgctggtgggatcggtcaaggccaacatggggcacctcgatgccgccgccggcatggctagcgtgatcaagacgatgcagttgctgcgccatggcgaagtaccgccgcagttgcacctggtcaagccgaatgcgctggtcgactggcagcgctccagcctgcgggtggcaacttcccttgagacactgccggaaggaccgcgcctggcaggcgtcagtgcattcggcctcagcggcacgaatgtccacctcatcctcgaaggggcggatagcgctgaagcgccgccggatgctgtcgacattcagcggacctgggtgctgccggtgtcggcgaagacggaagcggccgtacgcgagctggcgcggcgctatgcccaggcgctgccggaggaagacgcggccctgcgcaccttcgtcgcccgggtggccagctaccgcgaccaccatgtccggcgcgcggcgctggtcggtggcgacgccgcgagcctccggcaacagcttgcgtatcttggcggtggaacgcttgctgtcagcgagatacgcgacggcaagccggccgacgggccggttttcgtctataccggccagggcgcgcagtggctcggcatggccaccggcctgctgcaacgcgagccggccttcctcgagacgatccgcctgtgcgatcggcacatgcgcgagtggtccggttggtcgatcgaaaccgagttgctcaggccggcgggggagtcccgtctgcacctgaccgaaatcgcccagccggcgattttcgccatccaggtcgccctcaccgaatgcctgcgccgctggggtgtcacgccaggcgcggtggttgggcattcgatgggcgaggtggcggcggcctggtgcgccggcgccctggacctgcgctcggcggtacaggtcatctatcaccgcgccaacgccatgaagggtaccctcggcggcggccgcatgatggtggtcggggcttccgccgaagagctgcaacccatgcttggcccgtcgctggaaatctcggtggtcaacagccacgtctcctgcgtggtatccggtgaggcgggcgccgtggccgccctggaacagcgcctgggagaagccggcaggttcaccttcctgatgccggcaccctatgcgttccattcgtggcagatggagccgtgccttgccgacatccaggccagtctcgccgacatcgagccggatgccgcgaaaattccatggatttccagcagcgccgctaacctgcagggcgaatgcgccgacgccgcctactgggtgcgcaatgcccgcggagtggtgcgcttcgatcgtgctatcgagcgactgctcgaggacggcgcacgcctgttcgtcgaattggggccgcacgcggttctggcgcagtcgatccagcaactggcggtgcgcgccgggaaagcggcgcgggtgttcagcgccctgcagcgcgagggcgatggatccacggagctggcggctatcctcgccggcctttacgaaaacggtgtggcgccggactggaaggcataccagggggacgctggcttcgtcgaactgcctacctacccctggcaacgcgaggcctactggttccaggcgacgcagggcgtgccggcgcgcgcgcaagccttgcatgccagggtgcaggtgttcgacgctgagggacgactctgtgccacggccgaggatgtcgccctgtgcacggtcgacgagcctgcggcagcgcttgccaatgttctggcgaagaaggctggggcgcgcccggcggtcaccctggcgcaggcgcgggaagtggtcagcgcggcgttgtcggagatactcggggtgccatgcgacgagctggatgccgaaaggggttttttcgaactcggcctgacctcgatctcgctgatcgagttcaagcgcaagctggaggcacgggtgggattggaactgcctgccacggtcggcttcgactatccgaatctggaggcgctggcgcggcgcctcgagcagttgggtgcggcgaaggaaatccagccgacgacctgtgcgccggccgcgcgcggggcggataccggacacgaggtggcagtgctggggatggcttgccggctgccgcgtgcggacagtcccgaggcgctctgggaagtattgctcgagcaggcgacatgcgtcgtgccggtgccgtcgtcgcgcctgaccgagccggtcaacacccggcgccatgccagcctggtcgagcgcgtggaagggttcgacgaggactttttccggatctcgccacgggaagcgggcagcatggatccgcagcaacgcctgttcctgatggttgcctgggaggccctggagcgggcaggtattccgccgcatgacttgcgcgaacgccaggtcggtgttttcgtcggcgccaatgcccacgactacgaggcacgtttgctggcctgcgccgccggcatcgacgcgaactacggtaccggcagcgcgttctcggcgatttccggccgactgtcgcatttccttggcctgcgcggtccctccctgaccgtggacacggcgtgctcgtcatcgctgacggctgtgcacctggcctgcaacagcctgctagccggggagtgcgagattgctatcgtcggcggggtgaacgtcatcgcatcctcggcaatcttccaatccatgggcgatgccggtgcgctatcggcggacggcacctgcaagaccttcgacgatcgtgccgatggctacggccgcggcgagggttgcggcgtggtgatcctcaagcgggcggaacgggcgcgggcggacggcgaccgggtcatcgccgttctgctgggctcggcggtcaaccatgacggcgcctgcgcggggctcacggtacccaacggaccggcccaggaggcgttgattcgcgaagcgctggccaacgccagcctgtcggccgcggcggtgggctatgtcgaggcccatgggaccggcacagtgctcggcgatccgatcgagttgcaggccctggccaacgcctatcgaggtactgagcgcgtgcccttggcggtggcatcggtgaaaggtaacgtcggacatctggaggccgccgccggtatcgcttcgttgatcaaggcctgcctggtggtcgagcgtggggtgattcccggacaggctggcttccagcgtcctaacagccgcttcgactggcaggcaacgagtctccaggtgccgcaggccaatcagccctgggaggtgccagcggcagaacggatcgcgggcatcagcgctttcggtttcaccggtaccaatgtccatgtgctgttgcgcggtgaggtgcgggaccccagcgaaaggagcgacggcgacggttcgcgaccctggccgttgtgcctctcggcgcataccgacgaggcgttgcgggacatggccgccagctacgagcgcttcctggccgctggcgaagcgtccgcagcggcggtctgccgtagtgccgcgctcggccgcagtccgctcaaggcacgcctgctggtgttcggacgcggttcagccgagctcgcggtggcgctcgcggactggcgccgggggatcgatgcaagcatgcctgctgagctggacgaagggactcgcagcgcgtgcacggccttcctgaatggacagccggcggactggctcgcggtgttcggcgatgtccgggcatgggtcgacctgccgacctatccctggcaactgcgtgattactggctcgagtatggcgtccgggagccggcgctggaggatgatcatccgtgcctgctgttgcacagccgtgggatgggtggcgagtggcaatggctgggtcgcctgcccgaggaaaagagcggcgacgagactcactggcatccgtccggtgcgcttctgctggatgccttgctgcaggcgctggcagtggccgagccggagcgcgccttcgccctggtcgagctgcgcctgtcggtgccacgattttcgcgttgcgggccgctcgcttcgcggctgaccttgagcctctcggacaaggcctcgatcaccctggcgttgcgtggcgagcatgaccatgaatggcgtgacgtgctcagcgccgtgccgttggagtgcgcctccccggatgtcgatcagctcgaactgtccccggcggacctcggccaggccgaagccggcctggttgcggccgcgctcgaggggcagcgcgacggccggtacggcaactatcgctttcctctgcgcagcgatgcggctcgtcgacggctgctgctggcggaaaccctcgcgctcttcgaaggcgcccatgccgctcccgtggtcggattcgcccgggtgcaggtcctggacgacctgcccgagcacattgcggtgcgggtttccggcgccgaactggggcgcctgcaatcgctgtacgcggtcgacgaggatggctgcgtggtggccctgttcgaagggccgctgttgctggcggacgaaccagagcaactggccttggcggatgaaccggcagcctccttcctggtcgctcgctgggaggactttccggatgagccggtggtacggaaaagcggcgagtggcggcttctgcttcctggtggagccggcatgtcgcgcctggtttcggcattctcggcgcgcgggctgggcgtccgcgagatgccctgggaggacgtcccggaccgctcggagtggctggccgaggctgcgctcgatacgacctgtgagggcctgctcgtgccctgctgcggtgactgcgacgagcagcgtttcgctgactttctgctcgccctggggcgggcggtggcgacgtgcccgacgggtaagccgatctggttcctgcatccgccagccgagcgtgccgatgccgccgcagccaggaggctcgggatactgtatggggcgacgcgggcgttggcgctggaacaacccgcctggtggggtggggtggtcgagctcgacccggccgacggtcgcggcctgcatcgcttcgctcgcctgcttgtcggcgtgccccggcacgatcacctgaagatccgcggaacgcgggtcttcgcccggtatctggaggtccgaccggccgcgtcgcgccgaatcggtagcgcctcggcggggggcggcacggttttgttgcatgtccgcgccggtaccgacctgacgccctacctgctgctctcgccggtacgccgggcgcggcgcctggtggtgctgtgcgaacagccaccgagactgcccgtggagtgggccggcgcgccactgccggagacattgattgtcgattgcgcggaccgtcgcgccctggccgaggtccttgggcgcctgcaggcggagcagtcgatcactggtttcatccaggcacggccggaatggaccgctggtcggttggaagagccgacatccgccacccgggttgccgccgctcggcgcgaaatgcacgcgctggagaacttccatgggttgctggcgggacagccgctggcgttcttcctgattctgggcagcctgtcctcgctgctggggggggcgggtttcgcccaccaggcgatggtcgatggcttcgccctgtggcttcacggcgaacgccgccgcgcgggacttccctgccagttgctgctgggcctgcagaccgaggccgagctggatggtctgcacgaggttcgtcaacgcctgctgggcagcggcctgcagccgctgaaggaggagcggctcgttcgggcgctcgagactctgctggaggagcccgacggctgtgtcggattggccgatggtgtcgattgggcgcagttgaagccgctctaccagaacgagctgccgtggccgctgctggaccggctcggacagccgtccgcgacggttccggaacgggctgcggggttcgcgcggatgcccgagcacctgaggcgcagggccctggcggcattggtagcggaacaggtcgccgcagtcttcggctatccggatgcggatgccatagagcgcagcaagggcttcaccgagatgggcatgtcctcggtgatgtcgctggatttccgttcgcgcctcggccgcgcgctgggtctccagctgcccgccaccttcgccttcgaatactgctcgatagatgccgtcaccgactatctcgccctgcacctgcaggccgggcccgcacccgtgtccaccgagcccccggcgcgccccgcgcaggagcccggtgagcggcgcgagatatccgcgctgtcgcgcagcgaactgatcgacgcgctggaagaggaactgagagatatcgagaactactag

SEQ ID NO: 324036 - DNA, 5220 bp, Pseudomonas aeruginosa
atggaaaacgaaacgtcagatgtgagcaagcagcagttggaggccagtctcgcccaggccatcggcactatccgcagcctgaaggagaagctggcgggaaggacgcacagcggggccggaccgatcgcggtggtcggcctgggttgccgcctgccgggtggcgcggatagccccaggcggctgtggagcctgttgaagaacgctaccgacgcgaccggcgacatgcccgccgagcgacgctacgccaccgattactacgatcccgacccggatgtcccgggaaaggcctacgtgatgcgcggcggcttcgtcgaaggcgtggagcgcttcgacgcggccttcttcggtatctcgccgagcgaggccgagggcatggacccgcaacagcgaatcgcgctcgaagttgcctgggaagcgctggagcatgcggctatcgacccgttttccctcgatggcagcaagctgggcgtgttcatgggggccagtaccaacgactatgtacggctgcgccagcaactcggcgaggtggctgacgtcaatgcgcaccagttctacggcgagaccagctttatcgccggacgtatcgcctacaccctgggcgggcaaggcccggcgatgatgatcgacacctcctgctcgtcttcgctggtggcgctgcaccaggcctgccagagcctgcgcagcggtgaaagcgacctggcgctggccggcggggtgaacctgatcctttcgccctatggtttcgtcctggtcagcaagttgcgggcggtcgccagcgatgggcgttgcaagaccttcgacgccgccgccgacggctatggccggggagagggctgcgtggtgctggttctcaagcgcctggccgacgccgagcgtgaccgggatccggtgctcggggtgatccagggtagcgcgctcaacaacgacggctccagcagcggaatcacggttccgaacatccacgcccagcaagcggtgatcgccgctgccttgcgcaatgccggagcccaggcgagccaggtcgactacatcgaggcacatggtaccggcactccgctgggcgacccgatcgaactgcgcgcgctggatgccgtgctcggcgcgcagcgcccggctgacaggccgctgctggtgggatcgataaaggccaacatcggccacctcgagccagtggccggcgctgcgggactggcgaagatcctgctcgcgttgcaacacgacgagttgcccggacaggtcaacttccacactcccaacccacgcgtcgaatggcgacgcatggcgttgcgggtggtgcgcgaggcgactccctggccgcgtcacgagggccagcggctggccggcgtgagttcgttcggcgtgaccggaaccaacgcccatgtgctggtcggcgacgctacaccgcgggcgcgcggagcgggccggggcaatccctggcagctgttcaccgcgtccggccgtggcgagacaccgaggcggcagatgtgcggacgttacgagcgctatgtcgccgaacatccgcaggtgccgctggaagacctctgctatacggtgaacgccggtcgcgcgcacttcgagcatcgtttcgcttgcgtcgccgacgaccgtgagcgcctacgcgagcaattggcggcctacgcttctcggaagctggtcggcgataccttcgagggtgtctgtcggcctggtgtgccgccggcatccgcctggctgtttcccggccagggctgccagtatccgggaatggccaggacgctgtacgacagcgagctgccgttccgtgaggcattggacgagtgtctcgtggcgttgcgcgggatgggtgtcgagctgtcctgcgccttgttcgagtcgacgccggaggcagaggcgttgctggcgcagacacgctatgcgcagccggcgattttcgccgtggaatacgcgctggcccgcttgtggatggcctggggcgtgctccccggcgcgctgttcggtcacagtttcggtgaaattggcgccgcctgtatcgccggggccctcacgctggaggacgccctgaggatggtcgaggcgcgcggacgcctggcccaggaactgatgaccgccggaggggtgatgcatgccgtgaacctcggtgaagcggaattgctcgggctgctgcgcgagcaaggattggcgggtatcgagctggcggcggtgaacagtcccgaggacctggttgtcgccggtcctgaagcggacgtcgaagtgctgctggaaaaactcgcggcgatgcaggtgaggacccgcaagctcgcggtttcccacgccttccacagtgccgcggccgagcccatgctcgagcgtttccgcgaggtagtccgcgagatccgtttcagcgagccgcggataccgctggtgtccggcgtcagcggacgcctgcatacgctggaaagcctgtcgtccgccgactactggtgtgcccatagccgtgacagcgtacgtttcagcgacggcgtacgtaccttgctggagcagggtaccgagctgttcctggaagtcgcgccggaagcggtgctgacaccgctggtgcttcgtcaccaggtggaccggtcattgctcgtcgtgcccagcatgcgccgtggcggtgatgcagtgcgggaaatacgcctggcggctgcgcagttgtacaccggtggcgtcgacctggattggcagcgcctgcatgcgcacgacggcgccttgcgccaggcgttgcctggctatgctttccagcgcgagcgctactggtttaccccggcccgtgcccaggctggcgggcgcagccagattggcggcgtgggacgcttgctcgggcaaccgatcaatgcgccattcccggtcttcgaggcgaccctcgacgccgatgccatgctggcgctgggcgccacggctagcgaggagctggtgcggctggagccaggcaggctgctttcgctcctgctcgaggatgtccttgaccacctcggtctggatgacttcgagctgagcctggagcgactcggtgagggcctggcgatccatcctggcgatcggctctatctctataccgagctggaagccttgccggaaaaatgctggtccgtcacctgctcgctgcgtagcgaggccgaatgccaggcgggcctgggttggcgcgaggcggtcttggcgatggtccatgcgctgccggcatcgagcgctctgtcgccgctggacggggaggggcggtcggtggaactcggcggcgctgctagcgggtgcctgttcgcccgcctgctcgacggcaagccggcttccgccctcgagtcgatccgcaggatgcgcggacgccgtgcgctgttgaaccagacctggcgatcgctcctcatgccggccgaggatggcgtgggcttcgactgcaacctttacgacgccggtcaggagctcctcggtacgctcgaggggatgtcgctcgggatggcgctggaagatgccaggttggtggaacgcatcgcgcaacccgatgtgctgtatcggctcgactggccatcgcggccacgccagccaggcaacccgtgtctcggcgaacgaggtttcgcggtgctgtcgtcggatatcgaggccgctcgccagttggcggcgctcatgcaggcacgcgggctgcgcgcgcaacccttccagcctggccaactgcaggaggcgctggatagcgtcgccccctgcgatatcgtttttctcgacgaacgcgcaaggggggccgggccaaccctggatagcctggacacgctgcggtcacgggtactgcatccgttgctggcgctgatccaggcgattctgccacttggcgacgaggccgttggccggctctggctggtcacctttggcgcccaggccgccgggctcgccagcggcgtgccggtgaacgtggcgggagccccgctatgggggcttggcaagagcatggcgctcgagcatccggagcactggggagggttggtcgacctggcgccggacgaccccgactggtgcgccaacctgctggacgaactgctgctgaacgatggtgagaatcaggtctgcctgcgtcgcgatggccgccgggtgcatcgcctggagcgcgacaccggcactggttggccgaactccgtcttcgccccgagcaaggatggctgctatctgatcagcgggggaatgggtgggataggcctgggcatggccgattggctactggcgcacggcgctggtcaggtggtcatcaccggacgcagtccggcgcgggcccagggcgagaaactggcgcgcttcggtgcggcggtctcccgggttcgctacgtacaggcggacatcgcctcgaaggcggagatgagcgcattgttcgaggagctgtcggcgatgccgggtgggctccgcggaattttccatgccgctggcatttcgattccacaggatcttcgagacgccgaccgcgacagcttcgaccgggtgctgaggccgaaggtggacggcgcctggctgctccatgaattgtccctggggctggaactggagttcttcgccatgtgctcgaccatcgcttgcgtctggggctcccagcacatcgccagctacgccgcagccaatcagttcctcgatggcctcgcggcctatcgccatgccctggggctgcccgcgctggtggtcgactgggggctgtgggctggcggtagtcatctgttcgacgaggaagtgctcggtttcctcaagagcgttggcctgaaaccgctggcgccggcccagggcatcggcttgctggcccgcttgctgggcagcgacgttggccaccaggtgatcgccggggtcgactgggcgcgcttcaaggccttgctcgagtcgcgcggggcgcagcccctgctggagcacatcgaggtcgaggacacaccgaccaggcccggcgatgtcgcggcggaccagggcttgctgcggaagctttccgcggtggaggggcgcgagcgcttccagttggtcgatgactatgtctgggggcagtacgccaacctgctgggtgtgaaggtcgagcaggtccgggccaagctcgaggacggaggcagtctcatggactacggactcgattctctgttggtgatggagatggtggcgcgttgccggcgcgacctgaaggtgcagataaaggcccgggaattcctcgagtgccccggcctgatgtggccggatttcctcgccaggtccatcgaacaacaaggagtgctcgacgccgtatag

SEQ ID NO: 324037 - DNA, 1638 bp, Pseudomonas aeruginosa
atggttggtatgtccagcatgcctggaacgaggcatttcgatatcgcgctgttcggctccacggcgagcgtgtacatgctcgccgcgtgcttggcgcgtaatggcattggcgtggccctgttccaggaccgttcgacagagcccgataccacgggggaggcgacgattccctatacctcgatgatcttcgaactggtcgctgaccgttaccaggtcgcggagatcaaggatatcgcccggacccgcgatatccataggcaggtaatgccgtcttccggggtcaagaagaacctcggtttcatctatcacgagcccggtcgcgccgtggacatgggcaaggccctgcagttcaacgtgccctcggagcatggcgagaaccatctctaccgaccggatgtcgatgctcatctgctgaacgccgcggtgcgctacggtgcgacagtcttctcggtcggcacggatgcgcggatcgaattgcatgacgacaagggagtgcgggtcctcacccggcaaggccagtgggtcgctgccgacttcctggtcgatggcagctatcgcggggccgcgctggcgaaagcgttgccgcggatgccggacgaggcgccgctgaggacagcctcgacctgcctggcggcgcacatgctggatgtcgagccgttcgacgcctgcgtgtcgtccgactttccgggccaatggcatgccgggacgctgcaccatgtgttcgccgagggctggatcggcgtgatccccttcaacaaccaccaacactcgcggaatccgcgggtctcggtgctgctgtcgatcaatcggagaatgctcgatccggccgatggggatcgcctgctggccgaactgatcgaccgctatccttcgctgcgccagcacttggcgagtgctcggcgggtaggggagtggcaggtccgggcaccagcccagcacttccaccatgagcccctgggccgacgccacctgctgttcgacgagggggcggcgtccaatgacctgctgttttcccgaaagctgtccaacgccggcgagttggtcctggcgctggcgcaccgtttgatcgatgcggcacgccagggcgattaccagagcaccgccttgcaggcgttcgtcggcatccagaacagcatcgtccacctgaacgaccggatcacccggggagcctatattgctttccgcgatccggatctctggaacgcctacgctcgtgtctggctgctgcaatcgatcgctgccaccatcaccgcccgcaagatcaacgatgccttcgcccggacccgggacccgcacgtcttcgacgagatcgaccgggtcaccgacgacggtttctggatgccgctctaccagggctacaaggacatcctgaacttcgcactggaacgttgccatgaagtcgagatcgggaacctgtcgtcgtccgacgccgcgcggcagatcttcgcgcagcttgccgctgccgattttgttccgcctatttttgattttgctgatcctgacgctcgtgtctatcagctgactacctggcgaaagctcaaggcgttgtggtgggggctggtgaaagtgccctcggaagtggggcgcctgatcttctaccgctccttcagaaacccatccatgcgcaaggagagttga

SEQ ID NO: 324038 - DNA, 1134 bp, Pseudomonas aeruginosa
atggacttcaaccttgacgattcccagaaaaagctggcacgacaaatcgccgagacctgccgcgaacgcctgccggagcgcccgaccgcgcatttctcgcccgagcaatgggctgtctgcggggaggccggcctgctcggcctctccattccccgcgactatggcgggcaggggcttggcgcgctgtcgacggcggtcgcgatgcacgccttcggacactcctgtgcggacatgggcctggtgtttgcagcggcagcccaccagttcgcctgcgcgatgcccatcgtcgaattcgccagcgaatcgctgcggcgcgacctgctgccgaagatggccagtggcgaactgatcggctccaacgccatcaccgagccaggcgcgggttccgactcgaccgcactgaagacccgcgcactgccgcaggacgacggtggttatatccttgacggtttcaagagcttcgccggcaacgcaccggtagctgatgtattcgtcgcctacgccaccacccagccggaatacggtgcgctgggcatcaccgggttcgtggtggagagcgagcgcccgggcgttatggtcagcgagccgttgcgcaaggtctgcctgcgcagctgtcctgccggcgaagtgactttcgccggctgccgggtccctgttgccaaccgcctgggtgaagaagggcagggccgcttcgtgttccagagttcgatgggctgggagcgcgcctgcctgttcgcggcattcctgggcatgatggagcgccaactcgaagagacgcttgcctacgcccgttcgcgtcgccagttcggcaaggcgatcggcgcctaccaggcggtatcgcaccgtatcgccgaaatgaagtttcgcctggaatcctcccgcctgctgctgtaccgggcctgctggggcatggaccagggcgatccccagcaactccacatcgccttgtcgaaactggccatcagcgagggcgcgctggcctcgagcctggacgctgtgcgcatcttcggcggtcgtggttgcctggaggggttcggcatcgaggaaatgttccgcgactcggtcggcacggtgatcttttccggaacctcggacatgcagcgcgagatcgttgcccgggagctcggcctatga

SEQ ID NO: 324039 - DNA, 1494 bp, Pseudomonas aeruginosa
atgaagctcctgcatgagtgcctcgtgcgcagtgcgcgcgagtatccgggcaatatcgccgtcgttgaccaggccggctcctgtagctatgccgaactggacgcgcgggccgaggcctatgccggcttgctggttgcgctgggggtggggcgcggagagcggatcctgctctgggcggaaaagtcggtggagttgccggcgctgatgcagggggccttgcgcaagggcgttgtctatgtcccggtggatccgctgggaccggtgtcacggctggaaaagattctcgccgacagcggggcgagcctggttttttccaccgcgagtcgtctggcggatctggacgctctggaacggcgcccgcgtatcgtggtcctggacgatcccgcatgccccctgcactggtctcatgtggagctacccgccagcgcatccgccccggaggaaataggcgaacacgatctggcctacatcctctacacctcgggctctaccggcacgccgaaaggcgttgcgctgagccaccgcaatgccctggccttcgtggagtgggccaatgagcgttttgccttcgaggcacgcgatcggttttccaaccatgctccgttccatttcgacctgtcggtgctcgatctctattgcgccttcagccgtggcgcggcggtttgcctggttccggaaggcatcgccttttccccggcgctgttgacggcgttcctccaggaacagcggatcagcgtctggtattcggtaccttcggtcctgctcatgatgatgcgcgacggcaacctgctgcagtcttgcccggactccctcagagtcgtgctgttcgccggtgagccttttccgatcaaacacctgcgtgtgctccgggaagcgttcccagggctgcgcatggccaacctgttcggtcccaccgagaccaatgtctgcacctgttacgaggttgtcgcggtcgatcctgctcgtctccagccggtgcccatcgggacggctgcttccggcgacgaagtctgggcggaaaaggacgatggccggcgctgcgaggtcggggaggagggcgagctgatcgttcgcggccccaccgtgatgctcggctatttcggccagccggcggttaccgggagctatcgcaccggcgacctcgtcaggcaactggacgatggcaactacgagtatctcggtcgtcgtgacgacatgctcaaggttcgtggctatcgcatcgaacggggcgaggtggaggccgctctgctggcccatccgcgggtacgcgaggctgcggtgatcgtcgccggtggcggcatggacgccgcgctctgggcgttcctggtgccaagcgatggcgaggcagtctcgctcatcgaactcaagcgtcactgcgctgagcgactgccgcgctacatgatcgtcgaccgggcgaagacgctagcggaactgccgcgcaacgctaacggcaaggtcgatcgcttcaagttgaaagccctggtggaggactga

SEQ ID NO: 324040 - DNA, 795 bp, Pseudomonas aeruginosa
atgaggctctctgcgatgtcggaaatggccctctggtttccctatgccaaccggccacggggaaagatgcgactattcacctttccctatgccggcagcggtgcgtcggtattccataactggttcctgccgctgtacgacagcgtcgatctttacgcactgcagttgcccggccgggaaagccgtgcggccgaggctccctaccgcgacatggaggaggccggcggggcgatcgccgattgcctggcgaacctgttcgacgacgatgtcccgtatgttttcttcggccatagcatgggcgcgctgctggcttaccgggtcgcctgcgtcctgcgcgcgcgtgggcggacggagccctgtcggctagtgctttccggcatggctccgccgcacctagggcaggcggtgcagcccttgcatcgcctgccggccaaccaggcgatcacgctgctcgggagaatgggcggggtgcctgacatcgtacttggcgagcccgacctcatggagatgttcctgccgatcatccaggcggatatcgagctggtctactcccatggctgccgggagccgcagccgctggactgcgcgctgacctgcctggcgggagatcgagatcgaatcgcccccgccgatcggatggcggaatggcggcgctacagcagcgggccgttcgagcatgcctgcctaccgggcgggcattttttcctcaacgaaagcggggtccaggccatggcccggattcgctcggcactggctgcgagcagcgcggtctcgtgcgcgttcgtcacactctga

SEQ ID NO: 324041 - DNA, 651 bp, Pseudomonas aeruginosa
atgagcacacgacgccgcaccccacgaagcgacggcgaaagtacccgcgcacggattctcgaagtcgccggccggctgttcgcccagcacggttatgccaataccgccagcaaggccatctgcgaggaagctggggccgaccttgccgcgatcaactaccacttcggtagccgcgacgccttgtacaaggcggtgctggtcgaaggacacaagcagttcgtcagcctgcacgacctccgcgaactggcggatagcgctcttccgccggaaaccaagctggagcgtttcatcaatgccatcgtttcccgcctgctcgacgaccgcagttggcagagcaaggtctgcgctcgcgaaatcctcgcgccgacggcgcacttcgccagcctgatccgcgaggaggtgatgcccaagttcgaagccttggagcggatcatcggcgagatcaccggcctgccccgccacgaccccgccctgtcgcgctgcgtcataagcatcatcgcgccctgcctgatgctgatggtcatcgatcgcgaccagtcgagcccgatgcaagcgatcctgctgcacgacgccgacgccctgaagaaccacctgaacctcttcgcccgcagcggactggaagccatacgccggcaccacgacccctcctga

SEQ ID NO: 324042 - DNA, 1011 bp, Pseudomonas aeruginosa
atgaagaagcagctgattgccggagccgccgtactgcttgccataggagcgggggcgagctggtatttccttggcgcggacgacagcgaggatgccctgaaactgtacggcaacgtcgacatccgtcaggtttccctggcgttcgagaacagcgaacggatcgttgcgctgcatgcggaggaaggcgacaaggtgcgcgccgggcaggttctggccgagctcgatacgcgcacccttcgcctgcgtatcgagaccgccagggcgaggatcggtgtgcaggagcaagtgttgctgcgcctgcgcaacggcacccggccgcaggaggtcgaccagtccagggcgcgcctgcaggcggcacaggcggaagccgaactggcccgcctggagttggtgcgcctgcagcggatcgccggtggcaccgacggcaagggcgtcagtcggcagagcctggatgcggccgccgcgcgactgaaggtcgccagggccgaagtggagaaccagcgcaaggcctggcagctcgccgacatcggcccgcgggacgaggacatcgcccaggcgcaggccgaactggaggtcgcccgggccgacctgaggcttctcgagcattatctttcgcaggcgcaattgaaggcacctcgcgacgcgaccgtccggacgcgcttgctggaaccgggcgacatggcttcgccgagcaggccggtgttcgctctggcgctgaccgatccgaaatgggtgcgcgcctatgtcaacgagcggcaactgggacgcgtgcatcccggacagaaggcgcgggtggtcaccgacagcgtgccggagcggcccgtcgatgggcgggtcggctatatctcctcggttgctgagttcaccccgaagacggtggagaccgaggacctgaggaccagcctggtctatgagatccgggtgttgctggacgatcccgaggatcgcctgcggctggggatgcccgccaccgtctacctcgacgaacccggcgccgggggtgggcagtga

SEQ ID NO: 324043 - DNA, 1770 bp, Pseudomonas aeruginosa
atggagacggtggtcccggtagaggcgtgtggactggtcaagcgcttcgccacccgcggcggcaccccgctagtcgcgctcgacgaggtcagcctgcggattccggcggggcggctcagcgccctggtcgggccggacggtgccggcaagaccaccctgctgcgactgatcgccgggctgatgaaggccgatggagggcaactgagggtactcgggctggacgttggcgccgaaccccaagccgtgcaggaccggatcagctacatgccgcagaagttcggactctacgaggacctgacgatccaggaaaatcttgatctttacgccgacctgcacggtgtggaacctggccagcgcaaggagcgttttgcgcgtctgctggagatgaccgatctttcacgcttcaccgggcgcctggccggccagttgtccggtggcatgaagcagaagctcggcctggcctgcaccctggtgcgttcgccggacctgctgctgctggacgaacccacggtcggcgtggatccgctgtcacgccgtgagctctggcagatcatcgagcaactgatcgagcaggagcggctgagcgtgctgatcagtaccgcctacatggacgaggcgcagcgttgcgcccaggtcttcgtgttgtaccagggcaacctgatcgccgagggaaccccggaagacctgagcgagcgtgccaaggacctgtgctatggcatcgagccggcagccggggtgccggccaggaccttgcaggccaggctgatcgatgaccgggagcatatcgtcgatgccgttcctcatggtggccaggtgcgtttcatccgctccggccatgcgtcgctcgaggagattccctcgctacacggagagcaggctgcgcagccgctggcggctcgtctcgaggatggcttcatggtgctgttgcgcgagcacgccagcgaccagggccagccctctccccaggcgcctgcggacgagccgggcggcgaggaggaactggagagcgagcgtcgcccgatcatcgaggtccgcgacttggtgcgcaagttcggtgatttcacggcggtcgccagtacctcgttcaaagtgttcaagggcgagatttttggtctgctcggccccaacggagccggcaagaccaccacctttcgcatgctctgcggcttgctgccagcctccagcggccacctggaagtggccggggttaacctgaggagcgcccgggccgccgctcggcggcgcatcggctacgtttcgcagaagttctctctctacggcaacctgtctgtccaggagaacctggagttcttcggcggggcctacggcctgttcggggggcgactcaaggcacggctcgataccgtcctgcgccagttcgagttgcaggggcagcgcaatgatcgcagcggggacctgccgggcggctacaagcagcgcctggccatggcggtggccttgctccacgagccggacatcctcttcctcgacgagcctaccagcggcatcgacccgctggcgcgccgcgccttctggcggcagatcaccgaactggccgcggcggggaccaccgtcgtcatcaccacgcacttcatggaggaagcggagtactgcgaccggatcgtcatccaggatgccgggcgcctgctggcgctgggaacgccggaagaggtccggcgacagggaggcgagcaggcttccgacatggacagtgccttcatcgccgtggtcgagcgctcgcgcgcccgactgggcatggcggcgggctag

SEQ ID NO: 324044 - DNA, 1134 bp, Pseudomonas aeruginosa
atgcaccatccggatagcggtttcaggcggcgcctcgtcgccctgacgcgcaaggaactccgccagttgctgcgcgacaggagcaacctggcgatcggcgtgatcctgcccatcgtgctgatcctgatcttcggctacgggctttctctggatatccgcaacacgcccctggcgatcgttctcgaggacagctcgccggctgcgagggacgtggctgcgaagctggcgggctcgagctacttctcgaccgtccaggtggcaagtatccgcgaggcggaagacctgatgcggcagcgtacggtagacggcatcctgcgcatcccggtggatttctcgcgacgcctggagcagggggacgggcgcatccagctactcctgcatggtgccgacgcgaacagcgcggccaccctcgggcgctacgtgaacggggcgctgcgggtctggcacgagcaacgcgtggaccgtctgggcggcgagcgggtgcaggggggcgtgcggatcgtcgagcggatgtggttcaacgccgccaacagcagtacctggtacctggtaccggggctgatcgcccttatcatcaccctcgtcggcgccttcctgacctcgctcgtggtggcgcgcgaatgggagagggggacgctggagtcccttttcgtcaccccggtgcgctccgcggagatcctgctggccaagatcatcccctacttcctggtcggtctcctgggattatcgatgtgcctggtgtcggcccgcctgctgttccgcgtaccgatacagggatcgctggtgctgctgctgttcagttccatgctgtatctgttcgtcaccctcggcatcggcctgctgatctccgccaggacacgcaaccagttccttgccagccaggtagcgatcctctccagcttccttcctgcactaatgctgtcgggcttcctgttcgacctgcgcaacgtgccgaccttcatccgcctggtcggctcgatcctgccagcgacctattttatggaactggtcaagaccctgttcctggccggcgacaactggcacctggcgctgaagaacctgctcatcctcgccggctacgcggtattcctgctgaacgctgcgcggctatgcacacgcaagaagctggactga

SEQ ID NO: 324045 - DNA, 1119 bp, Pseudomonas aeruginosa
atggccaatctcatctcggtcgtccgcggcctgttgtacctctgtcgcaaggagttcctggccatcgtcaaggatcccgccaaccgtgtgatcctcatcgcgccggcgatcgtgcagacgctgttgttcggctacggcgcgacctacgacctcaactacgtgccctacgccgtgcttgaccagagcaacgggacagcgtcccgcgaactgctcgcccgcttcgactccaccggggtcttccagcgggtggagaccctgcggcgggtggaagatattgccagggtcatcgatggcggcgatgccctcctcgtgctgcacatgggccccgatttcgaggagcgcctggccagggagcgaggcagcgacctgcaactgatcctggacggtcgcaactccaccaccgccggcatggctgcgggccacatcagccgcctggtcggcgagttcaacgcgcgctatctgcgccaggggcagccacgtgtgcagttggagatgcgcgcctggttcaacccgaacctggagacccgctggaatatcgtgccaggcctgatcgcggctcttagcatgatccagactctgatgctggccgcgctctcggtcgcaagggagcgtgagcagggcaccttcgaccaactgctggtgactccgctgacgccgctggaaatcctcatcggcaaggcggtgccgtcggtcctcatcggcctcctgcagtcgaccctgatcctcgccatcggtcttttctggttccgcatcccaatggccggttcgctgctcgacctgtatctgggtctgctggtgttcactaccgcgtgcgtcggcatcggcctgtcggtctcggcactgtcgggcaacatgcagcaggcgatggtctacaccttcgtcatcatgatgccgctgatcctgctctccggtctcatcacgcctatccacagcatgccggaaaccctgcagattctgacctacgccgacccgttgcgcttcgccatcgacctggtgcgcagggtgtacctggaaggcgcgagcctggccgacatttccgggaacttcattccaatgctgagcgtcgccgcagtcaccctgccgctggcggcttggctgtttcgcaatcgactcgtctga

SEQ ID NO: 324046 - DNA, 1509 bp, Pseudomonas aeruginosa
atggggcatgccatgcacgctattcatcttcataccaggtcaggcgcaggtgtcctgcgcgggttggtgctgctgctgtcgctctcgtcgagcgcctgcaccgtgggccccgactaccagccgccgcaaagcgtttctccacaacgctggggcgactggcacagcgggccggaagccctgcgcagtacccgacacgagggcgaaagactgcgcgaccaagcctggtggaaggtgttcggcgatccggtgctggacgacctccaggccagggcgatacaggccaacccggaactgcatggcgctatcctgcgcttcgcccaggctcgtatgcagcgccggatagtctccagcgcctacctgccggaagtgacgctggaagggggagtgtcgcgccagaaacagagcctctacggtatgaacaaccgcttgctggaggctaccgagccgggcaaccgggaggccttggagaaagccctcggcgacccgttcacgctgtaccaggcaggcttcgacgcctcgtgggagccggacctctgggggcgggtcggacgttcggtagaggcggcccgggcggagatcggcatggccgcggccgcgctcgacgacacgctgttgagtatctcgagcgaggttgccaggagctatatcgaggtgcgtaccgcacaacgccagatccgtctgctcgaggaggacatccgcatgctcgaggagcgtctgcgcctggtgcgggtgagggcgggcgaaggcctgaccgatgagctctatgtcgagcggcagaaagctgagctggaggcgttgcgcggacggctgccggcctggcaggcgagcgagacggaagcgaccaaccgcatcgccgtgttgctgggcgaacgtcccggcgccctggcacgggcgctcgaggcgaagccgggcaacgtgctggaaagggcgttgcccgatttcaggctcggcgtgccctccgagctggtccggcagagacctgacattcgtgcggcggagcaatccctgcaccgtgccaccgcggacatcggcatcgccaaggcggcgctctatccgagcatcgccctgggcgcgcgcttcggctacgagtcctaccgggacgggaagttcggcgaatggggcagtcgcgcctggagcatcgggcccactctcgacctgccgctgttcgatgccggccgcaggcgaaccgtcgtgcgtctgcgtgaactggagcagcaggaggccgcggtgaccttccagcgtacggtgctgggcgcctggcaggaggtcgacgatgccctgagccgctaccacgccgaataccagcgcaacctgcacatgcgcgacaaggccgccagcagccgccaggcctatgaatggacacaggtcaagtacgcccaggggcaggtggacttcctcgaggaaatcgacgcccagcgtacgtccatgcaggcgcagcgcgagctgatcgatagcgaggcgctgctgaggacccaactgatcgcactctacaagaccctgggtggctga

SEQ ID NO: 324047 - DNA, 606 bp, Pseudomonas aeruginosa
atgcttgccgaagatatctacgcgatcatgctgttttcatcgctcatcctggtcgtcccggggccatccaacaccttgctgctcagcgccggtttccatttcggctcgctgcgggcggcgcccttcatcctgctcgaggcgttgggctactcgctatccatttcggcatggggctgggtattggcgcgcctgtccgagagcaatccatggatcatcagtctgaccaaggcactctgcgcgctgtatgtggcgctcctggcggtgaagacctggaatgcctcgatccgcagtgccgggaccggtaacttccgccgatggcccttgcacctgttcgtggcaaccctgtcgaacccgaaggcgctgatcttcgccagcgtgatctttcccggcaaggcgttcctcgacttctggaacaactacacgatctcgctgctggccttcctggttgtgctggcgcccatcgggatgctttgggtcgggctgggggccggtattcgaaaaggctacctggggtcgatatccggcccgctgttctccaaggtcacctcggtcatcctggcactgttttcagcttccctgacctataccatggtgcgggcggcctga

SEQ ID NO: 324048 - DNA, 807 bp, Pseudomonas aeruginosa; identical to SEQ ID NO: 323272

SEQ ID NO: 324049 - DNA, 2655 bp, Pseudomonas aeruginosa
atgcccgatgtacgtctttcctctcgttcgttgacccccgtgctctgtgcggtggggctcgcctgcgcgctgcagggcgaggtgcaggccgccgacggtgggccgcgcgacgtggccacggcgccccgggtattcgacatagcgcccggcgaactggccgaggtgttgttgaacatcgtgcgccagggacacgtgccgatcgccttcgaccagcgcctggtggcggggttgcgcggaccggatatccgcggccggctcagtgtcgaggacgccttgcggcgtgccctggccggcagcgggctggcatacgcgcaggacgaaagcggtgccttcgtcctgcgccgcggacaggcgcctgtgcaggagacgcgaggtgcgacggtggcaccgaccttgtccaccgtggtggtcaccggcacgcgcaagagcgatgtgaaggcgcaggacagcctgagcccgatcgacgtggtcagcgctacccagctacgcagcagcggtgcggtcgacctgcgcgatgcgctggtcaaactgctgccctcgctgacccgccaggcccagccgttcaacgcctcggcgttgacccacacgcagtcgctgcgcgggctgagccccaaccatgtgctggtgctggtgaacggcaagcgtcgccacgaaacggccaatctcaatatcagcggcgggctggagaagggctccaccggggtcgatctggacaccatcccgatcaacgccatcgaacgtgtcgaggtgctgcgcgacggtgcttcggcacagtacggttcggacgccatcgccggggtgatcaacgtcatcctcaagtccgccgacagcggcgggtcggcggccgctgacgtcgggcagaccggcgacggcgacggcttcacccatggcggcggggggaacatcgggctggccttcggcgatagcggcttcgtcaacctcaccgccgaatatcgcgagcaggagcgcacgatgcgcagcggcatcgatgagcgcaccggtcggcgcgacaatatttccatgggcgatcccgcgttccaccggcaatcgttggcgctcaactcgggtttcgggttgggcgacgatatcgaggtgtacggcttcggcacctatacccggcgcaaggcctcctcggcggccaactatcgcctggcttcggtggcgccgacgctgtatccggacggcttcacgccgcgcccgaacagcgacgaggacgactatgcgttcctcgccggggtgcgcggcgagcgtctgctggatgcctggcactgggacctgagcagtggctacggcgccgaccgtcccgatatcggcatgacccagtcggtgaacgcggcgatctaccgtgaaaccggcaacagcccgagaagcttcgacctggcgcgctaccgcaacagccaatggaccagcaacctggacctggggcgagaattcgaactggatttcctcgctgctccgctggcgttgtcgctgggtgcggaataccggcgggaaagctaccgcatcgacgccggcgacccggcgtcctactacagcggcggggcggaatccctggctggcctctcgccgctcagcgaggggcaatggtcgcggcacgcctgggcgtcctacctggacctgggtacctccctgaccccagcctgggaggtcgacgtggcggtgcgccacgagaaattcagcgacttcggcagcaccaccaacggcaagttcgccacccgttaccagttcgatccgcgggtggcgctgcgcgccagcgtaagcagcgggttccgcgcgccgtccctggtccaggagcactacaccggcctcagcgtcggcccgaccatcgcccttggcctgctggcggccaactcgccggcggcgaagatgctcggcgccgacgaactgcaaccggagaagtcgaccagcttcaaccttggcctggtactcagcccgtgggaaaacgtcgggctgaacatcgacgcctaccagatcagcatccgcgaccgcatcgtcgacagcgccacctattccggccaggaagccatcgatgccctggccgcggcggggatctcgttgccggccagtgccagtacggtcagtacccactacctggccaacggtgccgacacccgcacccgcggtgtcgacatcaccggtcactacctcgtcgcgcttggcgagtacgggcaggtcgactgggaactgtcggccaacttcaaccgcaccaccttgcgcaagaaccatcgaggcgccaacggcgagccgctgctcaatgcccagcaggtcgcctggatcaccagctccaccccgcgcagccaggtttccctcggcggcacctggagccgccaggactgggaggtcagcctgcgcctgacgcgctacggccggaccagctcggaactcgactacacggtagggccggacgcctggtcgacggagaaattcaaccatttcgtcaacgacccgaagtacatcaccgacatcgccgcgcgctaccggctcagcgccgacctgacgctgaccgccggcgccgacaacctgttcgacgtccgtccggacaagctgcccgcgcagaacaccacctatggcgacgtgctgcgctacgacacctatgcctcgcagatcggcttcaacggcgccttctactacctacgcgcggcataccgcttctag

SEQ ID NO: 324050 - DNA, 1029 bp, Pseudomonas aeruginosa
atgagcccgtccgaaaacatccagtacgatttcgagtggcgaccactcaacaactacctcgccgcgcaacgcatcacgcctccggacatgcgtcagggttcggctgccgagccgcgcctgcccagcgaagcgctctacgagtggatcgtgctgaacggacgctcccccctggaaggcctgagcctgggggagcactaccgcctttccgactacggcgtcgccgggctggcattgcagagtgccggcaccgtgggcgaagccttgcaactgatcaagaccaacatgctgctgttccgcaaggatatccgcgggatcgcggtgcgacgttccagttgcgacaccgtggatgtggatatcgacctgcaggacaagccggactggccgcagtcggcccggctgtatcacgccaacgtcctggcgtcggccgcctacgcggtgttccgcgacctgctgctgggcgagctggaactggtccgcctgcgcctcccggaaaggaacggcgacgtgcgggcatacgaggagtatttccgggtgccggtgtatttcgccggcgcaggcatcaccttcaccctccccgaggaattgctcgaggccgagatcgccactgccaactccgccgtgttccaggcctcgctggcgctcggcagcaaggccttcaacacccgcgtcacccgcgagatgggcggctaccgccaacgcatcgtggcactgctggaggtgctacaggaccgctacccgagcatcgcctgggtcgcccggcagttgaaggtcaccgagcggacgctgcgccgacggctcgccgacgagggcaccaactaccgggaagtgctcgacctggtccgccacgacagggcgcgccaactgctgcgggacgagcgactgcgcatcgaggaagtcgccgagaggctgggctacatggatacctccagttttcgccacgccttccgtcgctggacgggacagtgtgccaacgactatcgccaggcccgcctcgccggcaagaccgcgcggcgccagggcgaacgctag

SEQ ID NO: 324051 - DNA, 1149 bp, Pseudomonas aeruginosa
atgaccgttcttatccagggggccgggatcgccggcctggcgctggcgcgcgaattcaccaaggcaggcatcgactggctgctggtcgagcgggccagcgagatcaggcccatcggtaccggcatcaccctggcgagcaatgcgttgacggcgttgtccagcaccctggatctcgaccggctgttccgccgtggcatgccgttggccggcatcaacgtatacgcccacgacggttcgatgctgatgtcgatgccttccagtctgggtgggaattcccgcggcggcctggcgttgcagcgccacgaactgcatgcggcgctactggaggggctggatgagtcgcgcattcgggtcggggtctccatcgtgcagatcctcgacggactcgaccacgaacgcgtgaccctgagcgacggcactgtccacgactgttcgctggtggtcggtgcggatggcattcgttcgagcgtgcgacgttatgtctggccggaggcgaccttgcgtcattccggcgaaacctgctggcgcctggtcgttccccatcggctggaggacgccgagctggcgggagaggtctgggggcacggcaagcgcctcggcttcatccagatcagcccgcgcgagatgtatgtctacgcgaccctgaaggtgcgccgggaggagcccgaggacgaggagggcttcgtcaccccgcaacggctggccgcccactacgcggacttcgacggcatcggcgcgagcatcgcccggctcataccgagcgccaccacgctggtgcacaacgacctcgaggagttggccggcgcctcctggtgccgcggacgggtagtgctgatcggtgacgccgcacacgccatgacgccgaacctggggcagggcgcggccatggccctggaggacgccttcctgctggcgcgcctgtggtgtctggcgccgcgcgccgagacgctgatcctgttccagcagcaacgcgaggcgcggatcgagttcatcaggaagcaatcctggatcgtcggccgccttggtcaatgggaatcgccctggagcgtctggctgaggaataccctcgttcgcctggtgccgaatgccagtcgcaggcgcctccaccagcgtcttttcaccggtgtcggtgagatggccgcgcagtag

SEQ ID NO: 324052 - DNA, 1905 bp, Pseudomonas aeruginosa
atggcactctctgatctgaccgtgcggcaagccaaggccgccgagagaacctacagcatccccgacaccgatggcctcggcctggtggtcgcccgcaccggcggcaagtcgtggcatttgcgctattactggctcggcaagcaaaagcgcatctccctggggaactaccccgagatcggtttgcgcgaagcgcgcaccttgcgcgacgaagcccgggcgcttctggcaaagggcgtcaacccccataccgatcggaaacagaagcgacacgcggtcaagcttgcggccgactacaccttcaaggccgtcttcgatgcgtgggtcgagcatcgccgcaaggaaatcaaggagggcaggaacagcacgctgtcgcagatcctgcggatcttcaacaaggacgtgctgcctagcctcaagcagatgtcgatctacgacattcgccggccccaactcctgggcgtcctggcgaggatcgaggagcgcaaggcgttcaccactgccgagaaggtccgcacctggctggggcagttgttccgctatgccctcgtcatcgtggaggggctggaagccaatccggcctccgacctggacgtggtggccgaacccaagcccccggtgaaccacaacccctacctgcatcttccggagctccccgagttcctgcacaagctcaggctctacaaccctcgtggttggcagacccaactcggcatccggctgctgttcctgaccggcgtgcgtaccggcgagctgcggctggcgaccccggaccagttcgatctcgaccgtggcctgtggatcatcccgccgcagatcgtcaagcaactccaggacgagatgcgcaaggccggcaagcgcccgcaggacgttccgccctacatcgtgccgttgtccgtgcaggccatcgagatcgtgcgctacctgttgggtgtgatgaggccggctcaggtccatctgctcacgcaccgcagcgaactcaagaagcgcatcagcgagaacaccctcaacgcggccttgaaacgaatgggctacgaggatcaactgaccggtcacggcatccgcggaaccatctcgacggcgctcaacgagatcggctatcccaagatttgggtggacgcgcagctttcgcactcggacccgaacaaggtgagttcggcctacaaccacgccaagtatgttgagccgcgccgccggatgatgcaggactgggcggatcgtctcgatctgctcgaacagggccaagtggaagcggccagcgcgcacctcacgatccatatcgagggcgtgccggccatggcagaggaggacaagcccaacaccatcgtcgctgctgcttctgcggcatccgttccgcctgtggtggccgaacccatcgtcgtgacgccaaacgacgggggaatcaccttccagcgactgtcgcaggtaccaccgcccccgacgcatgcgccagagccggaggtgtcagtcatccagcgcgagcgcgaggaaatgctggccatctacgaatcgccgagcagtctgccggtcccgctgttcggcaagttggccgggaagtccaaggaccagatcaaccgcgagctgaaggcgggcaagctgctgtctatcagcttgggcaaccgcgggcaacgcgtgcccgactggcagctggtacccctcaagcacaagctggcacaggtgctcatgaaccagtgcccgcatgcggatccgtgggacctgtaccggatgctgacccgcccacatccggacctgggtgatcgcgcagccatcgacatcgtgacaccaggaaatttgggcatggtcgtgcgggtcatcgcgggcacccagcagcagccaaacaggcccggcctgactcgtctgtgcaaggtattccagaggagactcgccagcgcattcaacggttgctaa

SEQ ID NO: 324053 - DNA, 1098 bp, Pseudomonas aeruginosa
atgcgcggtgtagacgtcttcagcgagcagttattcacggtcaagcggctggaggagttcatcccagccagccatccgttgcgtccggtgcgggagatggtcaacgaggcgctgcggcgcctggacgggctgttcgagcggatgtacgagccgagctacaagggaggccgcccgagcatcgcgccggagaagctggcgcgggcgatgctgctgcaggtgttctacagcatccgatcggagcggcagctgatggagcaggtgcagtacaacctgctgtttcgctggttcatcgggctgtcgatggacgatgcggtgtgggtgccgacagtgttcaccaagaaccgcgaacggctgatcgagcatgacgtggtggtggccttgttcaacgagatcgtggcgatggccgacgcccgtggctggctgtcgggcgagcacttcagcgtggacgggacgctgatccaggcttgggccggtcacaagagcttcgtgcgcaaggacggcggtgaggatggcgacgggacggacttccggggcaagtcacggggcaacgacacgcatgcctccacgaccgatccagatgcacggttgtaccgcaagggcaagacggcgagcgaactgcgctacatgggccacacgctggcagacaaccggcacggcctgatcgctaatgcgcgggtgactcatgccgacggctacgccgagcgtgaagcggccaaggcgatgatcggcgatgcacgccaggccaaccccgacggtgcgctgacgctgggtgcggacaagggctacgacgcagccgagttcgtcgaggctttgcaggagatcggggttgctgcgcacattgcgcagaacaccagcaaccgccgctcggcggtgcctgatgccatcgccacgagcgccggttacgcgatctcgcagaccaagcggaagctgatcgagcagggctttggctgggccaagctgatcggcaacatccggcaggtgatggtgcggggcctggccaaggtggatcagatgttcatgttgaacatgaccgcctacaacctggtgcgcatgcgcaccttgggacagttgtgcctgcagggcgggataagggcatga

SEQ ID NO: 324054 - DNA, 3120 bp, Pseudomonas aeruginosa
atgatcgccaagctgattcgatggtcggtggccaatcgcttcctggtgctgctggccaccgccatgctcacggcatggggcgtgtggggcgttcgcagcacgcccgtggatgcgctgccggacttgtcagacgtgcaggtcatcattcgcaccaactacccaggacaggcgccgcagatcgtcgagaaccaggtcacctacccgttggccaccaccatgctgtcggtgccaggggccaagaccgtgcgcggcttctcgttctttggcgactcgttcgtctatgtcttgttcgaggacggaaccgacctgtactgggcccgctcacgggtactggaatacctgaaccaggtccagggccgattgcccgccacggcgaagccggccctgggtccggacgccacaggcgtcggctggatcttccagtacgcgctcgtggatcgcacgggcaagaacgatctggcgcaactgcgtgcgttgcaggactggttcctgaagttcgaactcaagagcctgcccaacgtggccgaggtggcatcggtggggggcatggtcaagcagtaccaggtcgtgctcgacccgatcaagttggcgtcctatggcctcagtcaggctcaagtccgcgatgccctgatgggggccaaccaggagaccggcggctccgtcctggaattgtcaggcgcggagtacatggtccgcgcgagcggctacctcaagaccctggacgagttccgggagatccccttgacggcacgcggcggtgtgccggtgcggctgggggatgttgcgacgctccagataggcccggagatgcggcgtggcattgccgaactcgacggagaaggcgaggtcgccggcggcgtggtggtgctgcgctccggcaagaatgcccaggagacgatcgctgccgtcaaggccaagctcgcggagctgcagggcagcctgccgccgggcgtcgagatcgtcaccacctacgaccgcagcgcgctgatcgagcgggccattcgcaatctcacgaccaagctaggcgaagagtttctggtggtggcgctggtctgcgcactgttcctttggcatcttcgttctgcgctggtggccatcatctcgctacctctgggcgtgatgacggcgttcttggtcatgcgctaccagggcatcaacgccaacatcatgtcgctgggggggattgccatcgccgtgggggcgatggtggatgcagcggtggtgatgatcgagaacgcccacaagaagctggaggcttggcagcacgcgcacccagatcaacggctgcagggcaaggaacggtgggacgtgatcacacaggccgcggaggaagtcggtcctgcgctcttcttctcgctgctcatcatcacgctctcgttcatcccggtcttcaccctagaagcgcaggaaggccggctgttcggcccgctggcgttcaccaagacctacgcgatggccgcggccgcagggctgtcagtgacgctgattcccgtactcatgggctactggattcgcgggcgtatcccggatgagcagaagaaccccatcacccgcatcctgattgcagcctaccggccagcactggagtgggtactgcgccggcccaaggcgacgctgctgatcgccgtgctggccttggcgaccacggcctggcccttggcgcggctcggcggtgagtttctgccgaggttggacgaaggggacctgctctacatgccctcggccctgccgggactctcggcgcagcgcgccacggagttgctgcagctgagcaaccgcatgatcaagaccgtacctgaagtggacaaggtgttcggcaaggcaggacgggccgaaactgcgaccgatccggcgcccctggagatgttcgagaccacggttaagctcaagcccagggaacaatggcgtccaggcatgacgcccgagaagctcgtggaagagctggatcgtgccgtgaagatcccgggcctgtccaatatctggattccccctatccgcaatcgcatcgatatgctggctaccggcatcaagagcccgatcggggtgaaggtgaccggcaacgacctgggcgtgatcgatcgcatcgctgcagaggtcgagcaggtcgccaagggcattcccggcgtgacgtcgtcactcgcggagcgcttgacgggcgggcgctacgtggatgttcagatcgaccgcgtagccgccggtcgctacggcctgaacatcgccgatgtccaggcggtcatcgccggcgcggtgggtggcgaaaacgtctcggaaacggtcgaggggcttgcccgctttccgatcaatctgcgctacgcgcgagaatggcgtgattcaccacaacggctggcagaactacccatcttcacgccgatgggtcagcagatcacgttggggaccgtggcacgcatcgcgatcaccgatggaccgcccatgctcaagagcgagaacgcacggccctccggttgggtctatgtcgatgtgcgcggccgtgatctagcctcggtggccaacgaactgcgcgatgccatcgggcagcaggtcaagctggagccgggtgtgagcatcacctactccgggcagttcgaatacatggagcgggccaatgcacgcctgaaggttgtggtgcctgccaccctgttgatcatcttcgttctgttgtacctgaccttcgcgcgtgtggacgaagcgggcttgatcatggcgaccttgcccttcgcgctcacggggggcatctggttcctgtacctgctgaattacaacctgtccatcgccaccggcgtgggattcattgcgctggcaggtgtggcggcggagttcggcgtggtgatgctcatctatttgaagcaggccttggcggaacgttgccccgatgggcgcaacccaacgcgagaagaactgctagatgcgatccgggaaggggcggtgctgcgcgtgcgcccaaaagcgatgaccgttgcggtcatcctggcgggcctggtacccattgtttggagcagcggcacgggctctgaagtcatgagccgcatagcagctccgatgctcggcgggatggtgaccgcaccgttgctgtcgctgttcgtgattccggctgcctatctgctgatgcgtaagccgcgctaa

SEQ ID NO: 324055 - DNA, 1518 bp, Pseudomonas aeruginosa
atgaatacctcttcgagaaacatccttgccggcttgacgctggttgctgccggtattgccgttggatggggcgtcgcccaatggcgcgccggccacctcagcggctcccccgctgccaacgtcaccgttgcaagcgctccgaccgagcggaaggtgctgtattggtacgacccgatggtgccgacccagaagttcgacaagcccggcaagtcgccctacatggacatgccgttgatgccgaagtacgcggatgaagacacgcaagacagcacgggcctcagcgtgtcggcgcaagcggtgcaagccctagggctgcgtacagccgaagtcctgcaaggcaagatcggcgcagatgtgaacgtcgtgggcaccgtgctgctcaacgaccgcgacgtcagcatcgtgcaggcgcggaccgccggcttcgtcgagcgtgtctacgcacgggctgcgggcgacgtgatcgcagcaggggcaccgctggctgacctattgctgccggagtggatcgccgcacagcgcgagtttctctcggttcgcgcgatgggcgacgcaccgttgaccgcagctgcccgccaacggctgctgctgctcggcatgccgcaagccctgatcgcccaggtggagcgcacaggcgagcccaaggggctgtacacggtcacaacacctcaaggcggcttggtggccgaactgatggtgcgccagggcatgacggtttccgccggggaaagcctggccagggtgaatggcttggcctcggtgtggatcgaagcggccgtccccgaagcacaaagcggaccattgcaggtcggccaaacggcgcaggtccggctggcggcgtttcccggtgaagtgctccaggcgcgcatcgtgagcatcctgcccgaagccaaccgcgacacccgtacggtgcgagtgcggcttgaaatggccaatcccggccagcgcctgaaggccggcatgtccggccagatcgcgctcaaaggcaacgaacagcccgcgctgcttgttcccagcgaagcggtcatccgcaccggcaagcgcgcactggcctatgtggtcgatggacccggcaagttccatcccgtggaggtccaggtgggcgcggaggtaggcgatcaactggtggtcaacggcgggctcgcggcgggacagcaggtggtggcctcggcgcagttcctgatcgattcggaagccagcctgcggggcgtgctgcctgcaggtgccgcggcgtccgcgcctgcatcgccgcacaacgggcacggcacctcgtcgccaacggccgcggccaccaacgctttcgtggtgcgcggcgtgatcgaggagatgtcgcccaccgagctgacgctggcgcacgaggccgtgccagccctccaatggccggccatgaccatgggcttcaagctgagcagcccgcagctcgccgcgggtctttcggttcggcagcaggtgcgattcaccttctccaagcaaggtgagggctacgtgatcaccgccatcgaaaaggtgcagccatga

SEQ ID NO: 324056 - DNA, 1308 bp, Pseudomonas aeruginosa
atgtttactcccttttttggcgcccccgaggggcgcccgtcggcgtacggccgaggcacaacgccggcctcgatgcgagtgcatcgtctgaaagctatcagcatcgcgttggcgggcagtgcgcttgtctcgcctgtagcctacgccctcgattttgctgaggcacgccttatcgcggagcagcagagcccacgcataagcgcgcagcagttgcaggttaacgtcgccgaatccgtgcagaaggcagcaggctcgctgcccgaccccaagctctcgctcggcatcgaaaactaccccatcagcggcatggatcgctggagcatgacgcgcgaatccatgacgatgcagcgcttggcgctcatgcaggaagtgcccaacagggccaagcgcgacgcccaggtcgccagcgcgcaggcgcgtgtggatcgagaacgcgcggcgctggttttgcagcgattgcagatccgccaggaactcagcctggcgtggatcgccgcgcaggcggtggagcaacgggagatactgctgacggaactgctcgcggagaaccagcgcctgcaagacagtctccccgctcgcgtcgccggcggcaccgcccaggctggcgatctgttggtcgcgcaacaggaggcgctgacactcacggaccgccgtgacgatctacagcgggaccgggccaaggccagggccgcgttgcggcgctgggtgggctccagggccgacgaagcactgcaaggcgatccaggcccgctcactcgccccgtcgcgcaactgcgcacagaactggcgaatcacgcggagcttgaactctatccggcgatgcaaagcatggcccgggccgagtcccgcgaagcccaatcagagacccgcggcgattgggcctgggagatagcctatagccggcgtgatcgccgatggggcgacatggtgtcatttcaggtgacattcgatctgccttggcagaaggatcgacgccaagtgcccatgatcgaggcaaaacggcacgagttggaacgtctggacgccgaacgcgaagacgtggcgcggcggcatttgcaggagctggacgacagcgccgccgaactccaagcgttgaacagccagatcgaccgcctgcagaccgccggcttgcaactggtacggaaccgagcggcacttgcattgagcaactaccgatccgccaagggggacctgagcgctgtgctcagtgcacgcgcccaggtgctggagacgcgcatgcgtctgatcgaccttggagcgcagcgcgacagcctcgtcgcccgactgaacagcctgatcgcggactga

SEQ ID NO: 324057 - DNA, 369 bp, Pseudomonas aeruginosa
atggcgatgtacgtctgtcccaagccagacccgagggcatctgtggaaaccacgcaaatgcgtgccacgatctcgatgcagcaggctgacaagttgccaatgtcggattgcaccggcatgcctgattccatggacagcgaagcgccacagttgtgccacgctcattgcagtggcgatcgggagtcggcgctttcatggcaggggctggacattcagtttctcgcggcgcacgtgatgtggctcgccaactcgctgcccgggttggttctcgaccgggtagccctcaggcggcacgttacctacattcctcccaatccccgcgcgggctttccgccgatctacctcacgttccaagtcctgcggaattga

SEQ ID NO: 324058 - DNA, 243 bp, Pseudomonas aeruginosa
atgcgtctggacggcgccttggcccgaaccggcacccgctgcaaatccaccggcaagggcgggcaccgcacgtggttgtcatgctttacgcgcctcggcaactcgcaaggctctaagctcaaatcgatcagctacaagattcgtctgtcccgagagtcgctgcaggtgcgtaatgacctcgtaggggccatcggctattgggcgcgtgcagattccgcactggctagcggtttcgatgcgtga

SEQ ID NO: 324059 - DNA, 891 bp, Pseudomonas aeruginosa
atggagttgcgtcatctacgatgctttgtcgtcttggcagaggagttgcatttcacgcgggcggccgagaggctgcatatagagcaaccccccttgtctcgcgcgatcaaggaattggaagatgagcttggggtcacgctgtttgaccgcgaccgcagaggcacacggctgaccgtggcgggggcggcattcttgcaggacacccgccgactcttcactgtcctggagcaagcgcgtgagaatgccagagccattgccgcgggcctgaggggcagcctgcgcattgcaatttccgatggtgcgatggacccacgactatcggcgttcctagctcgttgccgcgcggaagagcccgaggtcgagatacgtctctccgaggtaccgctgaccgagcagatacggggcctacggtctggcgacttcacgatcggatttgcacacgcggcggatgttggcgaaggcatcgtggctgaaccgatctggcgagacccgattgtgatcgccgtgccagcgcggcactcgcttcttgcgcacaagcaagttccgctgaacgaacttcagggtcacccactggttctgtgcgacaaactggcctgcgaaggctactgccgagaactaaatcggctgctacaggttctggaacacagactcaacgttgtcgaagaagtgtcgtcgctggacatgatgctaacgctcgtcggcgcaggctatgggattggtttcatgacggcgaccaagattcccatcagccagaggccggacgtggtgattcgccctctggcgcaggacacggcggtaatcacaacctctctgcttcggccagaaagcagcaactcatcggtttcgctggatcgcttcatcgaacgtctgcgaggacctccggatgactaa

SEQ ID NO: 324060 - DNA, 285 bp, Pseudomonas aeruginosa
atgaaatcgcaaattgtcattgccgccctgttgagcgctctctccgtgccagccttcgccggtcatgcagcagcccaagcagccaaggaaatggttcccttggctgacgggggaacgctgtacatcttcaaggacggaaagatggcacaggaaagccgcttcgggcgcgccgtctatctcaatgtcggagcttcggtgtcgacgaaggatgggcgcaacatcgcgatcaccagcaatgaagtcgctcgcctcgggtcgctgctacaaaaagagcacggcggatga

SEQ ID NO: 324061 - DNA, 927 bp, Pseudomonas aeruginosa
atggccggggattggttgaccatcgtcctgcgcctggcgctgtatctggacctggcggcggcgtttggcgtcgccatgttcggtctctatgctttgggcaacgacgagcgatcctcgacgatctcgcgccgctatcgcgtcctcattggcgcatccgctgccatcggcattgccctgtcgatgtggggcatgacggtcatggccaaggccatgtccggtgcccagagctacgcggagctgtcaacgcacgtcttcgacatgctcattacgggcacgcacatgggcatcgcctggtgcattcgcatcctcgcgctgttggtgtgtgtgctcgtcgcaatgttgaaattgaacgctaccttgcgatttgcagtgatggcgctctccaccggcgtggcgctggcgacccttgcgtgggcaggccacggcgcgatggacgacggcgttcgcggctacatccatcttgcgtcggatatcacgcacctctgggcagcgggcgcttgggtgggcgcattggtggcgttcttgatgctggcatcccacaagcaggatgtcgcgcaagacccggtagcggtcctcagtcggacgtcgaatggctttgctcgcataggtacagcgatcgtggctgcactcgtcgtgagtggaattctcaattacctgttgatcgccggaccatcgtttgatccgctcatctcgacgctgtatggccggctgctgatggtaaagctcttgcttttcgcaggcatgctggcgttggctgctgccaatcggtatcggttgagcccgagcctggaggcagctttgaaggcaggcaatcgcgcacaggcagtcatcaagcttaggcagagtctgttcacggaggcgaccttggccgttttggttctggcgagcgttgcatggcttggcatcttgtctcccactggaacctag

SEQ ID NO: 324062 - DNA, 387 bp, Pseudomonas aeruginosa
atgacccgttcacatttcatcgccaagctcgtcgcgccgatcgctgctggtctgttcgccaccgccgcattcgcgcatccttcgctggtgtcttcaacgccggccgacaagtcgcaggtttctgcgccagccaccatcgaactgaagttctccgagacgctggtgccgcagttctccgccgcgagccttgtcatgactggcatgccgggaatggcgagccatggcccgatgaagatcaacgccagcgtcgcggctgccggcgacggcaagaccatggtcatcacgccggcacaggcgctccagcccggtgactatcgcgtcgaatggcgtgccgtctcctcggacacgcatccgatcacgggtaacgtcaccttcaaggtgaagtaa

SEQ ID NO: 324063 - DNA, 2076 bp, Pseudomonas aeruginosa
atgcacccggagatccgccaggatcatccgggaacctgccccaagtgcgggatgacgctggagcctctgctgcccgacctcgatgacgacaacccggagttgcgtgacttctcgcgtcgcttctggtggaccttgccgctgacgctcgtggtcctggcgctggcgatgctgggcgagcggctgcacctgatggacatggctacacagagctgggtcgagttggtgctgtcgttgccgatcgtgctgtgggccggctggcccttcttctcccgcggctggctgtccgtggtcaaccgcagcccgaacatgtggacactgatcggcctgggaacgggtgcggcattcatctacagcgttgtggcaaccgttgcgccggaagtgtttccagcttccttcatgtccatgggacgggtcggcgtgtatttcgaggccgccgccgtcatcatctcgctgacactgctcggccaggtgctggaactcaaggcccgctcccagacttcggcagccatcaagtcgctgctggggctggcacccaagacggcgcggcgcatcaatgcggacggcagcgaggaagacgtgccactcagccatgtgcacgtcggcgacctgctgcgcatccgacccggcgagaaggtgccggtggatggcatcgtgcacgagggcagcagctcgattgacgaatccatgctgaccggcgaaccgctgcccgtcagcaagcgcgtgggcgacaaggtcatcggggccacactcaacaccagcggcgcgctgatcatgcgttcggagcggatcggctcggacaccgttctatcgcagatcgtccagatggtcgcccaggcgcagcgttccaaggcaccgatgcaacgcatggccgatgtcgttgccggctacttcgtgatggccgtcgtcgccattgcggtaacgacgctccttgtatggggattcttcgggccgcagcccacctgggtctatggactgatcaatgcggtggccgtcctgatcatcgcctgcccgtgcgcgctgggtctggccacgccgatgtcgatcatggtcgcaacgggccgtggcgccacgcagggcgtgctgttccgcgatgccgcggcgatcgagaatcttcgcaaggtcgataccctcgtcatcgacaagacaggaaccctgaccgaaggccgacctgctttcgatcaggtcgtcgcagctcccggctttacgaacgatgaggtgctgcgtcttgccgccagcctggaccagggcagtgaacaccccctggccgacgccatcgtgcaggccgcgcgtgcccagggcctccaactcgtgaagcctcagagctttgaatcgggaaccggcatcggcgtgcgcggaaaggttgagcaccggcaactggcgttgggcaacacagtgctgatggaacagtctggcgtatcggcggaaccgctcgtaccccaggccgaagctctgcgcggcgaaggggccagcgtcatgtacctggcggtggacgggcagctcgcgggcttgctcgccgtatccgatccggtcaagggcagcacccccgaggccctggccgcgttgaaggctgcgggcctgcgggtcatcatggccaccggggacgggcagaccaccgccaaagccgtcggtgcacgcctaggcatcgacgaggtgcatggtgaggtcaagccggcggacaagctcatgttgatcgagcgactgcagaaagaaggacgcatcgtcgccatggccggagacggcatcaacgacgcgccggccttggcgaaggcagacgtgggcatcgccatgggaacgggaaccgacgtggcgatgaacagcgcccaggtcacgctggtcaagggtgacctgcgtggcatcgctgtcgctcgcacgctctcggtgagtaccgtgcgcaacatgaagcagaacctcatgttcgccttcctctacaacgcgctgggcatccccatcgccgccggggttctctatcccctcacgggctggctgctgtcgccgctgatcgcagcattggcgatgagcctgagttcggcgtcggtcgttggcaacgccttgcgcctgaaagcgagccgactgtga

SEQ ID NO: 324064 - DNA, 273 bp, Pseudomonas aeruginosa
atgcagcatcagcacacacagacccccagcgatcgcccccggttctggcgatcgcgctacggcgtggcgttcctcatcatcgccgctgtcgccgcgtatttcctgctcaaggagcacacggcacatgttgccggctatctccccttcctgctgctggcggcttgtccgctgatgcacctgttcatgcaccgtggtcacagccacggcggacacgatcatgccgcgcgtcagggtaaggaaggtgccgcagcctccaaggagcagaagcaataa

SEQ ID NO: 324065 - DNA, 138 bp, Pseudomonas aeruginosa
atgaccctcgatggcatagccgccgatctgcgccgtgtggcaagaaccgtacttctgcgggatgcccagccgcgtgcgcgctgcggtgttcccggtgtcgagaacctgcacatcgaagcctgcgccttgcaggtgtga

SEQ ID NO: 324066 - DNA, 981 bp, Pseudomonas aeruginosa
atgtccaaagcactccccactcgcgcactggccacgacgcttctggccctggtaagcgtcgccgcccaggcacaagcacagaacgaccatgcagcgcacggccaggccgacgctcaaacggccgcgccatccactcagaccgtggctcctgccgccgacccgcacgcgggtcacgcgacgtcggcgagcggctcgaccgcggccccggccatggatcacggcaacatgcagatgcagggcgggtcggcgcctcctgacgcccgcgatccgcatggctactccaatggcctgacattgggatcgggcgactacgccgtacccggtgtgccgcggctgatgctggccgacgaacacaggttcttttcgttgcgcggcgaaactctggaacgccgcttcacgcgcaaaggagacgattccacggcctacgacctccaggcgtggtatgggacgacctacaacaaggcagtcgtgaaggccgaaggcgatatcgccaaaggaaagctcgaagaatcgcgtaccgagcttctctgggggcacgccgtcgcaccgtactgggacacccagctcggcgttcgggtggataacggggaaggcccgagccgtcaatggttggctttcggcatccagggcctcgccccctactggttcgagctggaggcgacgggctacgtgggaagtggtggacgtacggcgctgcgtgtcgaaggcagctacgagctgctgctgacccagcgactgattctggagcctcgcgccgagttgcagttctatggcaaggacgacccggaacgcgttatcggcaagggcctggccgaagcgtctgctggcttgcgcctgcgctatgaattcagtcgccagttcgccccctatatcggcgtggaacgggcgggcagcttcggacgcaccgcggactatgtgcgtgcccaaggcggccgtgcgcagcagacgcgctgggtggctggcgtgcgattctggttctag

SEQ ID NO: 324067 - DNA, 1920 bp, Pseudomonas aeruginosa
atgccgcctcgttcacccttttttatcgtgcccacacagggcctttctcgtcggcgtttcgtccaagggttagccgccggcggcgttctcgctgggctgtccacgccggcgttcaaggcatttgcccagcaaggctccgcgacgcgcggtgccgcccctgtgctgaagggcaccgagttcgacttggtgatcgccgaatcgcccgtgaacttcacgggcaagccaggcgtggctacgaccatcaacggctcgctgccggcaccgacattgcgttggcgcgagggtgacaccgtcacaatccgtgtaaccaacaagctgcgtgaagccacatccattcactggcacgggatcatcctgccgtatcagatggatggcgtaccgggcatcagcttcaatggcatcgctcccggcgagaccttcacgtaccgcttcaaggttcagcagagcggctcctactggtaccactcgcactccggcttccaggaactcacgggcatgtacggggcgatcatcatcgaccccgctggcgccgagaccatccacgccgaccgtgaccacgtgctgctgttctcggattggaccgacgaagacccgatgcgggtgttcaccaagctcaagtcccaaagcgactattacaactacaaccaacctaccgtcttcgacttcttccgggacgcctcgcgcgaaggcacggccgctgcgatcgacaagcgcaagatgtggaacgagatgcggatgaatccgacggatctcgcagatctgtctgccgccacgctgacctatctggccaacggcgtcacccccgccggcaattggacggcgctgttccgaccgggtgagcgcgtgcggctgcgcatggtcaacggtgcgggcaacaccttctacgacgtacgcattccaggactgaaactcacggtggtgcacgtcgatggtgttgacgtggagccggtgaccgtcgatgagttccgattcggtcctggcgaaaccgtcgacgtgatcgtccagccacgggatgacgcttacacgatcttcgcccaggcgatggaccggacaggctacgcgcgtgccacgctggccgtgcgtgaaggtcttcaagctcccgtgcctgccctcgatccggtcgaatggctgaccatgaacgacatgatgggcggcatgatggggggcatggaccatggcgggtccggccaggccatggagatgaccgggatgaccgggatgaccgggatgacgggcatgacgggcatgaccgggatgaccgggatgggctcgggttcgatgtccgggatggatcatggggcgatggcaggcatgaatcacggcgccatgaaccacggtggcatggcgatggatcacagccaacacgccgcggcggcggggggactggccgtgcccagcactactgctcgccacgctcgcaccgagtatggtgccagcacggacatgcgcgttgacatggcgcgcaccaacctcgatgaccccggcatcggactgcgcaacaacggtcggcgcgtgttgaccctcgcggatctgcataccccgtcggggccgctggacaagagaggccccggccgggaggtcgaactgcacctcacgggcaacatggaacgctacgcatggtccctggacgggctggagttcggaaagtccacgccggtgcacttcaaacacggcgagcggctgcgggtcattctgcacaacgacaccatgatgacccatcccatgcacctgcacggcatgtggagcgagctggaaagccccgacggtcgcttccttgcgcgccgccacaccctgccggtgcagccggcacaacgcatcagcttcctggtgacagccgacgcgctcggccgctgggcgtggcactgccacctgatgttccacatggatgccggcatgttccgcgaagtcgtggtgtcttga

SEQ ID NO: 324068 - DNA, 693 bp, Pseudomonas aeruginosa
atgaaactgctggtcgttgaagacgagaacaagacggcggattacgtccgccaaggtctcatggaggcgggattcgtcgtggatctggcgcgcaacggattggacggacaccacctggccatgggcgagacatacgatctggtggtcttggatgtcatgctgccggatgtcgatggctggcgcatcgtgcgtgcccttcgagatgccggtaaacaggtccctgtgctctttctgacggcgcgtggcggtgtagacgaccgtgtcaagggattggaactgggagcggacgactacctcgtcaagccattcgcgttctctgagttgctggcgcgggtgcggacgctgctgcgacgcggaagcgctccgagccagcctgatcgcatccaggttgccgatttggtactggacttggcgcgccggcgcgcaacgcgcgctggccaacgcatcaatctcaccagcaaggagttcgcgttgcttgagcttctggcccgtcgccagggggaggtccttccacgttctctgatcgcgtcgcaggtgtgggacatgaatttcgacagcgacagcaacgtcatcgatgtagccatccgccgtctacgcgcgaagatagacgatgcgttcaatccgaagctcatccacaccgtgcgtggaatgggatacacgctcgatgcgcccgatgatgcccctgcgccataa

SEQ ID NO: 324069 - DNA, 1155 bp, Pseudomonas aeruginosa
atgacgtacggcgtctacgatggggctggcaatagcatctatgccacgcccggtcctgacctgtctaaacttgccagtagcaaaaagttggtcaaccgcatcaccgctgacgatttgatcgtgtggcaggaggatcagaggtcatatcgaggtgtggtgatacaactgcctgctgacgattcagcggcgcccggctaccgcatcgtcgccgccatggacatcggctttcatctcgacttcctggcggagttcaagcgcatgctctggtgggcaaccggcttggtcatgtgtctggcgctcggtgtggcttggctggcggtgcagtggggccacctgccgattcgcaaggtcaatgaagagattcgggcgattcgctcttcaaagctggatgtgaggctggatcctcgggatgtgccgatcgaactggcggaactggtattcgccttcaacgatatgttggcgagaatcgaggaaggcttcacccggctatcacacttttccgcagacatcgcgcacgagttgcgcacgcccgtcaccaacctggtcacgcagactcacgtggcgcttggccagccgcgcagcaacgaggaatacagagaaatcctctattcaaatttggaagagtttgatcggatgggacgcatgattggtgacatgctgtttcttgcccaaacggaaaatgatccccgcaacttgcgtctgtctaccattgatctgtccgaattggtgcggagtctgttcgactatttcgaggcgctggcagaagatagcggcattacgcttggtgttaaaggggcgatcggcagcatagcggcggatcgggaaatgctcacccgggcgctgaacaatcttctctcgaatgcaattcgacacacgcctcgcggcaagagcatcacggtcttgctttcgcaggatgagcagtggacaacgatcagtgtggtcaatcccggtgagagaattcctgagcgcgatctaccaaagctcttcaaccgcttctaccgagttgatccggcacggcaacgaaatacggcgggcgccggtcttggccttgccatcgtgaaatcgattgcggaggcacatggtggctccgttgccgtgacctccagtgagcttgtcaccaggtttgacttggtattgccccatctgcggcagtag

SEQ ID NO: 324070 - DNA, 327 bp, Pseudomonas aeruginosa
atgaatattccgcccgatcgaagtaagagcacaggaaacggcccgaactggtctcgcatcaaccagtggctgctgtggctcggcctcgccgccgccgttgcctggatgttctaccgccacaacgcccatcttctgcaactgcttcccttcctcttcatcctcgcctgtccgttgatgcacatcttcggccatggcagtcacggcgcacatggcggtcatgaccatcaagatcagccgcctcggggcgatgaagggggttcgcctgcgcgccaatcagacgaccggagccgcccgaaatccgtcgaccagtccgggcaccaccactga

SEQ ID NO: 324071 - DNA, 300 bp, Pseudomonas aeruginosa
atggaaaccatcgaactcaaggttgccggcatgacctgcgcctcctgcgcgaactcggtcagcaaggcgctcaagcgcgtagctggtgtgcaagacgtgcatgtcgatctcgctcgcggcgcagcgagtgtcaccggcgaccagacggcccagaagacgcctgagctgatcgcggccttagctgccgcgggctacgaggcatccgctgattcctcgccgggcattgcggcgggtgccggtgcctcccatgcgccggccgctgcccgttcaaaggggcatggcggctgctgctgccgctga

SEQ ID NO: 324072 - DNA, 1668 bp, Pseudomonas aeruginosa
atggacgcacgcacgaactcccagggtatcgccgccgcaccgcttggactctttgctgcctactggggcgacatgctgtggcggaccgtcgcgtccggcgaagcgctgagacagcgcgccaacaacatgaccgaacacgaagcggcgggtatgccgccgctgctccacttcgagtcagagcaggtggctgacggccacgacttgcaaccggcgagcaactaccggctcctgcgtgtcactcgctgtggcaccgacgccttggagaagcatgtgcgcaaaggcgccgcgccggtgctggtggtcgatccacgcgccggccacggccctggcattggcggcttcaaacgcgattctgaagttggcatggcactgctcgaaggccatcccgtgtacttcgtagtgttcgatccggagcccgtagagggccagaccatgggcgcagtcgtccagaccctggccacattcatcgacatggtggccaagcgccaccgaggcaaggccccgatcgtctacggcaactgccaaggcggttgggcgatcacgctggcgctgtcgcactgcgagcaccgtgccgccttggcagtgctcaatggctcgccgctgtcgtactgggcaggcgagagaggcatcaaccccatgcggctgctcggtgggttcacgggcggcatctggccggcgcactgggcgtcggacctcggcgccgggcgattcgacggtgcctggctggtccagaacttcgaggcgttgcggcccgagggcgtgttcaagaaatacgacacgctcttcgcgcagccggagactgagcgcgatcgcttcctggagttcgagcgttggtggaatggcttctaccagcttgcccgcgaggaaatgttgtcgatcgcaggcgatcttttcgtaggtaatcacctggagagcggcgaggtcgtggtcgatggccactgccgcgcggatctcagccgcattggcgcaccgctggtggtcttttgctccaacggcgacaacatcacaccgccccaccaggcgctcggctggctcaaagcggtatatccgacgaccgcagacctggtggcggcgggccagcgcgtggtgtacctgctgcaccaacatgttggccaccttggcatcttcgtctccgcgggggtggcgcgacgcgagcaccgcgccatcttgcatcatgccgaatcgatccaggcactcaagcctggactctacgagatggttctggaggacagcgcctcttcggagtcggccgccgctgcgcagttccagccgcggcggctggaagacctgccttacgacgccaacccggcggggttcgacaaggtcgaagcactctcggagatcaccgagcgcttctattcgcagtgggtgtcgccgtgggtccgcttcgccgtcacccccgactcggctcgtgaacttcgcgcgctgcaccccatgcgcgtcagtcgcaaggtctggtccgagcaggtgaccccggccctggcgctgctgccatgggtgcaacgatggcttgagcagtggagtgcgcaggatccccatcgggtcgaaaatccttggtatcagcttgagcgaactggtgcagacgcgattgggcaggccatggaatcatggcgcaagagccgggacctgtgggctgagcttgtgttcgagcaggcctatgccaactga

SEQ ID NO: 324073 - DNA, 1134 bp, Pseudomonas aeruginosa
atgcgcgtcctcgccatcaatgccggcagtgcgaccctgaagttcggagttttcgagtcggctcgtaccttgccattgatcgactcggcgattgatcatcctgcggtggatgctgcgaccttcgaggagatcgagcggcacttgcacagggcgggtgtcacaacgctcgatggcattggtcaccgcgtcgcacacggtggcccactgttgagcaacgcggtgctcgtggatgaagaagtcgaacgcgagatcggcaaggcttcggctctggcgccgcatcacaatcctgccgcattggccggcatacgcctgacccgtgagcgttggcccggcgtgcgccacgtcgcggtcttcgacaccgctttccatgacgacatgcccgaatacgcccattcctatgctgttccgccatcgtggcgcgcggcaggggtacggagatacggcttccatggcctgtcccaccagggtgtactggccgccgtcagcaccgagctgaaacggccgccgtcagaacttcgtatcgcgagctgccacattggaagcggcgccagcgtctgcgcgatcgatcgcggaaggtcggtcgatacatctatgggaatgaccgcgcttgaaggtcttgtgatgggcacgcgctgtggagacctcgaccctggcgtacccggcttcgtcgcacgcgcactgggtttgacgttggcgcagatcgaggcggcgctttacagcgacagtggactcaaaggattgtcgggtgagagttcggacctgcggattgtggagaagcgcgcgggagaaggagtcggagccgcccaactggcaatgcaggttcacgcgtaccgcgtgcgcaaatacatcggcgcctacgccgccgcgatgggcggttgcgatgctgtggccttcactggcggagctggagaaaattcggccgcgttgcgtcggcgcatcgttgatggcctggagttcatcggcctggaactagacgaagagcgcaatcgcgcctactcgcccaacactgaagtcgcccagttgcagtcatcccgatccgccgtcgccgtgctggtggttcaagcacgcgagcagttagcgatcgcgcgtgagacgttccgagcgctgaatgaccaggcaagtggtttggtatag

SEQ ID NO: 324074 - DNA, 453 bp, Pseudomonas aeruginosa
atgcaactcattgaatgcgccaaggcggcaggcgtcacaccggacacgttgcgtcactaccttcgggtggggcttgtggtgcccgatggccggggcacgaacggctaccgcgcattctcggatcgaagcgtcacccgggttcgtttcatacgcaatgcattggccctcggcttcacgctcaaggacgctgcagagtttgtcgagatgagccagcgcggtgcatcgccttgtccgcgcgcgcgggcgctgctgagcgaacggcttgacgagcaggcccggcggctgaaggaggcgacagatttgcatcgccgcatgcagcaggcagagcgcgactggaagcggctgccggacggcgtcccggatggccattccgtctgcggtttgatcgaaggagcggatgcggacgttcagcgcaattcggtgcgcgcgaagtcccgtcgtgtacgcgcatga

SEQ ID NO: 324075 - DNA, 1317 bp, Pseudomonas aeruginosa
atgagccacctcacgacacgggatcgaaccgtatcgcccgacggatatgccgccgcgctacggatcttgcgccggctgctggccggcatcgagcgcccgccggcgttgcgtctgggcgatatgctcttgcacgagctcgaatcgcacccggaatacaccctgatcatccgtgacccgggtctgctgcgtcgcttggtcctgcgcccggatccgctgctgctggcggaagcctatttccgcggcaccatcgacattgagggagacctgtacaccgcgctcgggctcaaggcgcatttcgagaggttttcgctctcttggcgcgacaaactggccctgttgcgcgacgcactgctgctgcgcgtgtccgaccaggacgggttgaagccctcgcggagtctggcctcgcgcgtcgcacgtcgcttctcccatcgccattcgcgtcaaaccgatcaggccgcgatctcctttcactacgatgtgtccaacgcgttctatggactctggctcgatgccgagagggtctactcatgtggctatttcaaggcgacggatgacacgctggaccaggctcagcgcaacaagctggagcacatctgccgcaagctgcgcctgcagcgaggcgaacgcctgctcgacatcggctgcggctggggcgcgctcgtgtgctgggcggcaagagaacatggcgtccgtgcgcacggcatcacgctcagccaacagcaactcgagtacgcgcgcgagcgcatccgctcggagggcctgcaggatctcgtcaccgttgaactgcgcgactaccgtgacctcgaaggcacggccgttttcgacaaggtgtcaagcattggcatgttcgagcacgtgggactcgcgaacctaccggcctactacgcggtggtccagcgggttttgcggccaggaggactcttcctcaaccacgggatcacccatgacgaggagggctggagccgaaccgtcgcgactgagttcatcaaccgctacgtcttccccgacggcgaattggactgcgtcagcaatatccagctagggatggagcgctccggcttcgagatccatgacgtcgaaggtcttcgaccccactacgcgctgaccttgcgtcattgggtccagcgactcgaagcgcgccgggaggaggccttgcgggaggtcgatgaggtgaccttccgcatctggcgcttgtacatggcggcgtgtgcactggaattcgaggccggggggactgggatctaccagatcgtcgcgtccaaacgcgacggcggaagctggcccgtgcccttgacccgctctgatctttatggataa

SEQ ID NO: 324076 - DNA, 2430 bp, Pseudomonas aeruginosa
atgaaccacgagcttccctgggtcgccgagcgcgtccgcgtgttccgcgagtctgatcccgagttcgcccgctgggcgcgcggccacggccccatcacccacaacgatctcacgcaactgcgagtccacgatctcgcacaggtgctggttgccgaaggcaaggcgagcgacacaaccgcggtgtatcgcacgctctggtcggcggaccgcctggccgtggcaggcatgtggttgacggttcacatgacctatgccgaccgggtctatcccgatggccgggagatgagagccgaggatttcaaggagacgccggaggggcataccggtggggcgctgaacatcgtgccggcctatgtcggctacctggccgcgaacgcgctcagtgggttgacgcgtggctggttgatgggccagggccattgcgtcgcgggcatcgatgcctgcaaccttctggtgggcaacatgacgccgcgccacgccgagagatacgaccgcagcgaaagcggcctcacgcgctttgcccgggatttctatagctacgcgatcgacgcacaggggcgtcccgcctcgccgctgggcagccacgtcggcccgaatacggcaggcggtctgtccgagggcggctatctcggctttgccgaactgcagtacgtgcacatgcccttgcccggcgagcggctggtggtgttcctcagcgacggcgctttcgaggagcagcgtggcagtgactgggcgccgcgctggtggcgggcagaagacagcggcttcgtggcaccgttcatgatcctcaacggtcgccgcatcgaacagcgcagcaccatgcagcagcaggggggccgagaatggttccaccagcatctgcggctgaacggcttcgacccgatggagatcgacggcaccgaccccgccgcgttcgcctgggccgttcacgcgatggaggagcggttgtcggcctgcgcggctggagtttcgcagggcaccgttcagtacccggtacccctccactacaccatcgccgaagcgcccaagggattcggcttccccggtgctggaaccaatgccgcgcacaacctgccgctggaggggaacccccgggtcgaccagatagcgcttcagcagttcaacgagggtgctcgcgctctcttcgtgccgtcgcacgaactcgacgaagcggtcgcactactgcgccggcacgaagtgcagcatcgtcccctggagcgggaccatgccctggcgcaccgccaggtggcggcccccagacttccggttccgcagtggcatgttgcgggccagggcgaggtctcgccaatggcggcactcgacggagccttcgcggccctcgtccaagccaacccacagctgcgtccgcgggtaggcaatccggacgagctgcgcagcaaccgcatgggccagacattggacctgctcaaacaccgcgtcttcacgcccgaaccgggcctggcggaggccgtcgatggcgccgtgatcacggcgctcaacgaagaagcggtggtcagcgcggcgctgggcaacaagggcggcatcaacttggtcgtctcttacgaggcatttgccgtcaagatgctgggcgcgctgcgccaggaaatgctgttcgcgcgacatcaggcgcaggcaggcacaccacccggatggctgtcggtggtcacggttgcgacgtcccacacctgggagaacggcaagaacgagcagtcgcaccaggatccgacgctggccgaagcgctgttgggcgaaatgtccgacacctcgcgcgtgttgttcccggtcgatgccaacagtgccgttgcggcgctgcgcgcggcctacgcctcgcatggccagttctggacgctggtcgttcccaagcgggccgtcgccagccagttgagtgccgagcaggccgaacgcttggtcgatcagggtggttgggtggtgaagccctgcgacgcccccgacgtgttgctggttgccatcggcgcataccagctacagcaggccctgcttgcggcgcggcgcctcgaagccgctggacatcggaccgcagtgacctgcgtcatcgagccgggccgcttcagagcaccccgcgacgaacgcgagcaggactttgtggccggcgaccaggccttgcgcgccctgttcccggagactgccgccgtgcgcgtcatcgtctcgcacatgcgacccgagccgacgctgggcctgatgcgtcggatcgatacaggggcgcggcagacccgtgccttgggctaccaggcgcgcggcgggacactcgatgtggccggcatgctgttcgcgaaccgttgcacgtgggcgcacgtcgcggcggaggccgctcaagggctcggtgtcgatccgcagagcttgctgagcgccgaggagtgggccgccgtgcaggggcgtggcgacccgcgcgtcatcacggtctcggcttaa

SEQ ID NO: 324077 - DNA, 603 bp, Pseudomonas aeruginosa
atggccaagagacgtcccgccgagacccagcaaatgctgctggatgctgcgctgggggaatttgccgagaacgggctggcgggggcacgaattgaccggatcgcggcggctgcaggcatcagcaagccgatgctttatgtccatttcggggacaaggaggctctcttcgacgccgtgctcagccgggaaatcctcgccgcggcgcaggacgagcgcttcgatgcggacgatcttcccggctatgcggggcgcacctacgatttgctcaccgagcggccgcacctatggcggctcatgacctggttccacctggagcgaggccaagaagtgctcctgctccccgccggtcacagcgtactggaagccaaacatgcggccatcaccgctgcccaggcggaaggacgcatcaccgcggatttcacgcctgatgagatcgtgcgactggtagcgacgatcgtgcaaacgtggtgcatggcaccggcggcgagggattcgcaggagcacgaggcgcgcagacgggcgattcagttggcgattgcgcggatgctttcgcctggcaaatcccctctccagcgcgggaaaatagttgacgcctcgcgctga

SEQ ID NO: 324078 - DNA, 831 bp, Pseudomonas aeruginosa
atgtccagacattggttcctcaccggcgcatccagcggcatcggtcgccatcttgccgaaatcatcctggcttcgggggatgacctcacggccaccgtcaggcgtcccgagacgctcgacgacctggcagcacgctacggtgaccagctcgttgtcgaacggctcgacgtgaccgtgaagggggacatcgcacccgtggtccagcgcgccgaggcccgccgcccggtcgatgtcctggtcaacaacgccggcggcggcatcatcggcgccaccgaagagttttccgacgcggacatcgaagggcagatcagcctcaacctgctggcgccggtgcacgtcacgcgggccttcattcccgccatgcgcacacggcgagccggtcggatcatccaaatctccagcgccagtggccaaggctccctgccgaccagcagtctttaccacgccgcgaaatggggtctggaaggcttcagcgaatgccttcgccaggaactggaggggtttggggtcttcgtcacactcattgaaccgggcggcgcacgcacgagcttcagccgcaatttgcagtacgcgctggcgaaccccgcctatcaggacacgcctgctggacagattcgcgcgatgttcgagaacgcgggtgacgagttgtacacgctcgatccgcagaagatcgcgcaccggatcttcgacacggccacgagcgagaagccaccgcttcgggtggcgctgggcggtgacgccttcggcgtcatccaggcggcgctcaagggcaggctgtctgctcttgaagcgcaggagagtctggcgcgatcggtggccttcgatagctga

SEQ ID NO: 324079 - DNA, 1263 bp, Pseudomonas aeruginosa
atgagtgaattcgatgatcccgcgctggtcgggctcgggctggcactcgcttcgggacttctgatcggcctggaacggggatggcagcaacgcgagcggcccgagggacatcgcgtcgcgggcgttcgcacctttgcgctgatcggcctgctcggcggccttggcgggctgctggcccagcgctggggagccggcatgctcatcgcgctgctcgtactcgtcggggtgtatctggtggtgggctacctggtgacggcgcatatgcatgccgtgatgggactgaccacgtccgtcgccgcccttgcgactttcgccatcggggcgctggcgaccagtggcgcttggcacgtttcggcggtcgccgccgtggtcgtgctggcgctgctgcgtttcaagcagctcttgcacgccggcgtcggcaagctgtccgaggcggagatcagcagcggcacgcagttgctgttgatcagcgtggtcgtactgcccgtactccctgatcgtggctttggcccctatgaggcgttgaatccctatcgcctttggtgggccgttgtcctgctggcagtgctgtcgttcgctgggttcgtcctgatgcgctcgctcggcaggaaacgagggctggtattcacagcgctgctcggcgggatcgtgtcgagcaccgccaccacggccacgttggcgcgctgggccgggcagacgccaggctggcgtccactggcagcggcgggggcggcgctcgcctgcgcagccatgtttgcgcgcatggcggctctcgtcgccatcgcagcccccggcatcggctgggacccggtggtcatcttcgtggccatggccgtggctggcggtgttctggggacgttcctggcggcgcggtcgcccgccgacgacttgcccgaacttcagcttggcaacccattgcagctgcgctccgcgctccagttcgcagccttcctggccgcggtgatgctggcaggccgctttcttgccgatcgcttcggggatgctggcgtcatgctgaccgccgctgcctcgggtctggtggacgtcgatgcgatcacgctctcgattggccgcctggtgaccgagggcgccgtcaccgccgcttcggccaccctggccttgttcatcgccgcatccgtcaatcaggtcaccaaacttgtcctgttgatgtcgctggccggtagggcgctcgcatggagagtgctgccgtcgtacgcggccatggctgctgctggctttgccgtcgccctgggcttgacctga

SEQ ID NO: 324080 - DNA, 1056 bp, Pseudomonas aeruginosa
atgaacaaggtcagagtggcggtgaacggatacggtgtgatcggcaagcgggtggcggatgcggtcgcactccaggaggacatggcgctagccggcgtcgcggatgtggtgcacgactatcgcctgcaggtggccgcgcagcgcgctttcccgatttacgcggcgaccgctgaagccgcacaatcgatgcgtgctgcggggcttcctgtcgcgggcgatctggccgacctgctcgccaacgcggacgtcgtggtcgattgcacacccaagaaagtcgccgcggtcaacaagagggcgtacgacgctgccggtgtgaagtccatcttccatggcggcgagtcccacgcgttgaccggtcattcgttcgtcgcgcaggagaactacgcaaccgcgatcggccgcacctccacccgggtggtgtcctgcaacacgacgtcgatcgtgcgcaccctgggggcgcttcggacagcgggcctgctcaagcgagcccgcgggacgctgatccgccgggcttccgacccgtgggaggcgcatgcggagggcatcatcaacacgctcgtgccggagaagacgatccccagccatcagggaccggacgcgcgcactgtgatcccggacctggacgtcgtcacgatcgcggtcaaggcgccgcacaacagcagccacctgcacacctggtgggtcgaactgacgaggccggccacgcgcgacgaggtgctggctgcctttcgcgctgcgccacggatcgcgttcgtgcgatcctcggatggtctcgtggccctcaacagcacggtggaactgatggccgatctcggccgcccgcgcggcgacctgtgggaggtcgcgttgtgggaggacgtgctttcggtcgatggcgatcaggcgtactacacctaccaggtcttcaaccaggcgatcgtaatccccgagaccatcgatgccattcgcgccttgagcggcatcgagaccgatctccaggtgtcgatggcgcgcaccgatgcttcgctgggactgcagcgtgatttcatccgtgaccgcgtccaggttagacgatga

SEQ ID NO: 324081 - DNA, 1623 bp, Pseudomonas aeruginosa
atgacgcgaccgaaccgccccgtttccaccgtgcgtcttgcgggccgcccaacgcaacgctcggcgctgcgccgggccacgcagatcgctatggccctgagcgggttcctgctctgggtggcctggcaccggggcctgatgcgctgcgatacccaccgggcggccgaccgcttcgccgaagtgctgcagcgattgggcacgaccttcgtgaagctgggccagcatctcagcctgcgggccgacattctggcgcccgatgcgcaagaggctctggccagcctgcaggccaatgtggcgccgtttcctcccgagcaggcggtccaggaggtcgaggcggcgctcggccgcccatggcagcaggtcttcgcacgcttcgacatgcacgcgctcgccgcggcctcgatcgcccagattcatcgtgcagccctgccggacgggacggaagtggtggtgaagatccgccgccctggcgcggccgagcaggccgagaccgacatgcgcatcctgcgccgcatcgtcctggtcatgcaggggctcgtgccctcgctgcgtcgctgggggctggcagccatcgtggacgaggttgcggccaacttccgctacgagatggatttgtcgcgcgaggcagcttccgtgcgacgtttcgccgacgcctggcgcggctctgccgacatcgtgatccccgacgtggtggacggcctgtgcacgccgaccgtcatggtccagcagttcagccacggagctcacctgcacggtctgccttcgcccaccgcggtggcggccgcgggcaaactcgtggacagctacgtcgcccagatcttccgcgatggcttcttccacggcgacccccatcccggcaacgtcttcgtgatggacgatggccgcatctgcctgcacgacttcggcatcgtgggccgggtcgacggcaacatgcggcgggcgctggtggcgttcgccctggccttcgtcgagcaggatgccgaatgggtggtcgatgcctggctcgacctgggcctgctcggcgacggcaccgatcgggccgtgttcgtgcctgtcgtgcgtgccctggtcgcagactgcgcacagaggccgctgaaggactggtcgctctcaggtgctctcgcgcagctcgtggcggcgggccggacccaggaagtccggctgcccagggacctcctcgtgctcacgcgtaccctgttgttgctcgaagggacggtgcgcctgctggcacccgagttttccatcatcgaagccatctctcgccacacgaccacgggcgtcttcgacgagcccaagtctgcggcatcgcagcgtctgccatatgaactggggaacgcggcccacgccctgccctccctgatggcgcggcgtctgcacagcgtcttgcggcagggtgacctgctgcaactgtcgatcaagccggatgccaggatgctgagcgggatcgaccgcctcggccgtcgcgtcgcgctggcgctcgtgacgctcggcctgtacatcgcatcgagcttgttgatgcagcacggcgtgggcccgcgctggggcgacatgccggtactcgcgctgctgggctatgcgctggcgatccggttcacgttttccatcgcgcgcagccgcggctga

SEQ ID NO: 324082 - DNA, 1032 bp, Pseudomonas aeruginosa
atgaccgcacaaaaccgtctgtccgttctgttctccgacatcgcaccggcggaccaggccgcgctgcagcaacggcttccgacccactggcacgcgcacttcgtccagaacgaacgcctggtggtatccgatgtcggcgatgaagacaccgaggtgctgtgcgtcttcgtgcgcacgcgcgttgacgaatcggtgctccggttgctgccgcgcgtgcggctcgtggcaacgcgctccgcgggcttcgatcacatcgacctgcaggcttgccgccgacgcggcattgccgtgtgccacgtgccggactatgggtctgccagcgtcgccgaacatgccttcgcgctgctgctgggcgtggctcgccatctgacacaagcccacgagcgggcgcgccaaggttctttcgcttaccgcggcctcaccggcttcgagctggaaggaaagacgctgggcatcgtcgggctgggccggatcgggcgccacgtggcccgtatcgccctggggttcggcatggaagttctcgcttacgacccggccctcgcccaatcgctcgacatcacggcagcacccatcgccggcgtccgcgtggtgacgtgggagcagatcctgcaaagcagcgatgttctgagccttcatgttccggccacgcaggccacgcaccaccttctcgatggccaggccttcgcgcgcgtgaaaccgggcatggtactgatcaacacggcacggggtgcgctcatcgacgaggccgccctgctgcacgcactggaggcaggtaccgtcgccgcagcaggtctggacgtgctggaacaggaaggggatctgtctcccgaagtgcccacgggctgcggcggactgggttgcgataccggctggtcggcatccagcccactgctgacgcatccgcgtgtgctcgtgacaccgcatgtcgggttcaatacgtcggaggcgatcgcgcgcatcctcgacgagaccatctcgaacatcgcagcctggcatgcgggccgcctgcgcaacaggttggatgagccatga

SEQ ID NO: 324083 - DNA, 255 bp, Pseudomonas aeruginosa
atgacgaatcctccggccagattcaagcccgcactggcctacgcggactgcggccgcacgcagggcccgatgcgctgcgcggcgttcttcacggttcagttgctcgacggattcgagaccatgcgcgatgcggtcgccggccggctgccgacggtgttcgcgcaagcggaactcgcgcaaggcaccaagaccgggcacttcatcgccgcgttctgcatcctgtccctgcaccgggtaatcgaggagggctcatga

SEQ ID NO: 324084 - DNA, 645 bp, Pseudomonas aeruginosa
atgtgcttttccgcacccgccagtttcacggccgcagcggttctgctgggcctggggaccgtcaccatgcgccgggcccgctcacggcgcgaactgccgtatgccgccatcccgctgctgttcggcgtccagcaactgctcgaaggcatgctgtggctgacgttccccgaccgcgcgcccttgctgaacgtggcgctgacgcatctctactcgttcttctcgcacgtcctgtggccgatctacgtcccgctggctgcgctggcgctggagagcgtccgttggcgccgtcgggttctggtggccattgcagtcgcgggcgcgctcgtcggtctgtacctgctggcgatgctggtgaagctgcccatcacggcccgcgtggtcggccagcacatcctctacgactctccgcacttctacgtgatgaccacgatggccctgtatctgatcggcacctgcgcaagcctgatggtttctagccaccggcgcgtggcggcttttggggtggccgcctttgtctccgcaatcgccgcctacatgttctatgcaacctggttcatctcggtgtggtgcttctttgccgctgggctcagcttcatcgtgctgtggcagttccgtgagccccgagcgaggctggccgtgccatga

SEQ ID NO: 324085 - DNA, 900 bp, Pseudomonas aeruginosa
atgaaacctctcgtttttcacctgccgggcgacgaagacttcgccgatggactgatccgggcgttgggcgcgcagcgggctgccctgcaactgcaccggttcccggacggcgagtcgctggtgcggctggacgccgacgtcaccggccgcaccgtcgtgatcgtggccagcctggcacagccggacgccaaggcgctgcccttgttgttcgccgcggacgcagcgcgcgacctcggcgccacccgcgtgttgctggctgccccgtacctggcgtacctgcgtcaggaccggcgcttcaacacgggcgaagccatcacgtcccgcacgtttgctgcgctggtgtcgacggtgttcgacggtatcgtcaccgtcgatccccatctgcaccgctaccgctcgctcggcgaggtctaccgggtgccgacccgtgtggtccagtccgcgcccgccatcgcggcctgggtcgcagcccatgtggaccgtcccgtgttgatcggacccgatgcggaaagcgagcaatgggtccaggaagtcgcgcgcttggctggcgcgccgttcacggtgttgcagaagatccgccggggcgacaaggacgtggaggtcagccttcccgacaccgcggccctggcagaccgccagcccgtgctcatcgatgacatcgtgtccagcgcgcgcacgatgatccaggcaatcgccagtgtgcgcagcgtgggattgccgccaccggtgtgcatcggggtgcacgccctgttcgccgccgacgcgtaccacacacttcttgcggcagggccccagcgggtggtgacctgcgacaccgtgccgcatgtctccaacggcatcagcgtggtggcaccgctggcgacagcggtgcaggaactgatggaagccggcgcgccatga

SEQ ID NO: 324086 - DNA, 1554 bp, Pseudomonas aeruginosa
atgacggcgcacctgcacgagaccggcaccggcaccggcaccggagaggatggcgtgaacacgctgcaggcgtggcgcaccggcatcgacacccatcaggagccggtggtctacatgcggcgcgactgccctgtctgccagtcggagggtttcacgacccaggcgcgcgtgcagctgacggccggccgccgcagcatcgtggcgacgctcagcgtcgtcgatggggattggctggccgagaacgtcgctggcctgtccgaatcggcatgggcgtcgctgggggcgcagccgggccagctggtcacggtgacccatgcaccgccgctggattcgctcagccatgtccgagccaaggtctacggcaatgccctgggcgatgccgagttcagcgccatcatctccgacgtcgcggcgggccattactctgacctgcatctggccaccttcatcaccgcctgcgccggcgatcgcctggacctcgcggagaccgtctcgctcacgaaagccatgattggcgtcggtgaccgcatcgattgggggcgcccgctggtggtggacaagcattgcgtcggcggcctgcccggcaaccgcacgaccctgctcgtggtgcccatcgtggccgcctgcggcctcacgatgcccaagacctcctcgcgcgccatcacctcgccggccgggacggccgacacaatggaggtgctggcgccggtgaacctggatgtgcggagcatgcggcgcgtggtcgaacgcacgggcggctgcatcgtctggggcggctcggtacggctcagccccgccgacgacatcctcatccgcgtcgagcggccgctggacctggacagcgagggccagctcgtcgcctcggtcctgtccaagaaggccgctgcgggctcgacccatgtgctgatcgacctgcccgtgggtgccaccgccaaagtgcgcagcgcgcaggccgcggcggcgctcggtcggcgcctgcaggaggtgggcagcgccatcggcctgcacgtggccttgcgcgtcaccgatggtgagcagccggtcggccgcgggatcggcccggcactggaggcccgcgacgtgctggccgtcctacaagggacgcccgaggccccggccgacctgcgggagcgagcgttgcggctggcggcggacatcctcgaaatgggcggtgcagcgcccgccggcggcggcctgacgctcgccacgcaggtgctggccgacggccgcgcctgggccacgttccaggcgatctgcgctgagcagggcggcctgcgcagcatcccggtggcaacgcatcggcacaccgtcgcatcgccgtccacgggacgggtctcccgaatcgacaaccggctgctcgcgcgggcggccaagctcgccggagcaccgaccgccgctgccgccggcatcgacgtgcatgcgcgcctgggcgaccaggtcgaagcgggacagccgctcttcacgctgcacgcccaggcgccgggcgagctggcctatgcgctgcagttcgtccgctcgcgcccaccgatcttccagatttcggagaacctatga

SEQ ID NO: 324087 - DNA, 1362 bp, Pseudomonas aeruginosa
atgcaacttcaatttctgggtgccaccggcaccgtgaccggttccaaatacctgctgcgccatggcgacgcgaccattctggtggactgcggcctgttccagggattcaagcagctgcgcctgcgcaactgggagccgctgccggtcgcgcccaagaccgtcgacgcggtcgtgctcacccacgcccacatcgaccacagcggctacctgccactgctggcgcgacaaggctttcgcggccgggtttactgcacgtccgcgacgcacgagctgtgcaagatcctgctcaccgacagcggccatctgcaggaggaagaggcgaagttcgccaaccggcacggtttctccaaacaccagcccgcgctgccgctgtacacccgtgaggacgccgagcgctgcctgaagctgttcgcgccacgtccgttctctcaggacttcgaggcgctgcccggactcaccgcgcggttgacgccttccgggcacatgctcggctcggccttcgtgcacctcaacgacggccggcgatccgtgctcttctccggcgacatcggccggcccaacgacccggtgctgcgcccgccggtgcaggtccccggcgccgactacctgctggtggaatccacctacggcaaccgcaagcatgaagcgtccgacgcactggcgcagctggagactgtcatcaacaagacggccgcccgtggaggggtcgtggtcatcccagcgttcgctgtcggccgagcgcagagcctgatgtacggcatctaccagctcaagaagcaagggcgcatccaccagcacctgcccgtgtacctggacagcccgatggccatcgatgccacacggctgtaccacgcccatcgcgacgagcaccggctctcgcccgaggaatgcgagggcatgtgccatgccgcgaagatcgtcaacaaggtcgaggagtccaaggcgctcagcgccggtcgtggaccgatggtcatcatctccgccagtggcatggccacgggaggacgcgtggtgcaccacctcaagtcattcgcgcccgaccatcgcaacaccatcctgttcgccggctaccaggcgggcggcacccgtggcgccgcgatcgtgcacggcgcgtccaccgtccgcatccatggccaggacgtgccgatccgcgccgaggtggcctcgctcgacaacctttccgcccacgccgatgccgacgagatcctcgcgtggatgcgcggcttcacgcaaacaccgcgccgaaccttcgtgacccacggcgagccggaggcggccgatgcgctgcgcgcgcggatcgaccatgaactgggctggtcggttgccgtgcccgagtacctgcagacggtggatctggtatga

SEQ ID NO: 324088 - DNA, 498 bp, Pseudomonas aeruginosa
atgaacatgcaacgacttcttcgccaccttgcgaccacggatcgcgcagtccgccgcgccttccccccgtgcgcgctggatgcgatcgagcaggccatccgcacgggagagttccagcatgggggccagctgcgcttcgtggtcgagggtgcgctggacggatcgccactgtggcgcaaccaatcgccgggcgagcgggcgctggacctgttcgcacgcctgggtgtgtgggatacggcgcacaacagcggcgtcctgatctacgtgctgctggccgaccgggccgtggagatcgtggccgatcgcggcatccatgcctgttgcggtgccgaaaggtggtcggctgtgtgccagcgcatggaagcccagtttgcgcagggacgcttcgaggccggagccctggaaggcatcgtggccgtcagccacctgctggtgcagcactttccgcggggcgcggaccacggcaacgagttgccggatcggccggtccttctttga

SEQ ID NO: 324089 - DNA, 906 bp, Pseudomonas aeruginosa
atgagaacgcccagaacagtggtgctctctccggcggcccctcttcggctggcccacgctctggcctggctgctgctgagcctgttcctttcggtcgcgtccgcgcaggagttggtcgccgttcctccgctgcaggcgcgcgtcaccgatctcacgggaacgctcgccgccgatcgtgtcgccgcgctggatgcgcagcttcgggccttcgagcaacgcaagggcgtgcagatcgccgtgctgatggtccgctcgacgcggcccgaacccgtcgagcagtacgccctgcgggtggtagagcaatggaagctcggccgtcgcaaggtggacgacggcgcgttgctcctggtggccaaggacgaccgcaccgtgcgcatcgaagtcggatacggcatcgagggtgcgctgagcgacgtggtatcgcggcgcatcatcgacgaggtgatcacgccgcgcctgcgccagggcgatttcgacggcggcatcgccgcaggcgccgaacagatcatgcgggtgatcgatggcgaggccctgcctgcggcggacccacggcggcaggggcagaccaacgacatcgggcaggcctggcccttcctgttcgtcgcggccctgatgctgggcggagtgctacgcaacgccctcggccgccttccaggctccctggtcacggctggcgtgctgggtgccgctgcgtggcagttggtgggcaccttcgcggtggccgcggtggctggactggcgggattcctcgtcacgctgctgggcatcggcatgggtggccacggcggcatgcacgggcgccaccggggaggcggctggccgggcggaggattgggcggtggtggcggtggattccgcggcggcggcggcggcttcggtggcggcggcgcgtcaggacggtggtga

SEQ ID NO: 324090 - DNA, 612 bp, Pseudomonas aeruginosa
atgagactgatcctgatgtccctgctcgcagcgcttgccctgtcgctgagcggatgcggctacaacgacttccagcggctggacgagcagaccaagtccgcctggtccgaggtgctgaaccagtaccagcggcgcgccgacctgatccccaacatcgtcgcgaccgtcaagggcgagaccaacttcgagcaggagacgctgacccgggtggtcgaggcccgcgcgaaggcgacctcgatccaggccacgccggaactcgtcaacaaccccgaggcgttccagaagttccaggcggcacagagcgaactgtccggcgcgctgagccggctgctggtggtgagcgagaactacccgcaactcaaggcgaaccaggcttttcaagacctgcgtgcccaacttgagggcacggagaaccgcatcaccgtggcgcgtgggcgctacgtgaaggcggtgcaggattacaacgtgctcacgcgcagcttcccgaccaacatcacggccaagctgttcagctacgtcgtcaagcccaatttctcggtcgccgacgagaaggccatggcggcgccgccacaggtcgatttcggcgcctcggcgccggcggcgcgcccctga

SEQ ID NO: 324091 - DNA, 1326 bp, Pseudomonas aeruginosa
atggtagagagccgcgccatgcgatcaccgcgcgaatccgggcccacccgccagcaagacctcggcgtcgcgcagctgggttggctcgctgcggccgtattcgtcgtctcggccggatatggggcactgatgcccttgatccccgactggctgcggcccttgatgggcgacgcggatcctgcggcgcttgcgcgccatgtcggctacctcagcggcatctacacggcgggcatcctgctgggtgcgcccctgtggggcatgctggcggacaggctggggcgtgcccgcgtgttgctggtgggcctgatcggctacgtggccagcctgctcccgctgctgcgccccgagtccctgggcgtggtcggcatctatgcgctgcgcggcgcgacgggcttttttgtggccgcggtcgtgccggtggtgccggcgctcgtcgcgcagtacaccccagaatcgattcgcgccaggcgctttgcatggctgggtgcgatgtcgctgctcgggttcctgttcggccccggcctgaacgccgctgcagaacggcttgtcggcctgggcttcttgagcgtgctggtacagggctcatcgaccacgctcgtgatcgcactctcggccgcgctcggcgcgctgatgatgctgggcctggccgcaacgcttcccgcaccttcctcccttggagaggcggacgcagccgatcacgacggagcaccccggagccgctccctggcgctctggattctcaacggtgtgatcatgttcgtgcttgccggctttgaactcggcatcgtgctgcagggccagcgccaccccgatctctcctcccgagaggtgtcgttgatgttcgccgagtgcagtctggtgatgctgggcgtcaacgcggtgctgttcttcaccggcctgctggagcgcgccgacccacgccgcgtactggcctgcggcatggtcctgggcatcgccgggctcctgatgctggcccgccatggcagcgagatgtggctgtacgtcggcgtgagtttcacggctgcgggcacgggtctcgtgctccccaccctggcctacctcgctgccggcacctcggcgcggcggctcggtatcgcgatgggagggctcgccgcggcagccggcctcggacaaacactgggatcggccgccaccggatggctattcggcgctgtgatgcagagcacctttgcgtggctgtcgattccactggccgccaccctcgcgctgctgctcattccgcggcattggtggccagccaaccccgtcctggtgagcgcttcaccgtcccgcacttttctcacttccacggaaaccgaaccatga

SEQ ID NO: 324092 - DNA, 2466 bp, Pseudomonas aeruginosa
atgaagtcgatcaacgttgaagtcggagggctcgtatcgagcctgagcgcggagggagtacgccgcaagctgctgcagcttcccggcgtccatcatgcagatgtcaactatgttgcgggaagcgcaacggtccatctcgatgagggacaactcagtgtcgaggatctgcgccagcgcatcgccgaatgcggctatcactgccgtggcgagcagacgcccaagcacgtgtgcgcgcccgccgctggcgtctctgccgaccccagccatgcggtgcacggccatcacggcgcacccgcacgtcaggcgcaagagatggggcatgaggggcaccacgcgcatgcccccgccacggccgcacgcgcgaaggctgcggccacgacgcccgccgcccatgctgcgcaccaggcccacgcaggcgaccctgcgatggacgacatgatgcacgacatgggccacgggtcgggctcgatgcaggacatggctcgggacatgcgcaatcgcttcttcgtggccctggtcttcgccattcccgtgttcttctattccccgatggggaagatgttcggcgacttccagacgccgttcgggctggacgacaagctctttcttttcttcctcgcaagtgccgcgatcatctatccaggttggcctttctacgtggcggcgtggcgcgcgctgcgcaacggcgtcgccaacatggccacgttggtcgtgctgtcggtgggcaccggctacctgttcagcatcggcgcgaccttcttctacgagggtgaggtgttctatgaagcggcatcggtgctgctggtcttcatcctgctggggcactggctggagatgcgcgcccgcgcgggcgcatccgacgcgattcgcgcgttgatggatctcgccccacccatggccacggtcgtgcgcaacggggtggagaccaaggtaccgaccgccgaggttgcagccggggaactggtcgtgatcaagcccggcgacaagatcccggtggatggcgagatcgtcgagggcgcgtcgcaagtggacgagtcgatgctgacgggcgagtccatgccggtcaagaagggcgtgggcagcaccgtcgtaggcgccagcatcaacaagagcgggagctttcgctacaaggccacgaaggtcggcgcggacacggccttggcgcagattgtcaagctggtccaggaggcccagaactcgaaggcccccggccagctgctggccgaccacgcatcccagtggctggtgctggcggcgatcgtgattggcctgctgaccttcagcgtctggtactgggtgatgggacagacattactgttcgcactcaccttgaccatcaccgtgttcgtgatcgcatgccctgatgcgctggggctggccaccccgatggccatcatggtcgggaccgggctgggcgcaatgaacggcattctcttcaagaatgcggccgcattggagaacgccaccaagttgacggtcgtggtgttcgacaagaccggcaccttgacactggggcagcccgatgtcgtcgagatggtggccgcgcccggtgtcgaggagacgcggcttctggcgacggccgccgcggtggagaagttctccgagcaccccctcgcgctcgcagtgctcaagcgtgcgggagacatgccgacggaggtcaccgagaacttcaccaacatcgatgggcaaggcgcacgggccactatcgggggcgagacggtgctcctgggcaaccggctgctgatgcagtcggaacaggtggatctggctccccttgccagcgaggcggcgcggctgcaaggcggggggcgcactgtggtccacgtcgcgcgcggtggccggctgatcggcctcatcgcgatcgccgatgccgtgcggccgacctcgcgcgagacgatcgccaagctgcaggcacgcggcgtgaaggtcgcgatgctgaccggcgacaaccaggcgaccgccgagcgcatcggcaaggaactgggcatcgacatcgtgcttgcggatgtgttgcccgggcagaaggcctccaagatcaaggaactgcagcagcagggtcacaaggtcggcatggtcggcgacggcatcaacgacgctccggcgctgacgcaggccgacgtgggctttgcgattggcgcggggacggacgttgcgatggaaagcgcccaggtggtgttgatgaagagtgacccctacgacgtggtcggggccatcgaactgtcccgggcgacgctgcgcaagatgcaccagaacctctggtgggccgtggcctacaacgtgatcgccttcccgctggcggccggggtgctgtatccgttcaccttgtcgcccgaggtcgctgcattgtccatgtcgggcagttccgcgatcgtcgcgatcaatgcgctgatgctcaagcgcacgcgcctgccggggatcaagcgcgtgacgtcgcgtgccagtgtcccagcggccgcgtcagcctga

SEQ ID NO: 324093 - DNA, 864 bp, Pseudomonas aeruginosa
atggcaaagaacaagaagggcgccaaaggcgccaagcacaaggccgatgtggacggcaccggcactgcccacggctcagcgcgcgacgagacagcgacacgctcgatcggccgcgaggactacgaagcacagttgcacatgctgcagatcgaactggtgaaactgcagcggcatttcatcaaatgcaacgaccgtatcctgatcctcttggagggaagggacggcgcaggcaaggacggcagcatcaagcggctggtcgaacacctgagtcctcgggaaacacgggtcgtcgcgctaggaaagccctccgaccgggatcgcacgggctggtacttccagcgctacgtcccgcacctgccagttggcgaagagctcgtggtgttcaaccgcagttggtacaaccgtgcgggcgtggaaccggtgatgggcttctgtaccgccgaggagcacgaggaattcatgaactcagtgcccaagttcgaggagatgctggtcaactccggtatcaagctgctgaagtattacctcgacatcggcaagaaggagcagagccgccggctcggggaacgccgccgtgatcccctcaaacagtggaagtcgagcccggtggatgccgtcgcgctgaagcactgggacggctatacacgggcgcgcgacgagatgttcatgcgcacccatacggccgcggcgccctggtctgtcgtgcacgccgacaacaaacggttggcgaggctcaacctgatcagagacatcctctcccggctgcattacgccggcaagaagcacaaggtcatcgctcccgaccgggagatcgtcttcgagttctcgcaggactgcctggactcgggccgactcgctcgttga

SEQ ID NO: 324094 - DNA, 159 bp, Pseudomonas aeruginosa
atgaagaagacccgctggcgtcagcgcatcaatcgaccgtacctggctgcagcctacggacaaggcgatggctgcggctcccgctcggatgcggacatgagcgccgcgccccgccgggcgtcgacacacgcaatgctgatcgcctgcgaccagacctaa

SEQ ID NO: 324095 - DNA, 651 bp, Pseudomonas aeruginosa
atgaaccacgatgcgcccgcttatgggctttggctgctcgtcctcgtgaactcggcggtcttcatcatgttcgccttcagcttcttcaaaccgcagacctcgcgcgactggagaaccttcgggacattcgcagcgttcattgttgccttgttcgtcgagatgtacggctttccgctgacgctgtacgtgctgtccggctggcttcagaccaagtatcccagtctggacttgctgtcgcacaacagcggccatctctggtcgaccctgctgggcgagagcggcgaccctcacttcagcccgcttcatatcgcgagctacatcttcatcgggggcggcttctggcttctgtcgagcgcctggacggtgctctaccacgcgcaacggcacgcccaacttgccgtgagcggcccatacgccaggattcggcacccgcagtatgtggccttcgtggcgatccttttcggctttctgctgcagtggccgacgctgttgacgctgctgatgttccccttcctcgtcgtgatgtattcgaggctggctgtcaacgaggagaaggacatgcgcaagcagttcggcgccgagttcgacgcctatgccgcgcgcacgccgcgcttccttccctccctctcggacacgcgccagcgaggctga

SEQ ID NO: 324096 - DNA, 240 bp, Pseudomonas aeruginosa
atgacaacttctcaccgcaccggtccaaggttttcgcgctcgcgatggttcctgggctttctggtcttcctggccgtgagcatctacatgctgctgacggaacaccgcgggcactacctggccgcgctgccactggtcctcctggcgacttgcgtcatcgctcatgtgctgatgcatcgccatgccgtaccaggcgacggtagcaaggcgaatccaccgtacccgggagagcgcaaatga

SEQ ID NO: 324097 - DNA, 402 bp, Pseudomonas aeruginosa
atgaaattcacgcattcgatcgcggccatcgttggcgccgcactggtcaccttgtctgcgttcgcgcaggacaaccatcaggcccatcaccccgcaggtgcgagtccgaccgcggccgagacgccaagggcgccgaccaccgagggcatggatgcgcaactgaagtcgatgcaggccatgcacgaacggatggtggctgcgaagacgcctgcgcagcgcaaggcgctcatggccgaacacatgcaggccatgcgggctggcatggcgatgatgggcgcaatgaaggatggagccgagtcggcgccgacagctgagcggcagcaaatgctcgaaatgcgcatggacatgtgccagtccatgatgcagatgatgatggaccggatgcctgagccggcgaagtga

SEQ ID NO: 324098 - DNA, 423 bp, Pseudomonas aeruginosa
atgaacgaaggtttgggtgattggatgacggttggcaggctggcgaaggtcgctggcgtcggcgtggagacaatccgctactaccagggacgcggcctgttgccgatcccgaagaacgccggcagcttccggcgctaccccgcttcgatgatccagcggatcggcttcatcaagcgcgctcagagccttgggttctcgctggacgaggtgaagtcgctcttggatctggaggatgggcggaatcgccgggctattcagacggtgacacggcggcgccttgaccagatcgatgagaaggttggcgaccttcagcgcatgcgaggcgctctgagagacatgctggagaggtgcgaagacacgggagaggcgcttccttgccctatcattgctgcgctcatggggcctttgaatacgtccgaatga

SEQ ID NO: 324099 - DNA, 426 bp, Pseudomonas aeruginosa
atgacggttggagaggtgtcacagcgcagcggcctgcccgtatccacgatccacttctacgagtccaagggcctgatccagagcgaacgcacgtccggaaatcagcggagatactcgcccgctatcttgaggtatctggccatcgtcaaagtcgcgcagcgggccggactatcgctggacgaagtgctcgacgctctcgggcagtatcagccgggcgttcatctgactgctgcgcattggcgccgtgtggcgtctaggtggcgtgaagaccttgacgaccgcattacgcagttgatgcggctgcgggacgaactcgggggatgtatcgggtgcggttgtctctctctcaaagagtgcccgttgcgtaatccgggcgacatactcgcaggccaggggcccggtgcgcgtatccttgagcgagaatag

SEQ ID NO: 324100 - DNA, 465 bp, Pseudomonas aeruginosa
atggagcgattgtttccgcggatcatcctggcgcttcggtgcgggaaatggttttgctcagcgccgcaaggcagactgccttacgtggcgggcgaggacgtggcgcgcaccgctgcggcggtactgcgggcggaccctgttccgcccggagagctggcgatcaccggcccgcaggctctcaccgccgaggcgctggtgaacagcatcaatatcatcttcggagccagcatcgacctggtgcccgtcagtgaggaagccctggcgctgcatctgcaggtctcgggctttccgaaatccacggtgcgagaggcgctgatcatcgaagaggtgtccaaacgcgggctggcgccgttctccgacggtgtcatcgagcagatgaccggtcagccgccgcgcagcatcgaggcggtgctggtcgaacaccgcctcgatttgctgttgtccaccagcaccccccggctttga

SEQ ID NO: 324101 - DNA, 1296 bp, Pseudomonas aeruginosa
gtgagcgttggagttgaaacgctgtttgccagcgcgttgggtttggttgcgccgtgggaggtggccaaggtggatctggacacagccaagcggcgcatagactttgaggtgcgctgcaacgccaagttgctcagttgcccgcactgcaacaccccggcgcaaggcatccatgaccgccttcgccgctcgtggcgacaccttgattttttccagttcgaagcctggctgcacgccgatgtgccgcgggtggcctgcactggctgcggcaagaccacgcaggtgggtgtgccctgggctcgcgaaggctctggctttacggcgctgtttgaagccttggcgttgtcgctgtgccgtgagctgccggtgcggcaagccgctgcactgctgcgttgtgccgacaagcccctgtggcggcgcattgagtactatgttcaacaggcccgcgcaatcgacgacatgagcgaggtacgtaccgtgggcatcgacgagacaagcctgcggcgtgggcagcactacatcactgtcgtgcacgatctggctgccaagcgcctgctgtttgccaccgaagggcgcagccaccactccgtgttggactttgcccaagacctcaaggcccatggcggcgatccggctgtcgtgcatcacgtctgtcaggacatgagtactgcctacaccaagggggtgggcttggcgctgccggcagctgccatcagctacgaccgcttccatgtcgtcaagatggccatcgaggccatggacgaagtgcgacgaaccgaatggcgcgatcagccccatgccgtgcacgcggccttgggcggcacggaccgcaaagtgctcaagggcctgatgtggggcatgcgcaagaacccacctgcctggagcggccaacagatcagcgccatgcactggctgcagcactccacgctgaaatctgcgcgggcgtggcgcctgaagatggccctgcgcgaggtctatggcgcagcgctcaagcacaacgaccccaggcaggctcaggcagatctgagcgcctggttgagctgggccacacgctcgcggctggagcccttcaagaaactggccaagaccttgaagacccacttcgctggcgtgatcagcggcatgctggacaaccgatccaatgccttcgtcgaagccatgaacggcctgttgcagcaggccaaacgcgccgcacgaggcttccgaacggcaggcaacttcatcgccgtcgcataccttcgcatgtccaagctggcccatctgcctgatcacccattcaccccagcctcagcaaaatga

SEQ ID NO: 324102 - DNA, 1815 bp, Pseudomonas aeruginosa
atgctctccctgttccagcgaaaacggcccccggtcgctgccccgtcgccagcgcccgccaccgacctcccgaaagggttgctgcggcccgaatcggccgcatcgctgctggcaacaccgcgccggcagaagctgctggaacacatctggcagcgcacgtcgctgtcgcggcggcagttcgccaccctataccgcacgccgctggagcactacgccgagttggtccaacaattccccgcatcggaaagccatcaccacgcttaccccggcggcatgctggatcacgggttggagatcgtcgcctatgcgctcaagctgcggcagtcccatctgctgcccattggcgccagtcccgaagaccaggcggcgcagtctgaagcctggactgccgcagtcgcttatgccgcgctgctgcacgacatcggcaagatcgccgtcgatctgcacgtcgaactggccgacggctcgctgtggcacccctggcacggcccgctgcaccagccataccgcttccgctaccgcgacgatcgagaatatcggctccacagcgctgcgacaggtttgctctaccgccaactcctcgaccgtgatgccctggactggctcagtggctatcccgacctgtggggaccgctgctctacgtcctggccggccagtacgagcacgccggcgtgctgggcgaacttgtcgtacaggccgaccgcgcttccgtggcccaagagttgggaggcgatcccgcgcgcgctatggccgcccccaagcacgcgctgcaacgcaagctgctggacgggttgcgctacctgctcaaggaagagttgaagctgaaccagcccgaagcctccgatggctggctcaccgaggacgccttgtggctggtgagcaagacggtttcggacaagctacgtgcgcacctgctgtcagagggcatcgatggcatccctacgaacaacactgcggtgttcaacgtgcttcaggaccacggcatattgcagccgacgtcggacgggaaggcggtctggcgcgcgaccgtgaccagtgcgaccggctggtcccactcatttaccctgctgcgtctagctcccgcgctgatctgggaagctggcgaacggccagcatcgtttaccggcacggtggcaatcgacgctgcggcaatcgagaaggatgctggctcggaggctgccccgcctatgactgccgcgaagcctgtcttggaagaacagacgacgccaccttgggaaggcagcagccccgctaacttggcttcaccgcccgcagttcagcccctgcctgacgtcatggaagacatgctggcgatggtgggctccggacacctccttgcgacgcgacaggatgcagagcccgtcccggccttcgcaacgagttcgctggtactgcctgtgccagcgtctaaatcttcggcatcgacacagcagccttcgggcgagcacttcatgggctggcttaggcatggcttgcagagccgaaagctgattctcaacgatgccaaggcactggtgcataccgtggacgacacggtgttcctggtaagccctggggtgtttcagcgctatgtccaggagcatcctcaagttccagcactcgccaagcaggatgccgttgtcgactggcaatgggtccagaagcgcttcgagaagctgcaggtccatcgcaagcagcccagcagcttaaacatctggacctgcgaggtcaccggcccgcgcaagtcgcgcaagctgcatggctacttactcgatgaccctggccaactgttcgatgagcggccaccgaacaatccctacttgaaactggcatag

SEQ ID NO: 324103 - DNA, 627 bp, Pseudomonas aeruginosa
atgcccaatgccattgaattcattgccgaccatctgccgcgcgtcacggtggaggatgtgcgccgcttcgcggataccgtcgaaatccgggatgccacggctttcgcggccgagttgcaggcgttcgtccacgagcgtgtggaggcggtgaagctgcccgccagcctggaagcggagacggtgcaagaggccctggcacgcaaagcgggcgcgctgcgcgccgagacgcgctgggcgccgagtgaaaccgacgtccagcgtggccgcgctgcgctgctggaaaccttcaaccagccgcacaacctggcgatccccgagtacgccaagctggcggacaagtcgcgccagcagatctacaaggacatcctcgcgcgccggctgctggcgctgaatgtggggccgcgcggccagaagctgcccgactggcagctcgacccggtgaagcagcagttgacccaaaccgtgcttcaggaggtcgagggcatcgaccactggacgatctaccgcgcgctgtccgaaccgctcgaaggcttgggcggacgctcgccggtggatacggtgacgcatggcacgatcgatgacgtggccgaagcggtgttcaacgtgctgggcgtccaggtgcattga

SEQ ID NO: 324104 - DNA, 633 bp, Pseudomonas aeruginosa
atgagccgcgaactgcctttgttcctgatcgatgcgggtgaactgctccagcatgtgagccgcgtcgtctatcggggcagcccgctgtactatggccgcagcggcaccaatcgctacgacgacccggcgcggacctacggcgtgctctacctgggccgcgacctgcccacggcgctgatggagtcggtgtttcacaagcaccagtggctggcggatgaaaagcgctcgatcgcgctgaaggaagtcgagagccggctcttgcgcgccgtgggcgtcctggacgacgtgcggctggccgatctcacggccgagggtgtcatggcgggttacttcggcctgaacctggaacagttggccagccgcgactacacgcacacgcagcaggtgtccgcgcaggtgcatgcgatgctcggagacgacggccagccgctgttcgacggggtgctctatccgtcgcgcaacaactatcccgccaagagcatcgccctgttcgagcgtgcggcagcaaaggttggcgttgtcgatgacatcgacctggtggaccatgtggactggccgcgcttcgttgccacgtatcgcgtcggcgtggaacccgaccccggcccggtggaaccggatgacgaagcgtcctga

SEQ ID NO: 324105 - DNA, 366 bp, Pseudomonas aeruginosa
atgaacaccacgacccgcatcagcactgcagaacgcctcggccgcacctttggccgcggatggcgcgcctacgcgcgcggcgaacgtcgggcgtcgaactggttggtgtccaagggggtgccggcggccgttgccaccgcgctcgtgtgggtggtcaagctgtctgtggtgggattgctgctctacgttgctttttggttcgcactcgtgttgttgggcgtcgtggcggcggcgtgggctgctgctgccaatacctctgacgaggacgagtggcctttcaccgatctcacagaactgcgcaagacaccgggctacgatcccaatctgtacaacgatacgtcgcacgagttgtacaccgacgactga

SEQ ID NO: 324106 - DNA, 1521 bp, Pseudomonas aeruginosa
atgacgcttttcacgaccgactacctggagtactacctaaccctcgtgtcctggatcgtcaacaacggcatctgggcggtcctcgtatccagcggggtattcgcgctgcctttcgtcgccatcatcgtgcaggagtggttgaaggcccgtgcggaaggcgccgacgagggcaacaaaggcgtgctgagcgccgcccgcatcgagaaccgggtcttcgtcgccatcgtggtggtgatgttcgccggcattccgttcatcgacgtggacctgaacaccatccagtacgacagctcgcgctcggcccagtgccaggtcagcgtggcgcagcccggggataccggctggtcgcagtccttcagcaccatcaacaaccagtcggcgaaggtgccggtgtggtgggcgttcatgcacgcgctctcgcgcgccgtcacgggcgcttcggtggcagcgatcccgtgcggcacggacctgcggcagatgcgcatggagatcgacgctacgcgcatcgatgacccggtgctggctcaggaagtagcggatttctcgcgggattgctatgggcctgcacgggccaaattgttcatgcagcgccctcagctcgatgagcagcagatgcacgacgtgacctggatcggatcgcggttcttcaccgacacgaacggctactacgacacataccgttccagcaccccacgcgaggactggccctatgacagcacccgcgacgcagggcttgcgcaggtggccagcggtggcggctacccgacctgccgccagtggtggagcgatggaagtaacggcctgcgggcacgcctgctgggtcaggtggacccgagcctgttgagtcgcctggcgggctgggccgggttcctgagccgggccgaggtggacgactcggtgatccgagccatcgcgtcaccgcggcagcagaagttgaaccagggcagcgtctatacggactacggaggccagatcgacaagaccttgccgaacatcgtgacacgggccacgggagacgttgggatggccgtcggcgcgattgccgcgtttcccgccatggacgtcgtgagacagtctctacccatggtcctcgccttgctcaagatggcgctggtcatctgcatcccgctcgtgctggtcgtgggcacctatgacctgaagacggtcgtcacggtcagcgtcgtgcaattcgcgctgttcttcgtggatttctggttccagctcgctcgctggatcgacagcactatcctcgatgcgctctatggctggggctttggctggaaccggccacacacgaacttcgacccgctggtggggctgaacaatgcgttcggcgacatgctcttgatgttcgtcgcgggcacgatgttcctggtgctgccaggattctggctggcaagcctgacctgggttggaattcgggcgggacatgccattcaggggttgtcggacggcagcaagagcgccggccaagccgggggcaagggggctggggcactcacgggaggcaagctgaagtag

SEQ ID NO: 324107 - DNA, 360 bp, Pseudomonas aeruginosa
atgagcgcggagcgcatggcctggcgccccttgcgctggctcatcagccggcgtgcggcgaaagcactgctgtgggcggccgtgatcgtcgccgctgcggtgggcgccaacatcgccggcatctatctcgttggcagcgtggccggctgggagcggtggctcgcggccgcatcgggctacttcttcgtgtggcggttgttcctgtacggggcgacggcctgcggctgggtctggatgcggcggcggctgctggcgcgcgaggacagcacgctggcccgacgccggctgattcgcgctgaggtcgccggcattgttgccatcgtggcgctggaagccagcctgttgatgcaggccgcttga

SEQ ID NO: 324108 - DNA, 1395 bp, Pseudomonas aeruginosa
atgaagcgtcctgaatcgatgaacctttccgccaaggcgtgccgcctgctgcgcccgaaggcgctggccggcccgctcgctctggtctgcggcctggcgtgggcgcaggtcggataccagaacagcggccccttcctcggcgatgacgtcatgtactcgatcggcggtggcagtgcggtgtccatgggccgcgcggccggcatgcgctccatcggggtcggcgtggggtggaacagcaacctgatctgcggcgacatgagcatccagaccacgctgcgcaatcagctcaacggcatcacgaacggctttcagcagatcatgagcaacgtgatccagagcgcgaccagcgcggttgcatcgctgccggcgctgatcattcagcgcgccgatccgggcctgtacaacctgctgaccaacggcgtgctgcaggcgcggctggacttcgaccgctccaagctgacgtgccgcgccatggcggagaagatggccgagactgcgggtggccagcttggctggagccagatggccgaaggcatggccttgcgtgacgcggttggcagcaacgatgccgtgtcggccgtcgagcaggccgagacgcgccgcggcaacgacggcgttccctgggtgggcggcagcaatgccggtggcgcaggccagtccgccatccgcgtggtcggcgacgtcacccgcgcgggctacaacctggtcaacgggcgcggcgtgacggacacatcctccatcgcgtccaccagttgcgcgagcctgtcctgccagacctggacgtcgccgcagcaggcgaccgaatgggccacccgggtcctcggggaacaggtgcagcgcacgtgcgattcctgcaccaagaccgagacggtgcccggcgtcgggctgacgccgctgatccaggaggagtacgaagccaagctggaagtcttgcaggaactggtttccggcgtgcgcaacaccaccttcgagaacttgcgcgaggccggcagcacgtcgctgccgatcacgcgcggcgtcatcgaggcgctgcgcgacgagccggaccaggacctgctggcgcggcgcctcgcgtccgaggtggcgctttcgtcggtgctggagaaggcactgctgctccagcgcacgctgctcaccggcaagaaagagcccaacgtggcagccaacgagttggcagtcgaggccgtgaaccacgagagcgacacgctcgaccgggagatccgcaacctcaagaccgaacttgaactgcggcgcgagctggcgaacaactcgccgatggccatcatccagcgccatggcacgcgcgcggcaggctcgcgcggcatctatgagggcgatccggtgcccgaccgcctcgaccagttgcagaagggcaatccgggaggccggccatga

SEQ ID NO: 324109 - DNA, 951 bp, Pseudomonas aeruginosa
gtgacccatcgcccattcgacctgctgcgccgcctgcgcgtcgccgtggcctcgctgctgctgatcagcgccacgggcagctacgccttgaacaccgccaccatcgtgtcctccgtcatgtcgccggactgcctggagtaccgggtggtgggcatctgctactggctctactgcacctggacgggctgcacggtgcgcacatccaccaaggtccggcactacgtgcccgatgcggtcgtctccagctacagcaacaccggagagaacccctgggtcgaggtgcaggcgatgagcacgcccaacccatccgcacaggcaggtggggatgggaccacgaacgaagaccacgaaaacaacctcgccaaattcaagaacagcgatgtcatcggccatcctggcggcgaggtattcaaccagttcgcatcgtcgtcgggctatttctgccaaggcgcgggcacggccttcatgccgtatctactcagcaccctggacacgctggcttggcgctacaacgtgcctgaaatgacctacccggaggcgttgattccgggcatgcgcgaggtcggtgcgcgcaccacgatgaacctctggggcaatgtctatccgcgcggcggcttcctgcatcagaccgatgactacaaatccggggccgtcgtggcccagcgcgccggtgatgtcgtcacgcgccgcgggcagatccacgtgtaccagccgctgcttgccaacgcccgcgacggctactggccggccggcgcgctgatggagggtgatgcctctacgggcaagtggcaggagctgacgccgcgcctgtccaacacctgcgtggtgttcccgcacagcggcacgctgacccaggcccaacaaggcgactacgcctgggcgctgtggcgtccctatgcgtgctgcgaacgccgcgggcaggtgttcctgggcagcgtcgatttcctctga

SEQ ID NO: 324110 - DNA, 399 bp, Pseudomonas aeruginosa
atggccgtggcgctgccgacgtctctggcggtgttcagcccggccaccttcgccgccgacgtggtggtcgtcaccgacagccgccacccggtcaagaccatgggcggcgagcgactgatcgagttgggcgaaacgccccggatcgaggccgagctttccgcgaatcttccagccgaccctgagcgggcagcagccatcgtccggcaacgcctgaagcaaggcggcaccgatcttcagcgccgcatcggcaccgcctaccagggcgtcaccgacgcatggagtttggatgtcacgaccatcccggccgtcgtggtggatcaacgctttgtggtctatggcgagccggacgtggcccgggccgtcgcgcgcatcgagcaacaccggaggacgcagccgtga

SEQ ID NO: 324111 - DNA, 495 bp, Pseudomonas aeruginosa
atgtctttcgtcgtcaatgactcctgcctggagtcgctttccgccatcgctgcccaacacgaggactggatcatccagcaagccattgcactgctggagaagcgggttttcaaagcgggtgcgaaactcctcgaccccacggccgtgcgcgactacctgcgcgtgaagctggtcgccgagcccaatgagatattcgccgctgtgttcctggacagcatgcaccaggtgctggcctacgagccgttgttcaggggcacgatcaactcgacttcggtctatccgcgtgtcgtcgtgcagcgtgtgctggagttgaaggccgccgcggtggtcttcgcgcaccagcacccctcgggcatttccgagccgtcgagcgcggatcgcatgctgacccagcaactgcaggccgcgctggcgctcatcgatgtgcgggtactggaccacatcatcgtcggccagggtgccccgttctcctttgcggagtccggcctgctgtaa

SEQ ID NO: 324112 - DNA, 768 bp, Pseudomonas aeruginosa
atggaacagaaacgcccatccattccgatgcaggtacaggcgttccgccgtcggcgctggaggctcagctggccctgggtgttggccgccgtgctggtagcgctgctgctgatctggctcgtgtcccgctattctggcaagtccactccccagacttcaacgccggtcagcgtgacgcaggtggccgggcctccgtggcagatgggaaatccggaagggcgtttcacgctgacgctctacgcggacctcgaatgcccgttctgccgatcctatttcccagtgctcaagcgttgggtggccggcaacgcggacgtggccttgcaatggcaccacctcccgttggccgcgcatgagccggccgcgtctgccgaagcgagcctggcggagtgcgccggcgaatctggcggccatgccgccttctggcaggctgtcgagtgggtctatgcccacacgcgcagcgacggccagggcttgcccgaggacctgcggtaccccgaccttacgccagccatcgagcagtgtctggcgagcgaacggcccgaggcgccgatccgcacccagacggcggaagccacgagcagcggcgtgaccgccacgccgtcgctgcggctgcacgatcgcgaaaccggcaaggcgatcctactgcagggtccgatcgagggcgatgccttgctgtcggccatggacatgctcgcggccggcgatcccgccgccacacctactacatcggaaatgcctgccgacgtcgtcggcgacatgcccaggtag

SEQ ID NO: 324113 - DNA, 2892 bp, Pseudomonas aeruginosa
atgcggtggaaacttccatggccgaagctggctgccgtcagcgccgaagacaccgccgccgacgagcagccggacggctggcagcgccacgtcgaggccttgcagcaagccggcatccccgaacccggcgccgcggtccagggccgcaagccggcgaccgtggccgacgagcaggcgctgtacgacgtcgcaccgtccttcgtggaactgctgccctgggtggagttcttgcccgagtcgaaatcgatgctcctggaggacggccaatcggtggccgccttctacgagctggtgccgctgggcaccgaaggccgggaacccggctggctcgcgcatgcccgcgacgccctggaaaacgcgcttcaggacagcttcgatgaactggacgagaacccgtgggtgctccagctctatgcccaggacgaaccgagcttcgaccagtacatgcagaccttgcgcgattacgtgcagccacgtgcgcgcggctcggcgttcaccgagttctacctgcgcttcttcggccaccacctgcgcgctgtggccaagcccggcggcctgttcgaggacacggtggtcacgcggctgcgctggcgcggccagacgcggcgcgtgcgcatggtggtgtaccgccgcgcgagcggacagggacaggcaaaccgccgcggccagacacccgagcagatgctgggcatcgtctgcgaccgcctgtgcggcggcctggcgaacgccggcatccaggcccggcgcatggtcgcggccgacgtccacgactggctgctgcggtggttcaacccgcgccccacgctgctcgggcctggggtggaggaccgggagcgcttctacgcgttggcgcgctatccggacagtaccgaggaaagcgaggccggcgagatcgagctggcgagcgggcgggatttcagccagcggctgttctttgggcagccgcgctcggacgtggcgcaaggggcctggtacttcgacggcatgccgcaccgcgtgctgatcaccgaccggctgcgcatgccgcccggcaccgggcacctgaccggcgagacccgcaagggggacgcgatcaacacgctgttcgaccagatgcccgaggacaccttgatgtgtctcaccatggtggccacgccgcaggacgtcctcgaatcggacctcaaccatctggcgaagaaagctgtgggcgagacgctggcgtcggagcagacgctcaaggacgtgcatgaagcccgctccctgatcggcagcgcgcacaagctctaccggggcactctggcgttctacctacgcgggcgcgacgaggcggaactggatcggcgcggcctggacctcgcgaacgtgatgctcaacgccggcctgcagccggtgcgcgaggacgacgaggtggcgccgctcaacagctacctgcgctggctgccgtgctgctacaaccccggcaaggaccggcgccggtggtacacgcaactgatgttcgcccagcacgcggcgaacctgtcgccagtatggggccgcgcccagggcacggggcatcccggcatcacgatgttcaatcgcggcggcggcccgattacgttcgaccccttgaacaggttggatcggcagatgaatgcccatctgtttctatttggccccaccggctcggggaagtccgccacgctcaacaacctgctgaaccaggtgacggccatctaccggccgcggcttttcatcgtggaagccggcaacagcttcggcctgttcagcgacttcgccaggcgcctgggcctgaccgtgaaccgggtcaagctggcccccggatcgggcatcagcctggcgccgttcgccgacgcacgccggctgatcgaaacgcccagcgacgtacagacgctcgatgccgacgcgctggacgaagacctgccccccgatgcctcggccatggaagcggacgagcagcgcgacgtgctgggcgaactggagatcacagcgcggctgatgatcacgggcggcgaagacaaggaagaagcgcggatgacgcgggccgaccgctcgctgatccgccagtgcatcctcgacgccgccgaacattgcgtggccgaaaagcgcaccgtgctcacgcgcgacgtgcgcaacgcgctgcgcgcccgtggccaggacccgacgctgcccgagatgcggcgcgtgcggctgctggagatggcggacgcgatggacatgttctgccaaggcacggacggcgagatgttcgaccgtgacggcacgccgtggcccgaggccgacatcacgctggtcgatctggcgacctatgcccgcgagggctacaacgcgcagctctccatcgcctacatcagcctgatcagcacggtgaacaacatcgccgagcgcgaccagtacctgggccggccgatcgtcaacgtgaccgacgaaggtcacatcatcaccaagaacccgctgctcgcgccctatgtcgtgaaaattacaaaaatgtggcgcaagttgggcgcctggttctggctggcgacgcaaaacatcgacgatctgccgcgcgccgcagagcccatgctcaacatgatcgagtggtgggtgtgcctgtcgatgccgccggacgaagtggagaagatcgccaggttccgcgaactctcgccggcgcagaaggcgctgatgctctccgcacgcaaggaagcgggcaagttcaccgagggcgtcatcctctccaagagcatggaagtgctgttccgcgccgtgccgccaagtctctacctcgcgctcgcgcaaaccgagcccgaggagaaggcagaacgctaccagctcatgcagcagcacggcgtcagcgagctggatgccgccttcaaggtggctgagaagatcgaccgggcacgtggcatcgagtcgccgaccctggacctgccctga

SEQ ID NO: 324114 - DNA, 456 bp, Pseudomonas aeruginosa
atgcactcgaacttgactaacctggcccgtggcctggcactggccctcgccgtcgcggtgcttggcggctgcgccaccagcaaggaaaagctgctgacccacggtgaccgcacgatgatggacatctggcagcaggaagccggcgacggcggtggcggtggcgcagccgggcggaacgccggccgccagctgctcgatgcgcgccagagcctgcgtcggcccctgaccgacgccgacgtgcaggccgcacctgttgagcagatgcgctacacgcgcaccgcgcgcaatgaggtccaccgccagttccagcgtctgcccaatcccgatctcgtgatgtacgtgtacccgcacctggccggcaccgaccccgttcccgtgccgggctacacgacggttttccccttgtaccagcgcgtgcagtacgcgatgcctggcgagaggacggaggactactga

SEQ ID NO: 324115 - DNA, 1419 bp, Pseudomonas aeruginosa
atgcgcagtaacggcctactcaagtggctgatgatccctgtcgccatcctggtgctgttcgtcggtatccggctgttctcgggtggaggcagcacggcgccacccgcggcggacaacggcgcccagctcacgcccgatgaaatgaaggcgctgggcatcgagggcgataccccgcgcgacaccgtggcaacgctggttgcgcaggtcaagcagttgcgcaccgaacttcagaccgcgctctcggacaacaagtcgcagcgtgaagagaaccagcgactgcgccagcgcgagaactccatcgaccagcgcatcaactcggcgctcgaatccgagcggtccaacctgcgccgcgaccaagagcaggcggccagcgcgcgccagcaaaccgaagggctgctcgccgacctgcagcggcgtctggacagcatcggcgggcgcggcggcggccatgcggacctgcccgtgggcctggggctgcagggcggcgacgaggcaggcatggagggcggcgtgcggtgggtcgagccggacgacgcaaagcccgccgaggggcgcaacggggggcgtggcgcgagcggcggcatgagcttccccacgagcttcggcccggcgcagagcacgctcgaaaccaccgcggaaaccgtggccaacgcgggcgcccgcgccgccgggggcaagagtgccaagccggtctataccgtgccgaccaactccacgctcatgggttcggtcgccatgaccgcgctgatcggccgcgtgccgatcgacggcacggtcaacgatccctatccgttcaaagttctggtcgggccggacaacctgaccgccaatggcatcgacattcccgacgtggccggcgccgtgttcagcggcaccgcctcgggcgactggacgctctcgtgcgtgcgcggtcaggtgcgcagcatcacgttcgtcttcaacgacggcacgattcgcacaatccccgaagaccgcgagggcaaccagcagaacaaccaacagcgcgacggcttgggctggatcagcgatccccacggcattccttgcgtcagcggcgagcggcgcagcaacgcccagcaatacctcggctcgcaggccctgatcaccgcggccggtgccggtgtggcctcgctcatcgagagtgacagcggccgcatgtcctatgtcggctcggacggctccatcggcaccgtgggcatcaccggccaggaagcggtcggccagattctcgcgggcggtgtccgggacatgtcggcctgggtcaacaagctctacggccaagccttcgccgccgtctatgtccaacccggcgccaaggttgccgtccacctcgaaaagccgctcgccatcgacttcgatcccgaaggccgcaaggtcgatcaccgcgcaggagaaagccatgcactcgaacttgactaa

SEQ ID NO: 324116 - DNA, 912 bp, Pseudomonas aeruginosa
atgaagcatcctgtattcgcgctgctggggctactggccgtggccgcggcacccatcgcccatgcagtggagatcctgcgctgggaacgcatgccactggcagtgccgctgaaggtcggtcaggaacgcatcgtgttcattgaccggaacgtgcgcgtgggcgtgcccgcgggcgtgggcgaacgcctgcgcgtgcagagtgcgggcggcgcggtgtacctgcgcgccagcgagccgatcgagcccacgcggttgcaactgcaggacgccgacacgggcgcgctgatcctgctggacatcgcagccgaaccacccaaggacggggaagccgagctggagccggtgcgcatcgtcgagggtgacagcgcaccgggacgctatggcgagcaggccgacagtgccgaggccccggcacgcgcccagggccaggcaggtgcgcggaccgcgcggcgcgaaaccccggtccctgtcgtcctgacgcgcttcgccgcgcagcacctctacgcgccgttgcgcaccgtggagccgctgccgggcgtcatgcgggtcaacctgccccgcgacctcgacctggacacactgatgccaacgctgcccgtgcgcgcggtcgcgctcgcgtcgtggcggctggaggaccagtgggtcactgccgtgcgcctgaccaacggcagcggcggctggatcacgctcgacccgcgcgtgctgcaaggcgatttcctcaccgccaccttccagcacgaggcgctgggcccgcgcggcacgcccgaggacacgaccgtcctgtacctggtcacgcgcggccgcggcctcgcgcagtcgctgctgccggcgattcaccgcttcgaccctgccgtgcatctgccgcagccggacggcgacgagaacgccaagaaggcccgccatgcgcagtaa

SEQ ID NO: 324117 - DNA, 693 bp, Pseudomonas aeruginosa
atgagccgcttcaaaaacgagattacccatctgcaggcgcacatcaagaccttgcgcctgggcgcgggcgcgctggtcgtcgtcgccctggtcatgggcggcggctggtggagcgcgccgcgcgacctgaccatccacgtcccgcccgacctgcgctccggcagtacccgcaagtggtgggaagtgccgcccgaatcggtctatgcgttcacgttctacgtgttccagaccctcaaccgctggccaaccaatggcgaagaagactactcgcgcaacctccacacgctctcgccgtacctcaccccgtcctgccaggccttcctgcgggcggactatgactaccgccgctccacgggcgagctgcgtcagcgcgtgcgcggcatctacgagattcccggccgcggctatggcgacgaccccacggcgcgcgtgcgcaccgtgtccgatcgcgactgggtggtgacgctggacatcacggcggacgagtactacggcgccgagcaggtcaagcgcgccctggtgcgctatccgatcaaggtcacgcgggtggacgtcgatcccgcccgcaacccgttcggcctggcgctggactgctacgacggcgcgccccagcgcatcagtgcaccggagccgacgcgcccggcgccgagtggcctgtctccgcaagcgcctcaaggaggaaacaccccatga

SEQ ID NO: 324118 - DNA, 399 bp, Pseudomonas aeruginosa
atgtccgagcagcagcacgtccgtgcggacggaacggtcaccttccttccgcaccggctcaaccgccatcccgttgtggtgcgcggcctcaccgctgacgaactctggatttgctgcggcctgtccggcgccgccggcctgctggtcggcgcgccgctgtcctgggtgttccgcacgatcgcgctggcgccgacgttcgtcgtcctgggcgtggcgctcggcgtcttcatcggcggcggcatcctgcgccgcctcaagcgtgggcgtcccgacacctggctgtatcggcaactgcaatggcgcatcgccacgcgccatccgctgatggcaggctgggtcggtggccatgtgctgatctcgcgctcgggcttctggtccacccgcaggagcatgcgatga

SEQ ID NO: 324119 - DNA, 360 bp, Pseudomonas aeruginosa
atgcacaaccgcaacctcacttcccgttttgcccagcgcgccgccgtggccctgggcgccgccgcgctgcccgcgctgtcgttcgcgcaaggtctgccgcaattggagaaccccacgcgcggcaccggcaacggcatcatggagaccatccgcaactacggctacgacatcatcatgctcgtggccctgctggtggtggcgtcgatgttcatcggcgtctgctaccacgcctacgggacctacgcggagatccacaccggccgcaagacgtggggccagttcggcctcacggtcgccatcggcgccgtgctgctcgtgatcggcatctggctgctcaccgaagccaccggcatcctgtaa

SEQ ID NO: 324120 - DNA, 234 bp, Pseudomonas aeruginosa
atgaacggcgcccaggtctcggcatttcaagccaacagcggtatcgcgccttccgcgatggcgaccgtcctggtcggcgtcgtgctcgcggtcctgctcgtgtggggcgtctgggccatccgaacggcctacgtggggtggtccgagagccgcctcaaccagcgccagttcctcggcgtctgcattcgcttcgtcgcgatgtacctcgttctgagtttcttccttctgtcctga

SEQ ID NO: 324121 - DNA, 384 bp, Pseudomonas aeruginosa
atggtggcttcgatctggctgcgcgccgcgcatcgcggcgtgcccacttttctcgtgacggccctcctgctgggtcagtcccagatggccttggccgagtccccggcacagcgccaggagctggtcgccgcactgcgccagctcgacgcgctggagcgcaccgtcgcggacagcgccgcgcatgcccccatccagccgggcgagcgctaccacttcgactacccgcggctgctggctgacctggcgcgcgttcgcgccggcatccagtttcacctgacgccatcgcgcgctcagccgcgcgacccctccgaactggccggcgactaccgcaccgagcgggcggccgagccgctgccggcgacgactgcggggggcaagcaatga

SEQ ID NO: 324122 - DNA, 471 bp, Pseudomonas aeruginosa
atgaccaccgccactgcccaatccaagatgacccttcccgccgcgggagaggttaaggcagccgtccagggtcaacgtgccttggcggcttacctcgcaacccagttcgagacgcagcacatccagatctttgatgaccacaaacaggctcatcaggtggaactgcctacctcggctttacgcctgctggtcgacatcctggccgagttggccgatggcaatgcagtaaaggtggtgcccgtccatgcagagctgacgacccaagaggcggcggacttgctcaacgtgtcccgtccccatttcgtcaagctgctagaagatggggtgttggcatttcatcgcaccggcaagcaccgcagggtgaggttcgccgatctgatgcagtacaaggaagcgcgcgagcgcgccagtgagcaggcgatggccgaactcgctcagcagtcgcaagagttgggaatgggatacgaatga

SEQ ID NO: 324123 - DNA, 504 bp, Pseudomonas aeruginosa
atgtggctcggcctgtctggccgcttccgggcgcggtggagccaagccattcatgaggagtggaaacgcaacctgttgatcaaccgccccgatctcacccgggttcaggtcgacaggacgtcggatctcatggacagggccattccggacggcttggtggagggctacgaagcgctcgtggcaggcctgacattacccgatccgaatgatcggcacgtcctggctgcggcgattcgctgcggtgcgagcgtgattgtgacgttcaacgaacgtgatttcccgaacgatctgctggctccgtacggcatcgaatcgcagcaccccgatgagtttgtggacaacctgctggatctggatgcggccgccgtagtgtcggctgcgcagcgccagcgtgcccaactcaagcatccgccgatcgatgtggaccgctatctcgaaatcctgctgcgccaaggccttgtgcaaacgaccaaggtgctggcgacctatcgcaccattctctga

SEQ ID NO: 324124 - DNA, 915 bp, Pseudomonas aeruginosa
atgaccaagaatccttcatcagacgccactttgccgaaaggcatccatcgaagctggaagctgccggataagtcgctgggtgacttgtgggattcgatcgtgatggacgaagccatcaaaaaacagttgctgtcacaagcgatcgtcaacttcacggtgcgccccaaggtggagcgcacggtactccccctgcacggcgtgatcttgttggtcggcccgccggggactgggaagacctccttggcacggggcttggcgcatcgtgtggccgaatctttttcttctgcgaagtttcgattgctggaagtggagcctcacacgctgacgagctctgcaatgggaaagactcaacgcgccgtggcagacctgttctcgcaatcgatcgcagaatccgcagcggcgggcccgacgatcgtccttctggacgaggtcgaaacgcttgcggctgatcgagcgaagctcagcctggaagccaacccggttgatgtgcaccgggccaccgacgcggtgttggtgcagttggacatgttggccgaacgcaacccgcatctgctgttcgtggccaccagcaacttcccacaggccgtcgacagtgccttcctatctcgttgcgacatggtgatggaggtgccactgcccggcaaggatgcctgcaagcagatcctagtggactgcctgaatggcctggcaaagacatttccggggattggcaagctttcctcggctcaccagttcgacgtgtgcgctggcgagtgcgtcggattggatggtcgggccattcgcaaggtcgtagccaacgccctcgcggccgacccgcaagtggctatcgatccgaacaagctttccgtagagcacctgcgcagtgcgatacgacaggcaaagcaaatgcgccttcaaggagggaagcaaaaatga

SEQ ID NO: 324125 - DNA, 471 bp, Pseudomonas aeruginosa
atgaccaccgttgtcagccggacgtttcgcagctcgccgcaccgcgatgcgttgcagacatgggatgccattgtcgaactgctcactcagggcaaggacggcacggctcgctctgaactcagggccgtgacgggcgtggccgccagcttgatcgccgaccaggcacccaagagcgcgcccatcgttgcgacatgcgatggaccacggaccaggatctactgcctcttcgacgaagacgcgatcgatggtgatgatgccaacgaagaagtcttggggttcgagccgttgaagggagactggggagtctcgctgccgtgtccgaaggagcagctcggctgggtgcaaagcgcgctcaaaaagcacagttctcgcatcattgcacgggacttgagccaaggaattgccacgcaggcgcaggccgatgctgggcaagcgctgtcgctcgacctcggaggtttcctcaagtcatga

SEQ ID NO: 324126 - DNA, 501 bp, Pseudomonas aeruginosa
atgagcaccgtcgccacctactcgtacacgcactcggttacctatgtgaccgacaacatcctcaagagcttgaaagacatcatcctgctcagtgggctggaccctgagcactttgcggatcgctgggagagcaatacccgagccatcaagacgtggctcgggaccggtgatctgcgcaaggtgattctggagatctacaacccggcaaccgacaagctcgtgacccgatgggatatcgacatcgtgtatgggtggtccgatggcgacggcagcttctggacagataccgagcagttgaagtacgcgatcaagaaagctgggctgctgccatcgcaggccaagtacaagttaatgctcgatacaaagccagggcgacctgatgtggagggatggagcaaaggaagttatcgctcgacggatggaatggtcaagcagagcctaggctcgactgtcgaacacagcggcctggcgggtcaggccggatattggaggcaacgctga

SEQ ID NO: 324127 - DNA, 903 bp, Pseudomonas aeruginosa
atgctgtcgatcgatgaagcttttcgcaagttcaagtcgcgtctggaactcaacgaacgcgaacagaagaatgcctcgcaacgccagaacgaagtgcgggactacctgcagaccaagttcggcattgcgcgcagcttcctgaccggttcctatgctcgatacacgaagacgaagccgctcaaggatatcgacatcttcttcgtgctgaaggactcggagaagcattaccacggcaaggccgcatcggtagtgctggatgatttccactctgcattggtggagaaatacggttcggcggccgtgcgcaaacaggcgcgctcgatcaacgtggatttcggtgttcacatcgacgcggaggacaacacggactaccgggtggtcagcgtggatgcggtgcccgcattcgacaccggcgaccagtatgagatccccgatacggcgtccggaaagtggatcaagacggacccggagatccataaggacaaggcgaccgcagcgcaccaagcctatgccaatgagtggaaaggtctcgtgcgcatggtgaagtactggaacaacaatcccaagcacggcgatctgaagccggtgaagccctcgttcctgatcgaggtaatggcccttgagtgtctttacggcggctggggaggatcgttcgatcgcgagatccagtcgttctttgccacgcttgccgatcgagttcatgacgagtggccggatcccgccggacttggcccggcgatcagcaacgatatggatgccgcgcgcaagcagcgcgcgcagcagctgctgttccaggcgagccaggacgcaagcatcgccatcgaccacgcgcgtcgtggtcgcaatatcgaagcgcttcgcgcctggcgcgcactgtttggccccaagttcccactgtcctga

SEQ ID NO: 324128 - DNA, 726 bp, Pseudomonas aeruginosa
atgtcccagtggtcgctttcccagctcctgtcgtccctgcatgaggacatccagcagcgcttgtccgtagtacgcaagaccttcggtcacccgggtacgaagggggatgcgagcgagaacgtctggatcgacatgctggatacctatctgcccaaacggtaccaggcggccaaggcgcatgtggtggacagcctggggaacttcagccagcagatcgatgtggtggtgtttgatcggcaatattcgccttttatcttcacctacgagaacgagacgatcattccagccgaaagcgtgtacgccgttttcgaggccaagcagacggctgacgcggggcttgtggcctatgcccaggagaaggtcgccagtgtgcgcaggctgcaccgcacgagcctgccgatcccgcacgctggcgggacctacccagcgaagccgttgattccgattctgggtggcttgctcaccttcgagagcgaatggagtcctgcattgggtccatccatggacaaggcgctgaacgcaaacctcaccgaggggcgtctggacatcggatgcgttgccgcccacgggcactttttctatgaccaagccagcggcgcgtacagctacaccaacgaaaacaagccggcgaccgcgtttcttttcaagctgatcgcgcagcttcagttcagtggaacggtccccatgatcgatgtggaggcttacggtcagtggttgaccaagtga

SEQ ID NO: 324129 - DNA, 2625 bp, Pseudomonas aeruginosa
gtggcaagcatacgttcggagtaccaccggttcctggcgcacttggcgcagcggcacgtgcacgacgacgtgcgccggctggcgcacctggtgctcgatcacctgcagccactggccgaggtcggtgctgcacgccgggggcgctccacgcgcttggcgccgctggccatcgcgcatctggcgcaaatgcctgtcgcctacgacggggacgcgcgcggccccgaaaacgggccggcgctcgggcgactgcaccagctcgaagtcgggccgtttcgaggattcatgcggcaggagacgttcgacctcagccatgacatcaccttggtctacggtgccaacggcaccggcaagagcagcttctgcgaagccttggaagtggcgatgctcggttcgatcagcgaagcgcaggccaagcgggtcgaccagcggacgtactgcaacaacgctcgcctgcgccgccacgtcgcgccagtcctgtcgtctacggcggcgggcgaagcgcaggccgtccagcccgacgaagctgagtatcgcttctgcttcatcgagaagaaccgcctcgacgatttcgcccgaatcgccgcgcggaccccgagcgatcagcgccagctcatcgccaccctgttcggcgtggaccagttcagcgagttcgtgcgcggcttcaacccctcgctcgatcaggacctgatgcttgccggcgtgcaggcggcgcagctggcgcagcgtcgcctgcggttggcgagctccgaacagaccatcgccgcctacccgcagaagatcgcagcggtcgagggcctggaacaagctttggcgcagcgcatgtcacctggcgcgacctatcaagcctgcgtggactggctgctgggtacgccgcagcagcaaggacggctaccgtatgtccaggctcagctggacgccaacccgcctgccattcacgaggtgacccaggcccgcctgcaagcgttgctggcagaggcctaccgcgtccagggactgtggcaagcgtcttccgcgcaactcgcggcccgcgcgggcgaggtgtcgtacgcgaagctctacgaggccgtgcaagcgttggcggacggggcgaccgcgtgtccggcatgtggaaccggactggccgctgtggcacaggacccgttcgccagggcgcgaatgggcctggagcagctcgcgcaactggccgtcctgcagcagcaagaggccgggcatcggacgcagttgagcgaggcggtccgagcgctgtgggacgaaatgcgccgcgtggtggcggcggctggggtcgcttgtcctgccgaatcgcaggccgcgggcctgccactgctgcctcccacgtcggcgggcaattggctcggcggctgggtgaatggggaccagcgcgcctggcaagccctcttacggatcgcacagatcatcgaaggcttcgacgcgcaggcgcgcgacgtgcatgcccagcgcggcgcgatggcccaggagcgcgaccgcctgcaacagcatcagctggagatcgaacggctgcggaccatgcgcacgactgcggatcaggagctggcggccgcccgccaaaccgtggcccaattcgacgacgcgaaccgcggcctgatccaggcggccacggacgaaatgccggtggtggtgcaccatcagcgggtcaaggccgcctacgacggcttcctacccgagattcaggcatacctgaccgctctgccgggggttctgctacaggggctgggagaccaagcccgccatctctacaacgcattcaaccgggccgatccgcccggcgatctgctgcacgcgctgtggttgcccgtggccgagaacggcaagatcgaggtggagttcgccggcgagccgggcgtgcgctacgacgcgttgatcgtcttcagcgaagggcacatcaaatgcttgggtctggcgattctgcttgccaagaacctcgcgcagggctgccccgtggtcatcttcgatgacgtcgtcaatgcgatagacgacgaccatcgcgatggcatctggcgtaccttcttcgaggacggtttgctccacggcaagcaggttatcctcacctcgcacgcagaggagttcctgcaccgcatccagcaggagttgggcgtgcgccgcgccgcggccatcaagcgctacaagtttctcccgcatcagggagagcacgaactgcgggtcgacagcgacccgccagcgaagaactatgttcttctggcccagcaggcgttggcggctgacgagaaacgcgaggcactgcgccaggcccggccggcgctggagagtctgacggaccgcctgtggacgtggctgggtcggcgggcggacggccggatcgacatcaagctgagcgggccccgcgcgccttgggagctgaacaataaatgcaccaagttgcggtcggccgtcgagcgtatcgcggcgcaacatgcgggtgcgccggatgccgtaggggcgttggtcaggctgctcaatgtcagcggtacgagtattgaatggggttacctcaatagcggtgtgcacgacgctcagcgcgatcatgagttcgatcgggcgacggtaagaacggtcgtcgaggcggttacggcgttggatgctgctcttgataccctgcagaaccgatga

SEQ ID NO: 324130 - DNA, 750 bp, Pseudomonas aeruginosa
atgaaggatgccacctcgaccgcgcagcgggagcagaaccaacgccaaggcttgatcgtcggcaccatcaccttaccgttccggctgctcggggtgctcattggctcgctgctgttctcgatcgtggtggagtgcgtcggcatgcacctgttctggaaggaccagggctggcgccactcccagcagatgctgcagtacgaactcgggcacctgtccaaccacttcacgcgcagcgtggtggtgcaggagcccgggcgcacggcgcacgagctggtggataccgggtacgagtgggtgttcgtgcgctcggggttgctggagcgcatgagccagaccgccgagcgcgtccgcgcgcccagccacgggcagagccgcaacttccgctactacatcagccaggtctatgtctgggccgaaagctacctgatcgctgcggccttcacgacgctcaccttcctggtgcgcctgctggtcctggtgctcacgctgccgctgatcctcacggcggcattcgtcggcctgattgacggcctggtgcgacgggatgtgcgccggttcggcgcgggccgcgaatccggcttcatctaccaccgcgcgaaggccagcctgatgccgttggccgtgctgccttgggtcacctatctcgctctgcccatatcggtgcatcctctggtcatcctgctgcccagcgcggcgatgctggggatggcagtcagcctgaccgcaggcagcttcaagaagtacttatga

SEQ ID NO: 324131 - DNA, 2193 bp, Pseudomonas aeruginosa
atgtcaggcaaacagccggtcgaggttctgctacgcccagcggtggagctatacaccgtcgcggcgtgtgcaggcgccgcgtttctgtgcctggtggccccatggtcgctcgcgctgagcccggccatgggcatcggcagcgccttggcgttcggcgcctacggcgcgatccgctaccgcgatgcccgcatcatcctgcgctaccggcgcaacatccgccgtctgccgcgttacgtgatgaccagcaaggacgtgccggtcagccagcagcgcctattcgtggggcgcggctttctctgggagcagaagcacacgcatcggctgatgcagacgtaccggcccgagttccgccgctacgtcgagccgacgccggcctaccggctggccaggcgcctggaggaacggctggagttcgcgccattgccgctctctcgcctgccgaagctcaccggctgggacgtgcctttcaaccccgtgcgcccgttgccgcctgtcggcggcctgccaaggctgcacggcatcgagcccgacgaagtggacgtcagcctgccgctgggcgagcgcgtcgggcactcgctggtgctgggcaccacgcgggtgggcaagacgcgcctggccgaattgttcgtcacgcaggacatccgccgcaggaatgctgccggcgagcatgaggtcgtcatcgtcatcgaccccaagggggatgccgatctcttgaaacggatgtacgtcgaagcccagcgcgctggccgcgaaggcgagttctacatcttccacttgggctggccggaaatcagcgcccgctacaacgccgtgggccgcttcggtcggatctcggaagtggcgacacgcatcgcggggcagctctccggcgaaggcaacagcgcggcgttccgcgagttcgcatggcgcttcgtgaacatcatcgcccgcgccctggtggaactggggcagcgcccggactacatgctgatccagcgccacgtcatcaacatcgacgcgctgttcattgagtacgcccagcactactttgccaagacggagcccaaggcctgggaggtgatcgtccagatcgaggccaagctcaacgagaagaacatcccaaggaacatgatcgggcgcgagaagcgtgtggtggcgctggagcaatacctctcccaggcgcgcaactacgaccctgtgctcgatggcctgcgctcggcggtgcgctacgacaagacctacttcgacaagatcgttgcatcgctgctgccgctgctggaaaagctcacgagcggcaagatcgcccatctcctggcgccgaactactccgacctggccgacccgcgcccgatcttcgactggatgcaggtcatccgaaagcgggccatcgtctatgtgggtctggatgcgttgtctgacgccgaggtcgccgcagcggtcggcaattcgatgttctctgacctggtttcggtggccggacacatctacaagcacggaatcgacgatggcctgccgggcgcatcggctggtgcgcgcgtgccgatcaacgtgcatgcggacgagttcaatgaattgatgggtgacgagttcattccgctcatcaacaagggcggtggcgcgggcctacaagtcaccgcctacacgcaaacgctttcggacatcgaggcccgcatcggaaatcgcgcgaaggccggccaagtgatcgggaatttcaacaatttattcatgttgcgcgtgcgcgagacggccaccgcggaactgctgacgaggcagttgccgaaggtcgaggtctatacgaccaccatcgtctcgggcgcgacggacagctcagacatccgcggcgcgacggacttcacgtcgaacacccaggaccgcatcagcatgtccagcgtgccgatgatcgagccgtcacacgtcgtcggtctgcccaagggccagtgcttcgcgctgctgcagggcggccagctttggaaggtacgcatgccgctgccggcgccggacccggatgaagtgatgccggcggacctgcagcaactggccgggtacatgcgccagagctacagcgaggccacgcagtggtgggagttcaccagctcgccggccttgcaggatgcggccttgcccgacgacctgctggacgatgccgctgcggccgagcccggcgcggtggccactggcgccgacgatggctcgggcaacgaggccgtgccatga

SEQ ID NO: 324132 - DNA, 318 bp, Pseudomonas aeruginosa
atgctgccggtgcgcagcagcaagctcacgcccggtaccgtcgcgcggcgcgtgatcgaagcgcccggcctgcggccgttcgcggtcatcggcgacgacgaggcttcccgggtctggttgcagcgccgcgccgccgctttgcgtgaacgcggcgcggtcggcctggtggtcaacgtcgagaccgcgcagagcctggcacggctgcgcgctctggtgcctggcgtaccgctcgcgcccgtggccggcgacgacctggccgatcgcctgggcctgcggcactacccggcgctgatcacggccaccggcatcgagcaatga

SEQ ID NO: 324133 - DNA, 738 bp, Pseudomonas aeruginosa
atgctgatcattcccgcgatcgacttgaaagacggcgcctgcgtgcgtctgcgccagggcctgatggaagacgccacggtcttctccgacgatccggtggcgatggccgccaaatgggtcgatggcggttgccgccgcctgcacctggtggacctgaacggcgctttcgaaggcaagccggtcaacggcgaggtggtcaccgccatcgcccgtcgctacccggacctgccgatccagatcggcggcggcatccgctcgctggaaaccatcgagcattacgttcgcgccggcgtcagctacgtcatcatcggcaccaaggcggtcaagcagcctgagttcgtcggcgaggcctgccgcgccttcccgggcaaggtcatcgtcggcctggatgccaaggacggtttcgtcgccaccgacggctgggccgaggtcagcgaagtccaggtgatcgacctggctcgtcgcttcgaggccgacggggtgtccgccatcgtctacacggatatttccaaggacggcatgatgcagggctgcaacgtcgaggctaccgccgcgctggccaatgccacgcggatcccggtgatcgcctccggcggcatccacaatctcggcgacatccagaagctgctggacgcccgcaccccggggatcatcggcgccatcaccggccgggcgatctacgaaggcaccctggacgtggccgaagcccaggcgctgtgcgacaacttcaaggcctga

SEQ ID NO: 324134 - DNA, 2253 bp, Pseudomonas aeruginosa
atgaaagcattcggcaaggtcctggggctgttcttcctgggactcttactgctcgtcgtggccctgggcttcgccctgacccacctgttcgatcccaatgactacaaggacgaaatccgccagatcgcccgcgacaaggccaacctggagctggacctgaagggcgacatcggctggagcctgttcccctggctgggcctggaactgcacgacaccagcatcgccagcgccgccacgccgaccaagccgttcgccgacctgcagatgctcggcctgtcggtgcgggtcctgccgctgctgcgcaaggacgtgcagatgagcgcgatccgcgtcgaaggcctgagcctggacctggtccgcgacaagcagggcaagggcaactgggaaaacatcggcaagccggcccagccccaggccccggccgctccttccgccaccccgccggcagcggacggcaagggcgcccaggcgcaggcaccggagcaggcgccgcagaacgacagcccgcgcaccccgatcaagctcgacatcgacagcctcaacgtcaacaacgcccgcgtcacctataccgacgaagccagcggcaagcagtacaacgtcgagggcatcgagctgagcaccggcgccattcgcgaaggcagcagcattccgctgaagctcaacgcctacctcggcaccaaccagccggtggtacgggtcaagaccgagctgaccggcaacctgcgcttcgacaccgcgctcaggcgctaccaactggaagacgccaggctctccggcgaagcctcgggcgagccgctgcaaggcaagaccgccaccttctccgcccagggccagttgctgctcgaccagtcggcgcagatcgccgagtggaacggcctgaagctgagcgtcaaccagttgcgcgccctcggcgaactgaaggcccgcgagctggacaaggacaccaagttcagcggcggcctgtcgatcgcgccgatgaacctgcgcgagttcctcgccggcatcggtgtgaccctgccggccatggccgatgccaacaccctcggcaagttcgagctgaacacccgcctggccggcagccgcaacagcctgaatctcgaagacctcaagctgggtctggacgacactgccttcagcggccgcttcggcatcgccgatttcgccaggcaatcgctgcgcgcccagctcaagggcgacaagctcgacctcgaccgctacctgccggccaaggccaagcaagcccaggatgccgccagcgccacgcgcaaggcggaagtcgacgccaccgtggccagtgccgcccagggcaacacgccgctaccggaaaaaccgaccaggcaggcctggagcgacgcgccgctgctgcccatcgcgaccctgcgcaagctcgacctggacgtggcgctgaacttcggccggctgaccgtcgagaagctgccgatcgacgacgccagcctgaagctgcgcggccagggcggcgtgatcagcctcgacgacatgcgcggcgggctgtacaacggccgcttcaacgccaaggccaacctcgatgtacgccaggacagcgccgtgctgaccgccaccaagcacatcgccaacgtgccggtggagcgcctgctcgaagcccagggcaagaaaccgccggtgaaggggctgctcgacctcgatgccgacatccgcaccagcggcaacagcgagaaatcctggatcgaccatctcaacggcaacgcacgcttcagcctgatcaacggcgtgctgcccgacgccaacctggagcaacagctctgccagggcatcgctaccctcaaccgcaaggcccttgccggtactcacggcggcaaggacacgcctttccgcgagctcaagggcagcctgaacttcaccaacggcgtggccagcaaccctgacctgaaagtggccattcccggcctggcggtcagcggccacggcgatatcgacctgcgcgtgctgggcatggactatcgcatcggcgtggagatccagggcgacaagagcgacatgccggacccggcctgccaggtcaaccagcgctacgccggcatcgaatggccgctgctctgccgcggcccgctggaactcggcgccaaggcctgccgcctggacaaggaaggcatgggtaaggtcgccgcgaaactggccggcaatcgcctcaacgaaaaactcgaagagaagctcggcgacaaggtcagtccggagctgaaagacgcactcaaagggctgttcaaccgcaaatga

SEQ ID NO: 324135 - DNA, 1083 bp, Pseudomonas aeruginosa
atgaccccatccctctctggcctgcctccgatccgcaccgcgctgatcggctacggcttcgccggcaagaccttccacgccccgctgatccgcgcggtaccggcgttgtgcctggagcacgtggtctcccgcgaccctgggcgggtgcacgccgacctgcccgaagcccgggtcagcgccgatccggatgaggccatcgaggccgccgacatcgacctggtggtcatcgcctcgcccaatgccacccacgccagcctcgccgaacgggccttgcgcgccggcaagcacgtggtggtggacaagccgttcaccgtcaccctggccgaagcccggcgcctcgccgacctcgcccgtgaacggcctgggcaggtcttctcggtgttccagaaccggcgcttcgacagcgacttcctcgccgtggaggccgccctgcaggccggcagcatcggcccggtgcgctacttcgagtcggccatcgagcgcttccgtccgcaggtccgcgaccgctggcgcgaacacgacctgcccggctccgggctgtggttcgacctcggcccgcacctgctcgaccaggcactgtgcctgttcggcataccgcagcgtgtgcacggacacctgcgccggctgcgcgagggtgcgcagaccgacgactggttcgaggtcctgctcgattatccgcactgccaggtagcgctgcgcgccagcatgctcgccgccaatccggcgccacgcttcaatgtgcacggcgaccacggcagcctgctcaaggccggcgccgacatccaggaagcgcaactgctccagggactgcaccccggttccgccggctggggccgcgatcccgacctgctgcagcacatcgatggccagggcctgcgccagtcgctggtcaccccggcaggcgaccagagccgctactaccaggcgctggccgccgccatccgcggccagtcgcgcaacccggtgtcggcgcaacaggcctgcgcgctgatggccctgctggagttggcacgacgctccgccgaggaaggccgaagcctgccggtggagctgcgcgacgaggaacgccaggcctggaactga

SEQ ID NO: 324136 - DNA, 984 bp, Pseudomonas aeruginosa
atggttcgcggtgtatacctgcgccgctccccctccgagaagatgactctagagaaagcccttgggcgctacctagaggaagtcaccccgaccaagaaagcctccacgcaaaaagccgagcaaaccaaggccgccgcgctcatccgccacctcggcaagtattccctcgcagccctttcggccgatgtaatcgccgagtaccgcgacaagcgcctgaaggaaactgtccgcacgaaatacaaggaaggcagtgacgtcgccccgaaaaccgtcagcgccaacaccgtccgccttgaactggccctactcagcaacctcttcacggttgccatccaagagtggcgaatcggactcccccaaaatcccgtactgaatatccgtaagccaagccctggggaggggcgcgatcgacgactcaccccggacgaagaacggaagctgttccaggccgtgaatgcctaccacaatccaatgctcggatggatcgtcaggatcgccgtggagaccggcatgcgctcctcagagatcacctcgctacgcaggcaccaggtagacgtcaaaaaacgcgtggtgaagctcctggacacgaaaaacggggaaagccgcaccgtaccgctgacccaggcagcaacccaagccttcaaagaggccctggagaaccccatacgccccatcgataccaatctcattttcttcggcgaaccaggcaaggacgaaaagagaaggccctatgtcttctcgaaagtttggaatgggatgaaaaagcggctcggcatggcagatttccgattccatgaccttaggcatgaagccgtgagcaggcttgtggaaagcggccagctcactgatcagcaagttgcagcaatcagcgggcacaaatcgatgcaaacgctcaagcgctacacacaccttcgagcaaaagacttggtcaaagcactagataacattgagcagtttcgccaggaggcaaggcctagcgcctga

SEQ ID NO: 324137 - DNA, 402 bp, Pseudomonas aeruginosa
atgcaggtgccattagcgaataacccaaacgcgttatttaccttggtcaacgctccgctggcccaggctgcatctgagacgctgatcgaggtcgccctgttcgtctggtatgcccccgatcctctcccctcgctgaaacgcgccctggaaaccctggagggtatccagcagcgtcgcgccaggttcgcccttgatgtgatccgtcgctacccctgcattgagctcgaacgtcagcgcgcgctacgcgacctagtagagctggaagtgagttttgagggagggtcgatgacggatctgctcaatgcctggggcctggacgagaccgagaccccgaacaccaaggcaatcctgccctaccagacacgacactacgccgccgagcgccgcaaaggcgtagactaa

SEQ ID NO: 324138 - DNA, 2217 bp, Pseudomonas aeruginosa
atgacagacgaagcatcccagccgaatagcgccgagagcagaggccgtcgcacgacgtttgcactgtcaagcctctatctcgacccaaacaattatcgttttatcgatcacgatgactatgccaaggtacctgattccgcagttaccgacgacgacgtgcaacgccgcactcgaaggctgctcctcggtactaatgaggagaaagttagtgatctcatagccagcttgaagcaaaacggatggttagacgttgagcctattcacgtccggaaactggctgatcgtcagtacttagtggtcgagggtaatcgccgagtcgcgactttgaaacatcttcagtcgcggtggcaggactccaccggaaatcttggcaagcttgaccccacagtcttcgaaaaagtgccgtgtattctctacgaagaacgtgatgaatttcatcatctcgtcgtaatgggcctacatcacattagtggtaaggcgcgctggccagcggtaaatcaggcacgcctgatgaaacgtctacgtgacgaattccagaaagatcctgacgagatctgcgcatctcttggcgtcagtaaacgcgagttcaaccttagccttcgcaccctagctctggcggatgcctatagcgaaagtgattacggagatcagtttacgaccgagatgttcaacctgttccgcgaggtactcaaagcaccctcactgcggaactggcttgagtgggacaatgacgcggaaagggcacaaaactctgcaaatctggaacggctgttttcatggttatcacgcgagccggaggacgagagcgaggacgaagacgaccctcagaacggaaccaacagggtcctcggtgaacgggtcatcacgaccggcggacaaattcgagagctagccaaggtcatcgaagatcccaccgctgtaaagcgccttgaggagacacgcagcttgcaggctgcaacactttccagtgacctgctcgtgaaaaacgagatagacggcgccattgagcgtagcaaccaggatgccgctcgtcttttcgaattggcacctaagatgtcgagcaatgaactcgatcgcatcgagaatctcgtcgcgcgactccaagccgtggcggtgtctcaaaagcggcagccggcgaccgccaccacgacagaccaaccgtggaaggtctacaccgaagtgccccaatcgcatttcgggtcggtaattattgacaagtaccgcgcattggaaaacgtaattctcgatcagctcggacgagttaacttagtcgtaggcattaacaacgcaggaaagacgagtgcgctcgaagcagtctatctactcgccaatcaggctgacccacgtggactcctagaattgctccgccggcgtactcgcatggatccagttggaactcccacattctctgtaactcagctcccacaagatgtagcactgcgcgcccgcttcgacagtcggagcgacaatgaagtctccctgaagattgccgtcaaggatgaacctgaagatgcggatgaagattgggccagctaccttcgctcactgatcatcgaagcgaaatacgccgggcgaacccagcgatccgtaacggactttttctcgggccgtgcgcgccgtacccgtttgtctatcggagagccccgctggttgagttcttcggtctttcactcgccgttctcactctccgatcctgagctattagtgcactgcaacgaggagagcatccgactgaaacttaaggagcgcgtcgtcgagttcatccgtacacacatcgatgcgggggtgcgtgatgttgcattagcgaacgaacatcgccgctttctagtaacgcacgatgctttcagtgaggcagtagatctttcttcgtttggcgagggtattcaaagggtctttttgactggacttctctttgccggggcacgtggtggcgtagttctgatcgacgaattcgaaaacgctttacatacgggccttttggtcgagtttactaaatttgtccacgagctagcttccgagttcgagtgtcaggtctttctcaccacccacagcaaggagaccgtcgatgcattcttgctgaatggctaccgtatagacgaagttgtagcgtacctccttaaacgggaaagtaacgcgacgaaagcagtggtccgcttcagtggcgccgaactcaagcgtgctgtagaggtcggtgacatcgacctgcggaggctttaa

SEQ ID NO: 324139 - DNA, 858 bp, Pseudomonas aeruginosa
atgaaggcagtctttgtattctgcgaaggcaatcacgatgtcacatttattgtccgtagccttggtcaagttgctgatgcgacctgggttggatctccgatccgagagctaccttcgccactcggccctattctagatcctgggaatcccaacaagccgaagctggaaagcctcattgccagacgatattcgagccgcacccttgacgacttgcatctaaaggcagcagcgcacgcccccgtgccagccttcgaagccatagtaaagtcaggcgatactctttacgtcctcatacggtgccatggagatgacgcggcccaagcggcgatagacctattgtccgacgtgaacgcattgctgcatccagcatacggtaccgatgtgagagagattgccgcagcatttgtcttcgacgcggacgattcattacccgcacgcgaggctgcctttgcattggactatgctgcgctattggatggccaacctccgccgactcatggtaactgggtcaaaggctcgcattgtgtagggctttacgtcttccacgaccaagccagcaaaaaagggacacttgaagagctaattgctccactcgtagaagcggaatggagtgcgcgttggaaggaagctggcgcctatattgagaacaacgcacaacctgctgatccagtgagtagaaaggactccgagcgactcaaggctcagataaatgtgacgggccagttcctcttccctggtgacccaatgagcgtggtcatcagtaagcagaagggaactacgcctggcctttgcgacaatcatttcaaaggtacagagtcgcaagccatcgtgaagtttctgacagaagccccttggtga

SEQ ID NO: 324140 - DNA, 1047 bp, Pseudomonas aeruginosa
atgaaggcccaggaagagattttcgagatcgtaagagcagctcgccaacggataaaacaactgccgtccagaagccgatctaaggctactgatgatgattatgttcgtgaatataaccgtatggttggcgatgaaggagctgatccagagaaactatggtcagcaatctgcgcaaccaaaagtaagtccacgtatcggagaagagtggccgcaacaatgcattgttgtcgggttcagcttcaggaagcattgcggagccaggatgcggcccagcgtgcgggtgatatgaatgacctcagataccaagtgtcagtgatcgagggaacgatcggaatcctgaatattgttgaaaggcacaaagggcagtgccctctggaaaatacggtaaggcggaagtcaaagcgatctgacttgaaatacctgcctgccaattggcgggatcaattgcataagcaacttgaggggagtaagtacgaactggcttatctggtggaggcagtgtcgggttgtcggccaggtgagctcgaaaaaggcgtaaaattgatttgctccgaagaaagcgggctattgactgtccgtatcgacaacggcgttaaggtgactgagcagaaaggccagccctggcgcgaaatcacatatcgcgtcgatcagaatccgttggttggggctctctatgaggtctgcagaaaggttgcaccggacacggagaagatcgagatggttgtcgacatcgagaaaactaccaactggcgtgcagcactgtcgtcggccgggcagaagcagtggccgagactgaaattccgggtctgtccgtaccatctccgaaatgccgcggccagcgactggaagcgagccgggctgaatgaaaaagagatctcggccgcactaggccactgtgtgaacaagacttcgagcaactatggtcagtttcagatcgggcaaggagatggtggtttgagtcccgttgaagtaagagccgcacgtcctatcttgaatacccggactctatctccccacgtgggccggccctccgtgagccctaaatga

SEQ ID NO: 324141 - DNA, 2265 bp, Pseudomonas aeruginosa
atgagaaaatcgctgctgctttgcctacttctggccgcatttttcgggggagcagcccacgctgaatcctcaggcggactaaaccaattcaccccgcccccgggcgacacttccgtcgacttcctggaggaagtgttcggctcgatcgtggggactatccactctggcgggaacgtggagggcggcgagaccgaggacgtgctgggcagcatgatgtccgtgttcggcggtgccgtgatgttcttgggcatgatctttatcgcctacaccacgatcaaaggcactgttgactccgctcaggacggcgaggtccttggccggaagatgagtgacatttggatcccgctgcgtaccgccgctggcggcgccctgctgctaccgcttgggcatggctattcgcttatccagatcatggtgctatggctcgcgattcaaggcgtcggggtgggggatgcaatctggagccaagccgtcgaccagatcggaaaggacgggatgctatcgcgaccgctgatccctgactctcgaccgctcgcggccaacattctgaaattcgaagtctgcaccgcggcgatgaacaagcagttcgaggcctctggccggtcgactcgcatccaggctgtcgcatccacccgcaaggtcgtcaatacaggggagatcgacgtcgaaatcaccgatgccataccggtctatggcggcatcaacatggtgcagaaatacaacagggcgagctataacgtcaccgactacaagtggaaggccaacgacaattcctacatcaacccagatgtgtgcggcgcactcacctggaagcaatcatgggaggcctcggagggcaacagcaacaccaaggtcatcaaagagccgatcctcgcggcacacgctaaagccatccagcagatgatccaggatatacggccgacggcacagcagatcgtcgctgggcaaaagccggccccgggcgtgatcgacgctgcagcgaacacctatgaaaactcgcttcgtgccgccgccaagactgccgtgatgcagactagtgatcgcgctgcagcggacttcctcaaggccgccaaggacggcggttggctgttcgccggcacctggtacaaccacatcgtcaaaatgaacgacgtgatgcaatccacgctgaacggtctgccagcagcagatcccattgccatcgtcgacaaggagaccaaggagacactccagacatacgcagacgtcatgctcaccgccgacgagtatgccaagcatcgtgttgactcggtccggaacacctactacgccgagaccaacgtgcgagagccccgtgacggtgaaggggcctgggagtacgtcaagaagatgatgtccgccccgttcatgggcgcgatcaaccagatgacgcagagcatcgctggctccaacctcaaccacatgagccagatgaaaagcttcggtgacgtcatcgtgacaataggtgaggtaatgctcgcttcgatggccggagtgagtggggctgcaaattcgctggcggccaaggtcactgtgggaagcgtattcgacgtaggagccgtaattcagtttgcgtctggcctcgtgacgacgttggtgctgttattgttctttttcggcgtgacgttgagcacctacgtcccgatgatccccttcatcacctggacgacctcgattgtgaactggttcgttctggtgctggagtctgttattgctgctccgctgttcgcagtcgcgcacatccacccggacggtgatgacacggtcggacgtgcgggccagggttacatgatgatcctctcgctcgtgatgcggcctgccctgatgctattcggcctggttggagggatgttgctcacccagcctatcgtcggctacatcaatgcggccttcatgtctgtcgtctcggggatccaggcggacagcatgaccggcatggtgagcttcatcgcctacgtggccatctacgttgtgatcatgactacggtcgtgcacatcgtcttcagtctgattcactgggtaccggacaatattctgcgctggatcggccaaggcgctaccggaggtatcgctgacgcagagcgcaccggtgatggtggtcaggacgtgtttgtggcaggggttagggaaagcaagcacggggctgctggtggcctgggtggtgggtcgaaacatggcaataggccagacaactctactcctggcactactggccgaggcatgccagacaacaacacactgttgggcggcccgcctcccggaggttaa

SEQ ID NO: 324142 - DNA, 828 bp, Pseudomonas aeruginosa
atgtcagagataacgtctccagctgtctgcgtacagatcaacgccacccataaaagggacaatagcgacttcgagatcatctccgtaacggagtctctgtcccacagtaaacgcgtgcatttccttctcgttgagacccaaacgcgcgagtacgtacagcaagtgggcgaccaaacacatgtcgaggccagcatagatgtcaaggctacctacctatatgggcatccttatggccaccgagaaggtatggtggtcagtaccatgggcggaaactttaggagctataacaatagcgtaaagctgaccaacggaagcgtaatgattgaatctgccctccgtggcctgcacataggcacctacctattccataagataactagctgggcaaagagctttgatccgtctgcccggatcgtcccaatcatggtaatcgctggagatgcagggccagaaaatcgtgagcgccgtaacaagctctacaccaattctggaatcaggtttatctggaccgatacacctggtgcaggcggccgctccgcccccgatctcaccgtggcagatctcgccccctacagccattggccgaacatcgagccgtactatggcttttctgcacttagccaggcttggcgcgaactggacgttatccgggagaaagcttccggactgaaggcatccaaagcctactatcgcaagcactataacagcgtatccaagcgcctatctgccatcactacgatgctgaactggccactctgcattgtgacattcgtgtttggcctgctactcgcccgagggatcggatggtaccaagggtttgggttctga

SEQ ID NO: 324143 - DNA, 648 bp, Pseudomonas aeruginosa
atgtcccaacgtagtagcaaggctattgctgaattcatcatgcgaaacgttccccgcgatctcatgctgggcgttgaggacgcgctgaacactggagctatgcggggctacgcatctgcaaagggcatgaataaggggcatgtgaagaacgccgtaggtcagatgcgtcatttccatatgaacgaagctttcaatgatgcgctcgttgctggaaatgccaatccgactccgatcagaggcaatggccttgttgtaggtcgctctggcgtgattgccttgagccgattcaacatttctgctggagtttggaacaacgctcgccgaagcatcacacgtcgacatctggctgaggccaaccgggcaattgaacaattcatacagccagcactttttgatgctcagccagtctcacaggcgtctctgtttttcgtggctgccttcagcggatcgatggagattcagccagatacgccacaggttatctatgttgcggtaccggacaaagagatgaagtcctggatcttccaggaacccttagagcgtttctgctctcgctacttcgagatcgaaaacccactacagccagatacggcgaaaccgaagctcaagcctggtgtggcagcaaaaaatcggaaagatcagtcatga

SEQ ID NO: 324144 - DNA, 1203 bp, Pseudomonas aeruginosa
atgagtcggggagttaatggtttcaacccgggccgcctgagccaagctctcgcggcccgtcgtttacctcaagtacagcttgcggcaatggtcggcgtttcgcccgcaaccgttagcaagtggaggtcggggcaacaggcaccggaggcagagacgttggaacggctcgcatccgtcataaatgttagcccggagtggtttacacgaccgttgcccacgaaggtgtctgtaccgctttttcgtagtaacgcatctgcccatgtggctgcacgcgatatgctcgaagcgcgtcttgagtgggctcaagatatttcaatcgcgcttgaagagtttgtggacttcccggaagtgaacctgcctatccgggagttcaaagcaccagagcaaatcagtgatgctgacatcgaagaggcggcctgtgagtgccgagatctgtggaacctcggccggcgggcaattccagatctcgcccttgcagtcgaaggcgcaggggtcattctaatccgcgaagaaacagggattgcacctattgaaggcctatccgcgtggagtgcagcgctgcagcgtccaatggttctgttgtccgcagacaaggcaaacgggttccgcagccgattcgatctagcgcacgaattgggacacctcgtactacacaagggcattgaccgttcaacagatccagttcgatacaagcagatggagtcgcaggcacatcgctttgctggagcctttttactgcctgcagaagcgtttgcagcagaagtgaagactccagttaccttggacagtttgctcctgctgaagcagcgctggggggtctctgtagccgcgatcattatgcgactggaggcattggggatcattgaccaggaggcaaagacactgctcttcaaacggcgctctgcccgttggggagtcaaatccgaaccgggtgatgatgcacgagcccccgaacaacctcgtctgctgaaaaggacaatcgaactgttagcgtcctcgggcgttatgccggtggagtcagtaccaaaccacatagggctggcggcaactgatatcgagcggcttacaggtttgcctgatggctatctgagtcagagagcatctgtcgtaaacctatccagactcaaagcaggactcgcccgtaaggcacctgccaacactactgctgacggggctagcatcatcccgttcaatcgccgctga

SEQ ID NO: 324145 - DNA, 882 bp, Pseudomonas aeruginosa
atgaaacgcaagggcatcatcctcgccggaggctcgggcacccgcctgcacccggcaacgctggccatctccaagcagctgctgccggtgtacgacaagccgatgatctactacccgctcagtaccctgatgctggcgggcatccgcgagatactgatcatctcgaccccacaggacaccccacgcttccagcagttgctgggcgacggttcaaactggggcctggacctgcaatatgccgtgcaaccgtcgccggacggcctggcccaggccttcctgatcggcgagtcgttcatcggcaacgacctcagcgcgctggtcctgggcgacaacctctattacggccacgacttccacgagttgctcggcagcgcttcgcagcgccagaccggcgccagcgtcttcgcctaccacgtgctggacccggagcgctacggcgtggtcgagttcgaccagggcggcaaggccatcagcctggaagagaagccactggagccgaagtcgaactacgcggtcaccggcctgtatttctacgaccagcaggtggtggacatcgccagggacctgaagccttcgccgcgcggcgagctggagatcaccgacgtcaaccgcgcctatctggagcgcggccagctcagcgtggagatcatgggccgcggctacgcctggctggataccggcacccacgattcgctgctcgaggccggccagttcatcgccaccctggagaaccgccagggtctcaaggtggcctgcccggaagagatcgcctaccggcagaagtggatcgacgccgcgcaactggaaaaactcgccgcgccgctggccaagaacggctacggccaatacctcaagcgcctgctgaccgagaccgtgtactga

SEQ ID NO: 324146 - DNA, 1800 bp, Pseudomonas aeruginosa
ttgaaagcctatttccatcgctggcgctcgctggtcatcctcgccctgcttctcgcgccgctgctctggcccctgcaatatttcgccgagcgctactacagcgagcagttggccgagcagaaccgccagacgctcgacctctacgtcgccaacctgctcggcacgctgcgccgctacgaagaactgccgcagatcctcggcggcctgccggtgctgcgccaggccctgcaacaacctggcgacccgctgctgcagaagatcgccaacgaggcgctggccgacatccgccgacgcaccggcgccgacgtgatctatctgctgcagccggacggcaccacccaggtcgcctccaactgggcccaggcggacagtttcgtccaccgcaacttcgccttccgcccctattatcgcgaggccatgcagggccgcctggcgcgcttcttcggcctgggcaccacctcgatcaagcgcggttactacttcgccagtgcggtgaaagaaggctcgcggatcatcggcgtgctggtggtgaaggtcgatctcgaacacatcgaacggctctggggcaattccccggagcagttgctggtgatagacaactacggcgtggtgatcctctcctcgcgcgaggattggcgcttccatgccagtcggccgctgagcgcggcggagcgcgacgagatccacgccaacatcccctacccggtgcaggacccgaagcccctgcgcctgcaacagagcgcctggctcagccagagccggacgctgccggaaaccggctggacggtgagcatctacgccccccgcaccctcatcgaacggccggtgcgcagcgtcctgctgatcggcggcgcgaccctgctcgccctgctcctgctgcttaccctgctgaccctcagccgccgtcactacctggaccgcatcgctctcgaggccgaggccaagcgccagttggaagagcgcgtactggaacgcacccgcgagctggagaacgccaacgcgcagttgcagcaggaagtccacgaacgcgaacaggcccagcgcgagctgatgcgcgcccaggacgaagtggtccaggccggcaagctcacggccctcggcaccatgtcggcgagcatcagccacgaactcaaccagccgctggcggcgatccgcagctacgccgacaacgcccgggtgctgctcgaccaccagcgcaccgaggacgcccgcggcaatctcgagcagatcagcgacctcaccacccgcatggcctcgatcatcgcccacctcaaggcctatgcccgcggtgcgcgccgggcgccggagaacgtgcagttgcagccggcgatcgaggacgccctgtcgatgctcgccagtcggcggcgggcgatgaacgtcgaactgctgcgcgacgtgccggacgccccgctgtgggtccaggccggcgagacccgcttgcggcagatcctcggcaacctgctcaccaatgccctcgacgcgctcgccgagaaagctccgccacggcgcctatgggtgatcgccagccaggaccagcacggcgtgatcctgaccctgcgcgacaacggcccggggttttccgaggacgccctggcccacgcccacgaacccttcttcaccaccaagaccaccgccaaagggctcggcctcggcctggccatctgcgataacctattgcgcgccctcggcggccgcctggaaatgggcaaccatctcgaaggcggcgccgtggtgcgcctgcacttgctgccgggagttcccggcgtcgccgccatgccccaggaggaaacccgcgcatga

SEQ ID NO: 324147 - DNA, 996 bp, Pseudomonas aeruginosa
atgctcaagcacaccgcgaaggcgctcgtctgcgcactttccctgaccgtcgccggaatcgtccaggcagccgacccgatcgtcatcaagttctcccacgtcgtcgccgagcacacgcccaagggccagggcgcgctgctgttcaagaaactggtggaggaacgcctgccgggcaaggtcaaggtggaggtctacccgaactcgtcgctgttcggcgacggcaaggagatggaagccctgctgctgggcgacgtgcagatcatcgcgccgtcgctggccaagttcgagcagtacaccaagaaattgcagatcttcgacctgccgttcctgttcgacaacatccaggcggtcgaccgcttccagcagagcccgcagggcaaggagctgctgacctcgatgcaggacaagggcatcactggcctcggctactggcacaacgggatgaagcagttgtccgccaacaagcccctgcgcgagccgaaggacgcccgcggcctgaagttccgcgtgcaggcctccaaggtgctcgaggaacagttcaaggcggtgcgcgccaacccgcgcaagatgagcttcgccgaggtctatcagggcctgcagaccggcgtggtcaacggtaccgagaacccctggtcgaacatctactcgcagaagatgcacgaagtgcagaagtacatcaccgagtccgaccacggcgtgctggactacatggtgatcaccaacaccaagttctggaacggcctgccggaagacgtgcgcggcgtgctggccaagaccatggacgaggtcaccgtggaggtgaacaagcaggccgaggcgctcaaccagggcgacaagcagcgcatcgtcgaggccaagaccagcgagatcatcgaactcactcccgaacagcgggccgaatggcgcaaggccatgcagccggtgtggaagaagttcgaaggcgagatcggcgccgacctgatcaaggccgccgaagccgccaaccaggcccaataa

SEQ ID NO: 324148 - DNA, 1284 bp, Pseudomonas aeruginosa
atgaccattctgttcctcttcctgctgctcttcctgctgatgttcatcggcgtgccgatcgccgtctccctgggtctctccggcgcactgacgatcctcctgttcagcccggactcggtacgctcgctggcgatcaagctgttcgagacctccgagcactacaccctgctggcgatcccgttcttcctgctctccggcgcgttcatgaccaccggtggcgtggcgcggcgcctgatcgacttcgccaacgcctgcgtcggacacatccgtggcggcctggcgatcgccgcggtgctcgcctgcatgctcttcgccgcgctatccggctcgtctccggcaacggtggcggcagtgggttcgatcgccatcgccggcatggtccgctcgggttatccacaggcgttcggcgccgggatcgtctgcaacgccggcaccctcggcatcctcatcccgccatcgatcgtgatggtggtctacgccgccgccaccgagacctcggtgggcaagctgttcatcgccggcgtggttccggggctgctgctgggactgatcctgatggtggtgatctacatcgtcgcccgggtcaagaagctgcccgccatgccaagggtcagtctgcgcgaatggctggccagcgcgcgcaaggcgctgtgggggctgctgctgatggtgatcatcctcggcggcatctattccggcgccttcacccccaccgaggccgccgccgtcgccgcggtgtactcggccttcgtcgcactgttcgtctaccgcgacatgcgcctgagcgaatgcccgaaggtgctgctggagtccggcaagctgaccatcatgctgatgttcatcatcgccaacgccatgctcttcgcccacgtgctgaccaccgagcagataccgcagagcatcgccagctgggtcacggaactgggactttcgccatggatgttcctgctggtggtgaacatcgtgctgctgatcgccggcaacttcatggagccttcggcgatcatcctgatcctggcgccgatcttcttccccatcgccatggagctgggcatcgatccgatccacctcggcatcatcatggtggtgaacatggagatcggcctgatcacgccgccggtcgggctcaacctgttcgtcacctcggcggtcaccggcatgccgctgggcgcgaccatccgcgcagcgctgccgtggctgatgatcctgctggtgttcctgatcatcgtgacctacatcccggcggtatccctggcattgccgaactggctggggatgagctga

SEQ ID NO: 324149 - DNA, 1449 bp, Pseudomonas aeruginosa
atgtcccaagaatccagccaaaaactccgactaggagcgctaacggctctggttgtcggctcgatgatcggagggggcatcttctccctcccgcaaaacatggcagccagcgccgatgtcggcgccgtcctgatcggatgggcgatcaccgccgtcggcatgctcaccctcgctttcgtcttccagaccctcgccaaccgcaagcccgaactcgacggcggcgtgtacgcctacgccaaggccggcttcggcgactacatgggtttctcctcggcctggggctactggatcagcgcctggctgggcaacgtcggctacttcgtcctgttgttcagcaccctcggctacttcttcccgatcttcggcaagggcgacaccgtcgcggcgatcgtctgcgcctcggtcctgctctgggccctgcacttcctggtgctgcgcgggatcaaggaggcggcgttcatcaacaccgtcaccaccgtggccaaggtcgtgccgctgttcctgttcatcctgatctgcctgttcgccttcaagctggacatcttcaccgccgacatctggggcaagagcaacccggacctgggcagcgtgatgaaccaggtgcgtaacatgatgctggtcaccgtctgggtgttcatcggcatcgagggcgcgagcatcttctcctcccgcgcggaaaaacgttccgacgtcggcaaggccaccgtgatcggcttcatcaccgtcctgctcctgctggtgctggtcaacgtgctgtccatgggcgtgatgacccagccggaactggccaagctgcagaacccgtcgatggcgctggtactcgagcatgtggtcggccactggggcgccgtgctgatcagcgtcggcctgctgatctcgctgctgggcgcgctgctctcctgggtgctgctgtgcgccgagatcatgttcgccgccgccaaggaccacaccatgccggagttcctgcgccgcgagaacgccaaccaggtgccggccaacgccctgtggctgaccaacatctgcgtacaggtgttcctggtggtggtgttcttcacctcgggcgacccggacggcatggacccgtacaccaagatgctgctcctggccacctcgatgatcctgatcccgtacttctggtccgccgcctatggcctgctgctgaccctgaagggcgagacctacgagaacgatgcccgcgaacgcagcaaggacctggtcatcgccggcatcgccgtggcctacgcggtctggctgctctacgccgggggcctgaagtacctgctgctgtccgccctgctgtatgcgcccggcgcgatccttttcgccaaggccaagcacgaggtcggccagccgatcttcaccggaatcgaaaaactgatcttcgccgcagtcgtcattggcgccctggtggctgcctacggcctctacgacggtttcctcaccctctga

SEQ ID NO: 324150 - DNA, 1236 bp, Pseudomonas aeruginosa
atgagccagaacttttccttccgccaggccgcggtgatcggcgccggcaccatgggtcgcggtatcgtcatgtgcctggccaacgccggtctcgacgtgcagtggctggacagcaacccgcagatgctcaaccaggcgctcggcgccgtggccgacacctacgcgcaccacgtgcgccaggggcgcatcggcgaagaggaagcggccgcgcgccgcgcccgcatcacgccggtccagcacctcgccgcgatgcgcgaggcggacctggtgatcgaggcggtctacgagaacctggaactcaagcaatcgatcttccgcgagctggacgcggcgctgaagccctccgcggtgctggccagcaatacctcctacctggacatcgacgccatcgccgcggtcaccgcgcgtccgggtcaggtgctcggcctgcacttcttcagcccggcgcacatcatgcggctgctggagatcgtgcgcggcgcgcagaccgcgccggcggtgctggaggcggccctggcgctgggcgagcggatgggcaaggtcagcgtggtggccggcaactgccacggcttcatcggcaaccgcatgctcgaaccctacgccaccgaggcccgcctgatgctgctggaaggcgccctgccgtaccaggtggaccgggctctccaggcgttcggtttcgccatggggccgttccgcatgtacgacgtggtcggtatcgaccttgagtggcgcgcccgcgagttggccggggtcggccaggaccagccggccgtgcaggtggacaaccgcctttgcgagatgggccgcttcggccagaagagcggtgccggctactaccgctacgcgccgggcagccgccaggcggagcacgataccgaggtggatgccctggtgctccgggttgccgagacgctgggctacccgcggcgcgatttcgccgacgaggaaatcctcgagcgttgcctgctggcgctggtcaacgagggcgcgaagatcctcgacgagggtatcgccgcccgtagtgccgacatcgacactgtctacctgaacggctacggcttccccgccgcggagggcggtcccatggcctgggccgatcgcctcggcgcggccgagctgctgcaacgcctgcgtttcctcgaacagcgccacggcgcgcgctggaagccggcgtccctggtcgagcgcctggccgccgagggcggagccttcgccgacctgcaggaggcgcgctga

SEQ ID NO: 324151 - DNA, 1071 bp, Pseudomonas aeruginosa
atgtcggccaacaagaagcccgtcaccacccccttgcacctgttgcagcaactttcccacagccttgtcgagcacctggaaggtgcgtgcaaacaagcgctggtcgactcggaaaagctcctggccaaacttgaaaagcaacgtggcaaagcccaggaaaagctgcacaaggctcgcaccaagctgcaggatgctgccaaggccggcaagaccaaggcacaggccaaggcgcgcgagaccatcagcgacctggaagaggcgttggataccctgaaggcccggcaggcggacacccgtacctacatcgtcggcctcaagcgtgacgtacaggaaagcctcaagctggcgcagggtgtcggcaaggtgaaggaagccgctggtaaggctctggagagccgcaaggcgaaacccgcgaccaaacctgctgcgaaggcggcagccaagcctgcggtgaaaaccgtagcggcgaagcctgcggccaagccggctgcgaagcctgctgcgaaaccggcggccaagcctgcggcgaaaaccgcggcagcgaagcccgcagccaagccgacggcgaagcctgctgcgaaaccggcggccaagcccgcggcgaaaaccgcagccgcgaagcccgcagtcaagccggcggcgaagcctgtggcgaaaccggcggccaagcctgcggcgaaaaccgcagccgcgaagcccgccgccaagccggcggcgaagcctgtcgcgaaaccgacggccaagcccgcggcgaaaaccgcagccgcgaagcccgcagccaagccagctgcgaagcctgcggcgaaaccggcggcgaaaccggcggccaagcctgtggcgaaacccgcggccgcgaagcctgcagccaagccggctgcgaagcctgcggcgaaaccggcggccaagcctgcggcgaaacccgtagccgcgaaacctgccgcagccaagcccgccaccgctcctgctgcgaagcctgcggcgactcccagcgccccggcagccgcctccagcgctgcttcgccaacgcctgccgcgggcagtaacggcgccgccccgaccagcgcctcctaa

SEQ ID NO: 324152 - DNA, 1077 bp, Pseudomonas aeruginosa; identical to SEQ ID NO: 323515

SEQ ID NO: 324153 - DNA, 519 bp, Pseudomonas aeruginosa
atggcaacacccgcctatatgtccatcaccggcaccaagcagggcctgatcaccgccggcgccttcaccgaggattcggtcggcaacacctaccaggaaggccacgaggaccaggtgatggtccagggcttcaaccacgaagtgatcatcccgcgcgacccgcagtccggccagccgaccggccagcgcgtgcacaagccggtggtcatcaccaaggtcttcgacaaggcctcgccgctgctgctggccgccctgacctccggcgagcgcctgaccaaggtcgagatccagtggtaccgcacctccgccgccggcacccaggagcactactacaccaccgtcctggaagacgcgatcatcgtcgacatcaaggactacatgcacaactgccaggacccgggcaacgcccacttcacccacctggaagacgtgcacttcacctaccgcaagatcacctggacccacgaagtctccggcacctccggctccgacgactggcgctccccggtcgccggctga

SEQ ID NO: 324154 - DNA, 639 bp, Pseudomonas aeruginosa
atgagttcgaacgaaaccctgccggggctggtgatcgccgattccttcccggtcatgcagtgggcgctgcagcgctacctcagcgaggagtgcggacgccaggtgctggcggtggtcggcgatagcgacagcctggtggagcgcttggccgacctgccgccggaaagcatcctgatcaccgagctgggcttgcctggccagcgcagccgcgacggtatccacctggtggaatggctgacccggcactgcccgcaaatgaaggtgatggtctactcggtgttcagcgcgccgttgctggccaaggcggtcctgcgcagcggcgcctcggcctacatcagcaagcgcagcccgctggagacgttgaaggcggcgctggagtgcatggcgctcggacagaccttcctcgaccccggcctgcacccgcagcggcataccggcaagccgctgagccccaccgaggtggacatcctccggcgcctggcgcgtggcgacacggtcagcgagatcgcccagcggaccatgcgcagcgtgtcgaccatcagcacccacaagaagaacgcgatggtcaagataggcctcaacagtgacgccgaactgatcgccctgggcgtgatgaactggctccacgaactcgcctga

SEQ ID NO: 324155 - DNA, 369 bp, Pseudomonas aeruginosa
atgatccgccagccccgctttgcccgtttcgtcctgccgttgttgctgagcctgtgccagccgtccttcgccgccgaactccgcgcggttgccgaagcacgccgccaggaactcctgctggaggactcgccggtggcgtgcggcgaggtgggctgcacggcgcgggaaagcctcagcctggtggcgttgcaggtgcaggcccgggttctggtcacccgcctcggccgcgatgatttttccccggccgcccgccagcccgccgccgtcccggactaccgcctgttcggcgatctcggcctggcgccaagccccttcgcctggcaagcgttgaccggcgagagcgcggcggcggacgcgttgcgtttctga

SEQ ID NO: 324156 - DNA, 1440 bp, Pseudomonas aeruginosa
atgaccaatctgctgctttaccaacgcatcgcccagcagttggccgaggacattcgccgtggcgtctaccagccgggcgagcgggtaccgtcggtgcgcaagctcagtacccagttgaacgtcagccacgccaccgtgctgcaggcctacgccaccctcgaggaccagggactgatccgcgcccgtccgcaatccggcttctacgtccaccgcaccccggcgctgaccgcgccgaccccggatatcgcgcgggtcgagcgtcccggcctggtcacccgcagcagcatcatcaaccaggtgctcgccgagtcccgccgcgaaggggtattcccgctcggcgcggcggtgccgcacgtggactacctgccggtgcgcgccttgcaccagcaactggccaaggtcacccgcttccagagcccacgggcgttcagctacatgttcagccccggtttcgagccgctgcggcggcaggtggcgatccgcatgcgcgacgccggcgtggtggtcgacccgtcgcaggtgaccatcacccacggctgcgtggatgcgatccacatggccctgcgggtgctgacccgtcccggcgacctgatcgccaccgagtcgccgagctactacggcctgctgcaactggccgacgtgctgggcctgaaggtcatcgagatccccagcgacccgcgcaccgggatcagccttgaagcgctgcaactggcggccaaccagtggtcgatcaaggccttggtgctgaccgcgcggctgagcaatcccttcggcgggacgattcccgaggatcgccagaagcaactgctgaaactgaccgccgaacacaacatcggggtggtcgaggacgacatctacggcgaactgatgttcgaccagggccaggcgcgctcgctcaagtcccacgaccgcgacggccgggtgatctactgctcgagtttctccaagaccatctcgcccggcgtacgcatcggctggatcatcgccgagcgctaccaggaggagatccgtcgcttgcagaccttcaccacccattcggcctgcaccgtgacccagatgggcgtcgccgcctacctggagaacggcggctacgaccgccacctgcgctacatccgccaggagtaccggaagaacatgaccgcctaccagttggcggtgcagcagtacttcccggaaggtacgcagatgacccggcccaagggcggcttcatcctctgggtcagcctgccggccaaggtcaacaccaaggaactccacgtgcgggccctggagcagggcatcagcatcgccccggggctgatcttcagcaacaccgagcagttcaacaactgcctgcggctgacctgcgggattccctggaaccgcgaggcggagcgggcgatcatgaccctcggcatgcttgccgggcagctttgccaggaaggccttatcgccgcctga

SEQ ID NO: 324157 - DNA, 636 bp, Pseudomonas aeruginosa
atgagcctgctctcggtcgcctttgacacaggacaggagtcgaccagcggcatgcatgcctccaccagcgccacgacggccgccggcagcgacgaaacgctgctggcgcgttaccgcaagggcgacagcgcggccttcgaggtgctctaccagcgccatcggcaaggtctctaccgttttctctgcggcctggccggacagaccgaactggccgacgagatctaccaggaaacctggctcagcctgatccgcagcgagagccagccgcagggccgggcgagcttccgcacctggctctaccagatcgcccgcaaccgcttgatcgatcattggcgcaagcatggccagcgccagccgttgcaggacagctacgacgaacagttgcacgcgcaacccgaccagggcgccggccccgagcagcagctcagcctgagccgcgacggcgagcgcttgcagagcgcgctggagaccctgcccgaggaacagcgcgaggtattcctgatgcgcgcccacggcgaactggaactggccgagatcgccacgctcacccagtcgccgctggagacggtgaagagccgtttccgctacgcggtgcagaagctgcgccggctgctggccgaggaggtggcggtatga

SEQ ID NO: 324158 - DNA, 765 bp, Pseudomonas aeruginosa
atgaacccacagaagcattccgcgagcgtcgccgaagagcagatgctggcgcatttccgcgcccacgcgccgcagcagccggcgccggcgctggaccaggcgatcctcgccgccgcgcgacgccaggcggcgcatgtcgaacccgcccggtcctggtggcggcgctggctggaagcctcccgcaggccgcgttggcaggcggctttcgccagcctgctgggcgtggcgctggtgctggggctggtcagccacaacgtgctggacgacgccgagcgccaggcccgccccgaagtggcgttcagcgatgtgcccctgcgcgacggagtcgccggggccgctgcggcgaagcgggccatgcgcgcgccggcggcgccggctccgctgtccggcgagatgtcggagcccccggccttgctggccagctacgcatcgtccggggaggcgccgcaactgatggccgaggccgcgccgccggctccggctgccctggccgaccgaccgccggcccaggccgcgcagcaggcgaaggtccaggcggcgctggccggcgacttcgtcgcccaggccaggggcaaggcggttgcggtgaagccggaggtgctcgacgaggcgctcggggcggtccttgccctgcgtgagcagggcaagacggagcaggccgcgacccagttggccgagctgcagaaacgtttccccggagagaacctggtggaacgactggaacgcctcgcgacgatagccgcgagcgccaagaaacggccgtga

SEQ ID NO: 324159 - DNA, 1827 bp, Pseudomonas aeruginosa
atgacccacgccgacctgatcactttcaaccgtttcgttgcccgcctgcctgccaccttcggccgcgtgccgcgcatgctgcgcggcctgtactacaccgcgatccgtaaccgcgagaagagcctgtccctgggctgggcgctggagcgcgcggcacgcctgtacccggacaacccggcggtgctcgacggccagcggcggatcagctacgccctgttcaacggctgggccaatcgcctggcgcgcgccttcaaggccgagggcgtaggccacggcagcgtggtcgcggtgatgctggaaaaccgcgtcgagctgctggcgatcctcgccgccctggccaaactcggcgccatcggcgcactggtcaacaccacccagcgcggcaaggtcctggtgcacagcctgaacctggtgaagcccggccacttcgtggtcggcgaagaattgcgcgaggtgttcgaggaagtccgccaggaggtgctcggcaacgccggccattgctactgggtcgacgacggcgacaccctcggcgatcccggctcgccgccgatgggctggcgcaacctgatgcgcctggcccagggacagacctcggagaacctcgaggacaccggcagggtgcggctcaaggactcctgcttctacatctacacctccggcaccaccggcctgccgaaagcctcgatcatgagccacggcaagtggatcaaggcctacggcggcttcggccattccggtctgggcctgggccgcgacgacgtgctctacctaaccctgccctgctaccacaacaacgccgtgaccgtctgctggagcgcggcgctcgccggcggcgcggccatggccctgcgccgcaagttctccgccagcggtttctggaaggacgtgcaacactaccgggcgacctgcttcggctacatcggcgagctctgccgctacctgctgaaccagccaccgtgcgccgaggaacgcggcaatagcctgacctgcatgatcggcaacggcctgcgcccgtcgatctgggccgagttcaagcaacgcttcgagatccagcggatcaccgagttctacgcttccagcgaaggcaacatcggcttcaccaatgtattcaatttcgacaatacggtgggcttctccccagccacctacgccatcgtccgctacgacctggagaacgaccatccggtgcgcgacgccaagggcttcatggagaaggtcggcaagggcgaggtcggcctgctgatcagcgagatcagtgcgaagtggccgttcgacggctacaccgatccggccaagagcgaagcggtgatcctccgcgacgtgttcaagaagggcgacgcctggttcaacaccggcgacctgatgcgcgacatcggtttcaagcacacccagttcgtcgaccgtctcggcgacaccttccgctggaagggcgagaacgtttccaccaccgaggtggaaaacgccctcggcgccttcgacggggtcgaggatgcggtggtctacggcgtggagattcccggcaccaacggccgctgcgggatggccgcgctgcgcctggccgatggcgtcgaactggaccgcgacgctctcgccgcgcacctcgaccgcgagttgccggcctatgccacaccggtgttcctgcgcctgctgcgcgaagtcgagaccaccggcaccttcaagtacaagaagaccgacctcaagcgcgacgcctacgatcccgcgcgggtcagcgacaaactcttcgtcaggttgcccggcagcgccggctaccagccgttggacgcggagctgtaccaggcgttgcaggagcagcgctaccgcttctga

SEQ ID NO: 324160 - DNA, 435 bp, Pseudomonas aeruginosa
atgaatccactgatcaagaccatcctgtcgaccaacgccggtgccggcctggccatcctgcgtatcgtcaccggtcttaccctgatgtcccacggttcgcaaaagctcttcggcatgttcggcggcgccggcctgaacggcatggcgcagtggttcgaatccatcggcctaacccctggctacctgctggcgaccctggccggcagcgccgagttcttcggcggcctggcgctggtgatcggcctgctggtgcgtccggcgtcggtggtggtgggcttcaccatgatcgtggcgatcttcagcgtgcacatcggcaatggcttcttcatcaccgacaacggctatgaatatgccctgaccctgctgatgatcagcgtggcgctgctgatcgatggcgccggcaagttctcgctggacggcaagctgtcccgctga

SEQ ID NO: 324161 - DNA, 729 bp, Pseudomonas aeruginosa
ttgaataacgaattgggctatgtgcgggccgtattcaacgaattgaaagacctgggccagattgactatgccaacccgttggtaggggtgaaacctttaaagctccaagagcgtgagctttcttggctgacgacagaacaaatcacggagttgctagaagcgattcgcagcggcagtgacaacccccatacggaactggtgacattgctttgtcttgccacgggggcccgttggtctgaggcggaaaagctgattccacaacggctacagggcaacgtcgtgacctatgccggaacgaagtcggggagggtgcgccacgttccgatccccaccgagttggccgacaagatcagggtgcattggcgaacgcacggcctgttctcgtcctgtattacctcgttccgccgcgccctagagcggaccacaattcggctaccgaaagggcaggcgagccacgccctacgacataccttcgccagtcatttcatgatgaatgggggcaacattctcactcttcagaaaatcctggggcattccactctgaccatgaccatgaccatgaccatgaccatgaccatgaccatgaccatgcgcatctatctcccgaccatctgcaagatgcgatcaggtttgggccgctcgataagtcagggtactagctcaatacttgtacccaaaggtcatgcgcaaagtagcctatcaaaccgcaagccgctcccagacctgtga

SEQ ID NO: 324162 - DNA, 546 bp, Pseudomonas aeruginosa
gtgaggtacgaaacggactgggagcgatgggcccggcaagtcaatgacagcatcaaccaccttgggcagcacatggaccagttccagaccttcaagaatcggtacgagttggacaagcaaatcgaagctgcgcagcagctaaatgacaagcacatcgccgccgccttcaattacaccaacttgattcttgtcgctggctatgcgggcttcttcgccttttggtcaacgctttcagaaaaggtgcccacccttctattctctatcaccggcctgctaatccttatttcgctagttctcttcattagctgggagctaatcaagatgtgctggggagcgctccacatgcgcaaagtggaccgtatcttggccggtcagaaaggcccccacgtgatagcacaatacgatgctgcccacgtcgactttgaacgcagatcacatcgggtgtggattttcttcctaatcccgacaaccatcacaggtctgggagcggcttgcggtttgataggctactttgcgcatgacctttgggtacaagtattgagctag

SEQ ID NO: 324163 - DNA, 477 bp, Pseudomonas aeruginosa
atgtcggcactgattgaagttgcgaagatcttcgggggcggcctgcttggcgtgctgtcgagttccgctttcttcatctggaaggaaaggaaggaggctaagaaagcggcggaagatgcatacagcgaggcgcttgccgccgctgccaaaaatcgcgaagtgactcgcgacggggctttgatgctttacgagatcatccaaagaatctcagcgatgccaccggagcagcacctgatcgaggtcaggaagaccttccagctggccgctgaaaacatcgccgaacccaatgcaactgccgccgacgagttctacacacaactctacgagcacagtggcgagatgtcgctggcggaggccaaatcctggctgaaacaagccaggcatttcctttccagcaacgaacttgcaaaccgttcaatgctgaagaaattggccttcgtggaagtcagccttgcgttgccgccgaagcgagaatga

SEQ ID NO: 324164 - DNA, 957 bp, Pseudomonas aeruginosa
atgcgaaacaacagagcaaacggctcagactttccaccgaatactggcaaaaattccgccgactctattggccagagcggcgcggcgggaaaagattcgcggaaaattacaaaaattgaccagaagaaaaagcgtatcgcgaagcttagagacctagatgaatcaagggctctggccggtcttgccacatcacttggctgcgattttgtagctataggggagtctctactctcttcccctaccagctctacccataccaagctgatcaaggacaccatcaggtcatggctgagagctagatactggggtgacgcaatgatcctggctgatagttaccaccttcctgcgcctgacagccttcctcagtggaaagcactaccagcagaggtagcccagttctttaagctgctgttcgttctggagcacccggacgccgttttcgtaacgatccgtttagacccggacattggcgagcgtgccttagcatctcctcgcgggccatgtgactggcttgcagagcgagttaaccgcgcgctgcgaaaggttggggtaactcctgagtatttggccttcagtatcgagtacgcgcccaggcaggccaaaacgctccataggctccatatccacggagcaatgcgcatccctatggaccttcgccagcacgccgcagaagcgctgaaagaagccctagcgccggcctacaccacgtacgggaagaaccaagcgatcaaacttgagaagccctggaaaacaacagacgtggcccgctatgcgcctaaggaagctgctttcaagacggaacaccgccttgttattgctcgcggtggaaaacgcggtagtagcgctcacagggcggctgaaacagccaccgttggaggccgaagtgcctaccgccagctcagtgaaattgtttacggaaactcattcagttacgcaggcctgccggacttttcgtga

SEQ ID NO: 324165 - DNA, 597 bp, Pseudomonas aeruginosa
atgagccgcaagaccaagccagacatcgaggctcaggctgtgatactgcgcgaagccggttattcgtgcccggcaatagccgcccagctcgacctatccctttcgaccaccaagcggatactcaaacggcggggcgctgttgctggcgctgcaaccgaagccctaattgagcaagctcggcagaacatgctcaacgccgcctttgatttggaaacggtgcaagggcaagccgcagcgctcgccctggaggacatcgcccttgcccggatgatcagggaaaagacggtggaaacgctcgaagcgctcgatcccagcaccagcacgccctatcagatgatgcgcacgaccgtagcagcggcaacggccctcgaccttacgcagaaggtcagccgtcgcgccctaccccttgaaaggctcgccgaggctacccacgttgagcagctttccgagctgcgcatccgaatcatgaccgacgaggacgttcgggtaatgcgagagcagcaacgcagggagtcagcagaacgcatcaccggcaatcccctactgaatgagcgaagccccgaggacgatgaggtggtggagctggtacacgagtag

SEQ ID NO: 324166 - DNA, 420 bp, Pseudomonas aeruginosa
atgcacaacctagtagaagctgcccgcaagttcatgcaatccgacaatggcagctattcccgcctagctgaccacctcaataacatcgcccctcgctccgacggttcacgttggacaaaagacgccgcttaccacttctgccggactcacggcatcaaatccaatcgcccctgtaagaatcagcctgctgccggatgcgcccaacgcgccagaactcggcagaacatcatcaacgccacgcttgaagccttgtccagacagggccaaaccattcatgacatcaccccggtacagctcaagaacatcgtaatgctgtcccgcgctccgctctacaacgtgcgcaacaactggcacgaactctcgaacgagctaaacgccctggccggcctcccgaaagcgctccgcatcatcgaggactga

SEQ ID NO: 324167 - DNA, 645 bp, Pseudomonas aeruginosa
atgtttgtccgtgcctaccttcgagcctctaccatcgaccaagatgccagccgagccagggcatctcttgaaagctttgctgaggagcatggcgtcaccatcgccaacttctacgaagagaacgagtcaggcacaaagctggagcgcccagagctgtttcggctgctcaatgactgccgcccgggcgacatcctgcttacggagcaagtagaccgactctcccgcctcaccgatacggactggaagaaactccggggcttgatcaatgagaaaggtgtgaccgtggtcgcgcttgacctcccgacatctcaccagctactaaccccctcgaaagccgacgctttcaccgggcgggtgcttgccgcaatcaatgacatgctgctcgatatgctggcggcagtcgcccggaaagactacgaagacagaaggcgccgaactgccgaaggaagggaaaaagccaaagctaacggtatgtataaaggacgccccgtcgatcaagagaaacatcgccgcatccatgaactactggccgaaggcaagtccatccgcaagattgcagacctcttgaactgttcaactcaaacagtatcgcgggctaagaaatccttacacatagaagccccgctaagtcaactggtcggctag

SEQ ID NO: 324168 - DNA, 843 bp, Pseudomonas aeruginosa
atggcggagtggaaccgtaacgaaaccttatggcgccaggggcttctccttgctagtgatgcggtggaagccctggggcttcaccacccggaatctcccgaacgaacactcgtcatagtagccagccacgattgcgaccttgcgcaatcccctgagaaagaaccagatattgaggttgtcataggacgccttgctctcgagaaagacggcaacagcacccacgcgaagaacgcccgcaagctgcatattgagttcacgggtgccgatactttctgggcggagttcgaagcaacagcaaagtcgaaagtcggcaagcttgagctaaacaggcatgccccccgctcaggggccacactgagcccagagtgccatgccgtctttcaaatgtggctggccagccgctaccgacggtccgcattcccagacgaattcgaacggcgcctgacctcaaaggacttcaaacttcacgagcggatatctaaggctgtgaagcctcatggcgatctcattgccggcgtattcttcgatgtggacgaaggggtagaaatcaaccgcaacggagcggacgacacctatacccttgatataattatcatgcactcagccgatcccaacttcgaagaagcggagaaagccgcagaaagtgcagctgccaccatcacccaggcatttaaggaaaaactgttttcccccacgagtacgtggcaacacattgagctgcgatcttgtgacgcggtatcggagtcggtactaacctaccaacagttcaagcagcttaagcgctggagactagagcacttgagtctggcagctgatccccagcagcccgtattagccgaatag

SEQ ID NO: 324169 - DNA, 636 bp, Pseudomonas aeruginosa
atgaacgcagcgatgccatacggtggctggtttgccgagcggccaacttcaaccggatcgacttccacattggttcgccttgcgggatggatggcctttgccggtgtggcgattgcaggcatcggcaccggaggagagctgttacccgagcacctacaacagagcgctaaaagtgcccagcacgtgacccgtgcagcggaggttgcagaaaccaaagtctctcgaacacctagcgggagcctgctgcgcatccgtgaggtattgaacccagccgtctccgacctagcagccacactcaacgtgtcgcggcaatctatctacaactggctcaatggagagcccgttgcagaggagaatgccgcaaagcttcatgaccttgctcaagctgcagacgtattggctcatgaaggcataccaatctcagcttctcttctgaagcgcaaatttgccaatggccgcacactactacaaatggctcaggctggagagtctgcccgggacgccgcactcatgctgatacagattcacaagcgtgaaactgctcagcgcgaacgcatgaatgcccgattcgcaaccagggcaaagacaccagcaagcgcagatttcgacttaccagcctccaacgatctttcctga

SEQ ID NO: 324170 - DNA, 792 bp, Pseudomonas aeruginosa
atgggaaagaaactgaccagcgcgccggtctactacacggtcgtccaagtgcagttcaatccagtcctggacctggaaggctacattcctgccattcagtccaagatgcgcgaggcgcattttcctgactatcagaaagaagtcttccagcagcttgttctgccgttcagcggaacagagcaagggcaaatggccccaccgactgtagcaccgcaatctcgctatcgttttggggatattggtggacgctctctattcatactggagacaaattcgctgtcgcttcagaccaccagctacgatacctacgaaaccttttccgagtcatttttgaaggggctgggcatactgaatgaggccttgcgcttggactttgttgcacgcataggcctgcgctatctggacgctgttcagcccgccgacggggaaacactacaggacttcctcatacctgaggtgctaggccttgcgacccgaatagacggcacacttcaacactcgctaagcgaaagcgtgctctcgactggagcaggacagttagtttcgcgagtcctcattcgccacgggcatgtcggccttcccatggagcttgccggctcagcaccggcaattgatcctcgctttacacagcgcgaaggcctgcatgccatcatcgatagcgatgcatccatcaatctgcgggaggctttcgacttagagaaggttagagcacaactcatcgcgctccatgacgaagtcgccaaagccttcaaagcgacaatcactgaccacgcctgggcctcttgggcataa

SEQ ID NO: 324171 - DNA, 1836 bp, Pseudomonas aeruginosa
atgtggggcatcgcttcggtgcccagcatgaaaccttccccctcctacctcacacgcaaccgacacggaaccttctacttccgcatcgtgatcccacgaccattgcgagccttgctccatggccagcgagaagtcagacgtaccctgaaaacagacagcgaaaggctggcgcgtaagcgtgcccggcaatatgtcgcgcgctacgaagccgtctttgacaaggtagtaaacatggttgagcgtgatgaactcggcctgaccgaggccgattacaaggagctgatggaactcctccccgatacaaagccgacgccggatttctccagcccgcaggacaaaaaccaaccagccgagcccattctttccgagaaggaagtcgaggcccgccagcgccgcagggaagtagagcgcctgctaactggcgcctatggtcgcccgatcccggtcgaacttaagcagacagcgcaacaactacttgaacttgctcgcccctaccaaacgacagagctgcgggccgctctgccaaagctcagagatgagctagcactacgaagcctcgcccctacgagcaccagcgcggcaccagcagcaagcattgaccccacaatggctagctggacgctttatcaggtgtggcagcatcagctagagcgtgacagagccgatagctctgcaaggggcggccaagccaaacatggcgggacgctggaggagcgcgagcggcgagcccgcgtaatgactgtgctgacaaaacatcagcctgtatgcctactcaagaaaagcgactggcaggcagcatacgacgctgctcgaaaaatgaaggcaggagccaaagcatcaattgatccgccgacgccgcttagcgagtttctaaccgacgatcctgcacagatgaccgggcatgagcgagtaagcgcccttatcggatccatgaaacagattcaggaacacgctcgccaccttgacctgactgacatcaggccggatgacttgataatcaagcccgtgcagaaacgtgagacgccacgtacacgaggtggccaagcattcacgatggcagaggtagaacgcattttctccggctacatctaccaagggactccaccagccaaccgaaccaaggcttaccctttctggttctggctccccctcattggctactttaccggcgcccgcaccaacgaaattgcccagctcgacactgccgacattcgcgagattgacggatatccctgcttcgacttctgcccagacgacccgaaagccttcgaggccaaacgagttaagaccgaggaggcccgacaggttccgattcacccacgcctgattgagctgggctttctcgactacgtaaacagccaactccagagcaagcagaagaagctgttcggcgacggactcacttacctaccgccaagaaacgacgagaccgaccacaacaaagaaggatgggcgaaagctgctagcaaattcttcaacgagagccccaaaggctatctcgtcgaggtaggcgtccacgtgccacatgacggcaaaagtctctactcatttcggcatacgcttgagacgaacctgggccatgccaaacgcgacggcaagccgattgatcagaccgtaatcgatgcgattaccggccatgcacctgagaccattgctggcaagcactacgatgccggcgccacgattgagcagaaactagcagcactcaagcttctacccgtgccggatgcagtccaaaggcttactagctacgaagttgactttgcatctcgatttggcgcaacgctcagcaagagcatcgagagccacagaagccggcaccctaggatgatctga

SEQ ID NO: 324172 - DNA, 834 bp, Pseudomonas aeruginosa
atggccagcaccacccccgaaggtctggagatccgcccgcgtcatctggacttcgacctgcccgatccgatgccgcgccattggcacagcggcgacgctttcaagacccacatgttcaacgccatgtcggtgctgttccccgatggcgagcgcttctttatcgactccgtgcgccactaccgcgaacgggtcgaggacccggcgctgaagcaacagatccgtggcttcatcggccaggaaggccaccacagccgcgagcacctagtctacagcgaccgcctgcgcgccctcggctacgacatcgaccgcctggaaggcggcgccaaacggcgcatccgcttcgcccagcagaaactgcacccgtcgcggcaactggcggccaccgcggccctggagcacctcaccgcgatcatggccgacggcctgctgagcaaccccaggtggctggaaggcgccgacccgaccatggcccgcctgtggcgctggcacgcactggaggaaaccgagcacaaggcggtggcctacgacgtgttcatgctggtcaacggcaaggccaggctgcgccgccgggcgatggtccagggcaccttcttcttcgccctcgacaccaccaagggcctggtccacatgctcaagcgcgacggcctgctgtggaacttcaaggtctggcgcgacggcatcaagtggctgtggggcaaggagggcgtgttccgctcgctggtgggcgtgtacctggacttctacaagaaggacttccacccctggcagcacaataacctgcacctcatcgagcagtaccgcgaccaattcgaaccggaaccgaaggccgcctga

SEQ ID NO: 324173 - DNA, 483 bp, Pseudomonas aeruginosa
atgagtgcctttcacgatctcaccctgcaggggttggatggacaggacctgccgctttccccgttcaagggcaaggtgctgctggtggtcaatgtcgcctccaaatgcggcctgacaccccagtacgccggcctggagaatctctaccagacctaccgcgagcgcggtttcgcggtgctcggcgtgccctgcaaccagttcgccgggcaggagccgggcagcgaggcggatatccagtccttctgcagcctgaactatggcgtcagcttcccgatgagcgccaaggtcgaggtcaacggcagcgcgcggcatccgctctatcgcctgctggcgggcgagggcgcggagtttcccggcgacatcacctggaacttcgagaaattcctcctcggtcccgacggtcgcgtgctggcgcgtttcagcccgcgcacggcgccggacgacccggccctggtgcaagccatcgagaaggccctgggttga

SEQ ID NO: 324174 - DNA, 591 bp, Pseudomonas aeruginosa
atgactagcaaccgactcgacaagcgcgaactgatcctggccaagggctccgaggtcatgacccgacgtggctaccacggcaccggggtgctggagatcgtccaggccgcgcgcatccccaagggctctttctatcactacttcgatagcaaggaagctttcgcccagcaggccctggagcacgtctacgcgccgcgcctggcgcgctacgcccaggccctcggcgatagccgcttcagcccgtgcgagcgggtgctgcgctactacggcgagctgctggagcacttcgcccgccaggaaaagcccgaataccactgcttcatcggcagcctgagcttcgagatggccgagctgtcgccgccgatcgcggccaaggtcgagtcgatcctgcaggcttccgcgcgaatcctccaggactgtctggagcaggcgcgcgaggccggcgaactggccgccgacgaggactgcgcgagcctggccggcttcatcggcttcgcctggcagggcgccctggcgcgcttcaaggtcggcgccggcctcgctccgctgaatgctttcatgtcgcgcctggagctgctgctccgcgcctga

SEQ ID NO: 324175 - DNA, 1353 bp, Pseudomonas aeruginosa
atgaccgactacacccagcaactcgccggctttctcgccggcctgcgctaccaggacctgccgccggcggtgttggcgcggatggaagaattgttcctcgactggctcggctcggcgctggccggcaagggccagcatccgatcccattgttcgagcgctacgccgaacgcatgggcccggccgatggtagcgcgcagatcctgcccagccggcggcgcagctcgccgtatttcgccgccctggtgaacggcgcggcttcccacgtggtggagcaggacgacctgcacaacagctcggtgctgcaccccgcggcggtggtcttccctgctgccctggccgcggcccaggacctcggccgcagcggcgccgagctgatcctcgcggcggtggccggctacgaggccggcatccgcatcggcgaattcctcggccgttcccactaccgggtgttccataccactgccacggtcggcaccctcgccgcggcagtggcggtgggcaagctgatggacttcgaccgcgagcgcttcgtcgacctgttcggcagcgccggaacccaggccgccgggctctgggagttcctccgcgacgccgccgattccaagcagttgcataccgccaaggccgccgccgacgggctgctcgccgcctatctcaccgccgacggcctgagcggcgcgcgacacatcctcgaaggcgagcaggggatggccgccgggatgtccagcgacgccgaccccgagcgcctggtggatcgcctcggcagccgctgggcgttgctggaaacctcgttcaagttccacgcctcgtgccgccatacccatcccgcggccgacgcgctgctggcgctgatgcagcgcgaagggctcgatcactcgcagatcgccgcggtcaccgcgcgggtccaccagggcgccatcgacgtgctcggccgggtggtcgagccgcagaccgtgcaccaggcgaagttctccatgggcaccgtgctgggcctgatcgccgtgtacggcaaggccggcctcggcgagttccatcggcatgcgctgagcgacccgcgggtcgcagcgttccgcgagcgggtcgagatgcgcctggacccggaggtcgacgccgcctatccgcagcgctggctcgggcgggtcgaagtactggatcgcgaagggcggcgccataccgccgccatcgacgaacccaagggcgatcctggcaataccctcagccgcgacgagctggccgacaagttccgccgcctgctggcgttttccggcgcggccaccggcgccgaggcggagatccttatccagcgcgcctggggcctgcgtcaggcgccttccgtaacgcccctgatctga

SEQ ID NO: 324176 - DNA, 1203 bp, Pseudomonas aeruginosa
atgacgcaatcccaccagccgcgcccgcttgacggcatcaccgtggtcagcctggagcacgccatcgccgcgcccttctgcacccgccaactggccgatctcggcgcgcgggtgatcaagatcgaacgccccggcgtcggcgatttcgcccgcggttacgacgagcgggtcaacggcctgtcgtcgcacttcgtctggaccaatcgttccaagcagagcctcagcctcgatctcaagcaggccgaggcgctgccgttgctggagaagctgctggccggcgccgacgtgctggtgcagaacctcgcgccgggcgccgccgcgcgcctgggcctgtcctacgaggcgttgcgcgagcgcttcccgcgactgatcgtctgcgatatctccggctacggcgaaggcggtccctacgagaagaagaaggcctacgacctgctgatccagagcgagggcggcttcctttcggtgaccggcggcgccgggccgaacgagatggccaaggccggctgttcgatcgccgatatcgccgccggcatgtacgcctacagcagcatcctttcggccctgctgctgcgcgagcgcaccggcgagggcagccgcatcgacgtgtcgatgctggagagcctggtggagtggatgggctacccgatgtactacgcctaccaggacgcgccgccgccgccgcgcgccggcgcttcgcactcgaccatctacccctatgggccattccccgccggcgacggcggcacagtgatgctcggcctgcagaacgagcgcgagtggcgggccttctgcgacaaggtcctgcgccgcccggagctggccgacgacgaacgcttctcggcgaacttcaagcgctcggccaaccgcgaagagctgcgtgcgctgatcgtcgaagccttcgccgccttgccggccgccgaggtggtggcgcgcctggaacaggcgcagatcgccaacgcccacgtcaacgacatggccggggtctgggcgcacccgcagttacaggcgcggcaacgctggacctccatcgacagcccggccgggcgcctgccggcgttgttgccgccggccagcagcagcgccttcgttccgcgcatggatgcggtgccggcgctgggcggcgacagcgacgcgctgcttgccgaactgggctgtaccgcggccgatatccagcgcctgcgcgcgaccggaacggtatga

SEQ ID NO: 324177 - DNA, 996 bp, Pseudomonas aeruginosa
atgttcaagacgatggtacgggcgctgttgtgcgccctggcgatcggtggctcctgcctggcgaatgccgcgcagccgatcgtcatcaagttctcccacgtggtcgcggaaaacacgcccaaaggccagggcgcgctgctgttcaagaaactcgtcgaacagcgcctgggcggccgggtcgaggtagacgtctatcccaactcgtcgctgttcggcgacggcaaggaaatggaggcgctgctgctgggcgacgtgcagatgctggcgccgtccctggccaagttcgagcagtacacgcgcaaggtgcagatcttcgacctgccgttcctcttcgacgacatccaggcggtcgaccgcttccagcgcagcccgcaggggcgcgccttgctgaccagcatgcagggcaagggcatcctcggcctggcctactggcacaacgggatgaagcagctctccgccaatcgcccgttgctggagccggaagacgcgcgcgggctgaaattccgcgtgcaggcgtccgacgtgctcaacgagcagttccgccagctccgcgcgatctcccggaagatgtccttcgccgaggtctaccagggcttgcagaccggcgtggtgaatggcaccgagaacacctggtcgaactacgagagccagaaggtcaacgaggtacagaagtatttcaccgagtccaaccacggcttggtggactacatggtgatcaccaacgcgaagttctggaatggccttccggcggacatccgcgaagaactgcagcggatcatggacgaggtcaccgtgcaggtgaacctcgaggccgagcgcctcaaccgcgacgcccgccagcgcatcctcgccagtggcgccagcgagatccataccctgagcccgcagcagcgcgccgactggcgccaggcgatgcagccggtatggcagaaattccgcggcaatgtcggtgccgatctgctccaggccgccgaagcttccaaccgtcccgattga

SEQ ID NO: 324178 - DNA, 639 bp, Pseudomonas aeruginosa
atgaatcgactcgtgcgcgtctggaaccgcttcgaggagggcgctatcgccttcctgctggcggcgatgacgctggtgaccttcctctatgtggtgatgaccaacgtcttcaccctgttctacgacctcggcgaccgcctgccgacactgcgggctccgctgtactcgatgggcgacgcgatcctcggggtagcccaggatatgtcctggagcaacgcgctgaccaaggcgctgttcggctggctgatcttcctcggcatcgcctacggcgtacgcaccgccggccacctcggggtggatgccctggtgcgcctggcgccgcgtcccttgcagcgcctgatcgggatactcgcctgcctctgctgcctgggctacgccgggctgttcatggtcgccagctacgactgggtgaagaccctgttcgtcgccggcatcggcgccgaggacctcgaccacttcggcatcctccaggcctacatcgcggtggtggtgccggtcggcttcggcctggtgctgctgcgctacctggaaatcctcgtcaacctgttgcgcggtcgccagctcgggctgggcctcgccgacgaggccgccgaggcctccaaactggccggcgaagaggccggggagaaccgtccatga

SEQ ID NO: 324179 - DNA, 1956 bp, Pseudomonas aeruginosa
atgtctgcggcatccctgtaccccgtgcacccggaagcggtggcacggaccttcaccgacgaagccacctacaagacgatgtaccagcagtccgtcgtcaaccccgacggcttctggcgcgagcaggcccagcggatcgactggatcaagccgttcgagaaggtcaagcagacctccttcgacgaccatcacgtggacatcaagtggttcgccgacggcaccctcaacgtgtcgcacaactgcctcgaccgtcacctcgccgaacgcggcgaccaggtggcgatcatctgggaaggcgacgatcccgccgaccaccaggaaatcacctaccgccagctccacgagcaggtctgcaagttcgccaacgccctgcgcgggcaggacgtgcaccgcggcgacgtagtgaccatctacatgccgatgatccccgaggccgtggtcgccatgctcgcctgcacccgcatcggcgcgatccactcggtggtcttcggcggcttctcccccgaggccctggcaggacgcatcatcgattgcaagtcgaaggtggtgatcaccgccgacgaaggcgtgcgcggcggcaagcgcactccgctgaaggccaatgtcgacgacgccctgaccaacccggaaacctccagcgtgcagaagatcatcgtctgcaagcgtaccggtgcggagatcaagtggaaccagcaccgcgacgtctggtacgacgacctgatgaaggttgccggcagcacttgcgcacccaaggaaatgggcgccgaggacccgctgttcatcctctacacctccggctccaccggcaagccgaagggcgtgctgcataccaccggcggctacctggtgtacgcctcgctgacccacgagcgggtcttcgactaccgtccgggcgaagtctactggtgcaccgccgacatcggctgggtcaccggccacacctacatcgtctatggcccgttggccaacggcgccaccaccattctgttcgagggcgtgccgaactaccccgacgtgacccgcgtggcgaaaatcatcgacaagcacaaggtcaacatcctctacaccgcgccgaccgcgatccgcgcgatgatggccgaaggcaaggcggcggtggccggtgccgacggttccagcctgcgtctgctcggttcggtgggcgagccgatcaacccggaagcctggcagtggtactacgagaccgtcggccagtcgcgctgcccgatcgtcgacacctggtggcagaccgagaccggcgcctgcctgatgaccccgctgccgggcgcccacgcgatgaagccgggctctgcagccaagccgttcttcggcgtggtaccggcactggtggacaatctcggcaacctgatcgagggcgccgccgagggcaacctggtgatcctcgactcctggccgggccaggcgcggaccctgttcggcgaccatgaccgcttcgtcgacacctacttcaagaccttcaagggcatgtacttcaccggcgacggcgcgcgccgcgacgaggacggctactactggatcaccgggcgggtcgacgacgtgctcaacgtctccggccaccgcatgggcaccgccgaggtggaaagcgcgatggtcgcccacccgaaggtcgccgaggcggcggtggtcggcatgcagcacgacatcaaggggcagggcatctatgtctacgtcaccctcaactccggggtcgagccgagcgaggcgctgcgccaggagctgaagcaatgggttcgccgcgagatcggtccgatcgccacgccggatgtgatccagtgggcgccgggactgccgaagacccgttcgggcaagatcatgcggcgcatcctgcgcaagatcgccgcggccgagtacgacaccctcggcgacatctccacccttgccgacccgggcgtggtccagcacctgatcgagacccatcgctcgatgcaggccgcctga

SEQ ID NO: 324180 - DNA, 780 bp, Pseudomonas aeruginosa
atgaagaagctcgcacttctcggcgccctggcgctgtccgtgctctccctgcccactttcgccgccgacaagccggtgcgcatcggcatcgaggcggcctacccgccgttctcgctgaagaccccggacggccagttggcaggcttcgacgtggatatcggcaatgccctctgcgaagagatgaaggtgcagtgcaagtgggtcgagcaggagttcgacggcctgatcccggcactcaaggtgcgcaagatcgatgcgatcctctcgtcgatgaccatcaccgacgagcgcaagcgttcggtcgacttcaccaacaagtactacaacaccccggcgcgcttcgtgatgaaggaaggcgccagcctcaacgatcccaaggccgacctgaagggcaagaaggccggcgtgctgcgtggcagtaccgccgaccgctacgcctccgccgaactgaccccggccggcgtcgaagtggtgcgctacaactcccagcaggaagccaacatggacttggtggccggtcgcctcgacgcggtggtcgccgactcggtgaacctcgaggacggcttcctcaagaccgatgccggcaagggttacgccttcgtcggtccgcaactgaccgatgccaagtacttcggcgaaggcgtcggcatcgccgtgcgcaagggcgatagcgagctggccggcaagttcaacgcggccatcgacgcgctgcgcgccaacggcaagtacaagcagatccaggacaagtacttcagcttcgacgtctacggttcgaactga

SEQ ID NO: 324181 - DNA, 690 bp, Pseudomonas aeruginosa
atgatcactggctacggtgcgaccatcgtcgatggcgcctggctgactctccagctggctctgctttccatgctcctggccatcgtcctcggcctgctgggcgcggccttccgcctgtcgccggtgcgctggctggcctggtgcggcgacctgtacgccacggtagtgcgcggcatccccgacctggtgctgatcctgctgatcttctacggcggccagggcctgctgaactgggtcgccccgcaactcggctacgacgactacatcgacctgaatcccttcgtgtccggcgtcggcaccctcggcttcatcttcggcgcctatctctcggagaccttccgcggcgccttcatggcgattcccaaggggcagggcgaggccggctacgcctacggcatgagccaccgccaggtgttcttccgcatccaggtgccgcagatgatccgcctggcgatccccggcttcaccaacaactggctggtgctggtcaaggccaccgcgctgatttccgtggtcggcctgcaggacatgatgttcaaggccaagcaggcctccgatgcgacccgcgagccgttcacctactacctcgccgtggccggcctgtacctgctggtgaccagcgtgtcgctgctattgctgcgcctgctcgaacgccgctattcggtcggcgtgaaaaccgcggaactgtga

SEQ ID NO: 324182 - DNA, 699 bp, Pseudomonas aeruginosa
gtgatcttcgatttctccgtcatctgggacagccttccgctctatttcgacggcctgctggtcaccctcaagctgctctcgatctccctgctgatcggcctgctgctggcggtgccgctagcgctgatgcgggtctccaagcagccgctggtgaacttcccggcctggctctatacctacgtgatccgcggcacgccgatgctggtccagctgttcctgatctactacggcctggcgcagttcgacgcggtgcgcgagagcgcgctgtggccctggttgtcgaacgcctccttctgcgcctgcctggcgttcgccatcaacaccagcgcctataccgccgagatcctcgccggcagcctgaaggccacgccccatggcgagatcgaggcggccaaggcgatgggcatgtcgcgcctgaagatgtaccgccgcatcctcctgccgtcggcactgcggcgcgccctgccgcagtacagcaacgaagtgatcatgatgctgcagaccaccagcctggcgtccatcgtcaccctggtggacatcaccggcgccgcgcggaccgtctactcgcagtactacctgccgttcgaggcgttcatcaccgctggcctgttctacctgtgcctgaccttcatcctggtgcgcctgttcaagcttgccgagcgccgctggctggcctacctggcgccgcgcaaatcctga

SEQ ID NO: 324183 - DNA, 1113 bp, Pseudomonas aeruginosa
atggagcgtatcgaccacctgctgccgtggagcaccctgggaagcgagaagcgcctgagcgtgttccgcttcggctgcggcgcgcgcaaggtctacatccagtccagcctgcacgccgacgagctgccgggcatgcgcaccgcctgggagctgaagcagcggttgcgcctgctggaggcggaaggccgcctgcgcggcaccgtcgagctggtgccggtggccaatccggtcggtctcgggcagatgatccaggcgctgcaccagggacgcttcgaaatgagcagcgggcgcaacttcaaccgcgatttccccgacctgctggacgcggtgatcgacagcgtcggcgagcgtctcggcagcgatccggcggccaatgtcgcgctggtccgccagaccctgcgcgcggcgctggacgccctgccgccggcgacctcggaactggagggcatgcagcgcctgctgtatcgccacgcctgcgacgccgacctggtgctcgacctgcattgcgacttcgaggccgccatccatctctataccctgccgcagcaatggcccgccttcgcctccctggccgcacgcctgggcgccgctgtcgggctgcttgccgaggagtccggcggcggttccttcgacgaggcctgctcggtgccgtggctgcgcctgtcgcgcctgtatccgcgcgccgagctgccgctggcctgcctggcgaccaccgtcgaactcggcggccaggccgacaccaccgtgcagcaggccgaggccaacgccgcggcgatcctggccttcctcgccgagcagggcttcgtcgagggcgaatggccggcggcgcccgaagcctgctgcgaaggcttgcccttcgagggcaccgaatacgtccacgccccgcataccggcgtggtgagtttcctgcgccggccgggcgaatgggtggaggcgggcgaaccgctgttccaggtcatcgatcccctggccgaccgtgccagcaccgtgtgcgccggggtttccggcgtgcttttcgccatcgaacggatgcgctacgcgcagccgggactctggctggccaaggtggccggtcgtcaaccgatccgtcagggacgcttgctcagcgactga

SEQ ID NO: 324184 - DNA, 765 bp, Pseudomonas aeruginosa
atgtacaaactggaagtccaagacctgcacaagcgctacggtagccacgaggtgctcaagggcgtctcgctggcggcgaaagcgggcgacgtgatcagcatcatcggctcgagcggttccggcaagagcacctttctgcgctgcataaacctgctggaacagccgcacgccggcaagatcctgctcaacggcgaggagctgaagctggtgcccggccgcgacggcgcgctgaaggccgccgactcccgccagttgcagcgcatgcgctcgcgcctgtcgatggtgttccagcatttcaacctgtggtcgcacatgagcgccctggagaacgtcatcgaggcgcccgtgcatgtgctcggcgtgtcgaagaaggaagccatcgagaaggccgagcactacctggccaaggtcggcgtggcgcaccgcaaggacgcctacccggcgcacatgagcggcggcgagcagcagcgcgtggcgatcgcccgggcgctggcggtggagccggaagtgatgctgttcgacgagccgacctcggcgctcgaccccgaactggtgggcgaagtgctgaaggtcatgcaggacctggcccaggaaggccgcaccatggtggtggtgacccacgagatgggtttcgcccgcgaggtgtcgaaccagttggtgttcctgcacaagggcctggtcgaggaacacggctgcccgaaggaagtcctcgccaacccgcagtcggaccgcctcaagcagttcctctccggcagcctcaagtaa

SEQ ID NO: 324185 - DNA, 1308 bp, Pseudomonas aeruginosa
atggccaacatggagttcggcttcggcgagggcggctaccagccgtccgagttcatcaagaggcagcttccccaaggcacgttcgacctgctcatcgccgacgaggcgcacgagtacaagaacggcggctccgctcagggccaggccatgggggtgttggcggccaaggcgcgcaagacgctgctgctcaccggcacactgatgggcggctacggcgacgacctgttccacctgctgttccgagccctgccggggcggatgatcgaagatggctaccggccgacgaagagcggcagcatgacgtcggccgcgatggcgttcatgcgcgatcacggggtgctcaaggacatctattccgagagcaccggcacggcgcacaagacagccaagggcaccaaggtatcggtgcgcacggtcaaggcgccgggtttcggtcccaagggcgtgctgcgttgcgtcctgccgttcacggtcttcctcaagttgaaggacatcggcggaaatgtgctgccgccctacgacgaggagttccgcgaagtcgcgatggacacggcgcaagctgcggcctatcgcgatctggcgggtcgcctgacccaggagctgaagcaggccctggcgaagcgcgacacgacgctgctcggtgtggtcctcaacgtgctgctggcctggccggactgctgcttccggtcggaaacggtggtgcatccacgcacgcgcaacaccttggcgttcgtgccggctcagttcaacgagctggaggtgatgcccaaggaacgcgagctgatcgagatctgccggcaggagaaggcagaaggtcgcaagaccctggtttattcagtctataccggcacgcgcgacaccacgtcgcgtttgaaggtgctgctggagcaggaaggcttcaaggtggcggtgctgcgcgcgagcgtggatgcctcccgccgggaagattggatcgccgagcagttggaccgcggcatcgacgtgctcatcaccaatcccgagctggtgaaaaccggcctagacctgctggagttcccgaccatcgtgttcctccagtccggctacaacgtgtattcgctgcagcaggccgcccggcgctcctggcgcatcggccagaagcagccggtgcgcgtggtctacctgggctacgccaactcctcgcagatgacgtgcctggggttgatggccaggaagatcatggtctcgcaaagcacgtcgggagacgtacccgagtcgggcctggatgttctgaaccaggatggtgattccgtcgaggtcgccctggcccggcagcttgtcacggtctga

SEQ ID NO: 324186 - DNA, 570 bp, Pseudomonas aeruginosa
atgcaaccatccatccgcgctgttcaccgcctggccctcgccgctggcttgctggccggcagcctgttggccgccggctgcgccacgaccgccgcgccgtctgcgccagcggtgccggccgcatcgccaaccgccgtcgcgccggagccgggtttcgttccggtggcccgctacggccgctacaccctggtcgagctggtgccggaacctgcgcagcgtgatctcatgcaacaggcggtggaggtctcgattccgcccatgctcgatgccagcgtgggcgatgccatgcgccatgtgctcctgcgctcgggctaccggctctgcgatgcgcccgaggccgccatgctctacgcgctgccgctgcccgccgcacacctgcgcctgggcccgctgatgctgcgcgatgccttgctgacccttgccggccccgtctgggagctgtcggtcgatgacttgacccgccaggtctgcttcagccggcacggtgctcccaccttcctttccgccaacccgcccggcaccgccacgcccgtaccggacgccgaccggcccggggagatgcagccatga

SEQ ID NO: 324187 - DNA, 648 bp, Pseudomonas aeruginosa
atgacctttccccaagcgccatccgagcgcaattcccgcacgcgctggctcaaggtcgccgcggccttctggctggtcctcatcagtgccgtggcactcgtcaacagcgtcggcctgtcgcggctcgccgaacagacccagagcagcgcacaggatgcgcaggtcaatgcgctgggcctgcgcgtggccgatctcgaacaacaggccgatgcggacaagcgccggccggcgccgatcagccaggccgaattcgccaccgcgcggcaggcgctggacgaacggatgacgcgcctcgaagaggcggaggaggccagggccctggccgtcgacctgcagacgctgcaggcgcgcgtgaacggaatcgaaacccgcctggagaaggcccggcaggtggcatccgccgctcgcccgcgcattccggttgcgacgaagcccaaggtgccggagccgccgttccgggtgctgggcgtggagctgcgtggcggcgagcgctttctgtcgatcacctccaccgccgcggcctcgcttgcgggcgcccggctgctgcgccagggcgatgccgagggcggctggcaactgcagtccatcgaggcgcaggcgggcgtgttccaggtgaacggccagacgcagcgcgttgcggtgccgtag

SEQ ID NO: 324188 - DNA, 720 bp, Pseudomonas aeruginosa
atgaacctgcggccgttgctcgctaccgtcgttctgttcgccgctttcggcgcatccgcccagccggccccggtgacgaactcgcgcatggtgcccgcccaggtgcagccgggcgctgatgccgcgctcgacgagaggcaggcgcgggagtgggggcttcagcccgaggagtgggcacgttaccgccaactgatgcaggggccgctcggggtctattcgccccagctcgatccgctcacggcgctgggcatcgaggcccgcagcgacgaggagcgcaggcgctacgcggagttgcaggtgcaggccgaggcccagcgcgtcggcaagacgctggcctaccagcgcgcctacgacgcggcgtggcagcgcctgtttcccggccagccgcgcgtgagcctgcccggcgccaaggcgcagggtgccggcaacaccggctccgggcgcctggcggtcttcgtcaaggccgactgcgcaccgtgcgcgcagcgcgtgcagcagttgcaggcggccggcacggccttcgatctctacatggtcggcagccgtcaggacgacgcgcgcatccggcagtgggccacccaggcgggcatcgacccggccagggtgcgcgcccgcaccatcacgctcaaccacgatgcgggacgctggctgtcgctcggcctgcccggcgatctgccggccgtggtgcgcgaggtgaacggccaatggcagcggcaatag

SEQ ID NO: 324189 - DNA, 621 bp, Pseudomonas aeruginosa
atggcagcggcaataggtgctccgggccgggagcaccggccgtcccgcgtcgccatccgctgcaccagcgccgcgctgctgctcaccaccgtcggctgggcgctggccgccctggcgcgggaagtgccgccgccggcctatcaactggcggcgcatcgtgcagacgtgccggcggccgtgctgtacgcggtggccttgcaggagagcggcgccatgctgcgcgggcgcctgatcccctggccgtggacgctcaacgtcgccggctcgccacagcgctacgccacccgcgtcgaggcctgcgcggggctgcaccgtgcgctcgcccacacgccggccaatcgcatcgacgccggcctcggccaggtcaatctcggctaccacacgcatcgctacacgcagccctgcgagctgctggacccgtaccgcaacctcgccatcgctgcggaaatcctgcgcgaacagcacacgccgggcgaggactggctgcttgccatcggccgctaccaccggcccgccggcggggcacccgcggcgcgataccggcgcagtgtgcatcggcacctgacccgcgtactcgaccccggcgttcccgttccaactctccaggccaccacgccatga

SEQ ID NO: 324190 - DNA, 534 bp, Pseudomonas aeruginosa
atgaaccacaccgtcctcatcgccgccatcgggctgctgtccacgaccaccatcttcgcccagaccgtctccgggccgctgatcgtcgtcgaagaccgcggcggcgactccgcgctgccgtactaccagtcgctgaatcctcagccggatcaggccacgccgccggccccgatgccgacccctcgcgcgggcaacacggccgacgccgaagccgccatgctgccggtgcgctcgacgcaactgtcgccgggcgaggtgcagcgccgcgtcatccgggcgccgggcctgacggcgctgttcctgatcggcgacgacgagcgttcgcgcgcctggctgcggcagcggcaggcggcgctgcgagagctgcaggccgtgggcctggtggtcaacgtggagtcgatggctgcgctgacggcgctgcgcaggctggcgcccggcctgatcctgtcgccggcctccggcgatgacctggcccagcgcctgggcctgcgccactacccggtgctcatcacggccaccggtgtcgagcagtag

SEQ ID NO: 324191 - DNA, 2157 bp, Pseudomonas aeruginosa
atggcccaaccgcatgcggtcgaggtcttgctgcggccagcggtggagctttataccgtggcggtctgcaccggcgccgcgattctgtgcctggtggcaccgtggtcgctcgcgctgaacccgctgctcggcctgggctcggcgctggccttcctgaccttcggcgcgattcgcctgcgcgatgcctgggcgatcctgcgctatcgccgcaacatccgccgcctgccgcgctacgtgatgaccagccgcgacgtgccggtgagtcagcaacggctgttcgtcggccagggctttcgctgggaacagcggcacacgcaccggctgatgcagacctatcggccggagttccgccgctacgtcgagccgacggcgatctaccgggccgcccggcggctggaggagcggcttgagttcgcgccgtttcccgtctcgacgctggcgcgcgcgttggcctgggacagcccgctcaacccggcgcgaccactgccgtcggtcggcggactgccacgcctgcatggcatcgagccgcacgaggtcgacgtcaccctgccgctgggcgagcgcgtcggccacaccctggtgctgggcaccacgcgcgtgggcaagacgcggctggccgagctgttcatcacccaggacatccgccgcaaggtccgcggcgagcacgaggtggtgatcgtcttcgaccccaagggcgatgcggacctgttgaagcgcatgtacgtcgaggccaagcgcgccgggcgcgaaggcgagttctacgtcttccatctgggctggccggacatctcggcgcgctacaacgccgtgggccggttcgggcggatctccgaggtggccacgcggatcgccgggcagctctccggcgaaggcaacagcgccgcgttccgcgaattcgcctggcgcttcgtcaacatcatcgcgcgcgccctggtcgagctggggcagcggccggactacctgctgatccagcgccacgtcatcaacatcgacgcgctgttcatcgagtacgcccagcactacttcgccaagaacgagccgaaggcctgggaggtcatcgtccagctcgaagcgaagctgaacgagaagaacatcccgcgcaacatgatcgggcgcgagaagcgcgtggtggccctcgaacagtacctgtcccaagtgcgcatctatgacccggtgctcgacggcctgcgcagcgccgtgcgctacgaccggacctacttcgacaagatcgtcgcttcgctgctgccgctgctggagaagctcaccaccggcaagatcgcgcaactgctcgcaccgaactattccgacctgtccgacccgcggccgatcttcgactggatgcaggtcatccgcaaacgcgcggtggtctacgtggggctggatgcgctgtccgacgccgaagtcgcggcggcggtgggcaactcgatgttcagcgatctggtctcggtcgccggccacatctacaagttcggcgtcgacgacgggctgcccggcgccgcggcgggcgccaagattccgatcaacgtccacgccgacgaattcaacgaactcatgggcgacgagttcattccgatggtcaacaagggcggcggtgccggcgtgcaggtgacggcctacacgcagaccttgagcgacatcgaggcccgcatcggcaatcgtgccaaggccggccaggtggtcggcaacttcaacaacctgttcatgctgcgcgtgcgcgagaccgccaccgccgagctgctgacgcgacaactgcccaaggtcgaggtgtacgccacggcgctgatgagcggcgccaccgacagctccgatccgcacggcaataccgcgttcacgtccaacacccaggaccgcatcagcagcaacagcgtgccgttgatcgagccggcgcatgtggtggcgctgcccaaggggcagtgcttcgcgctgaccgagggcggcaacctctggaaagtccgcatgccgctgcctgcgcccgaccccgacgaagccatgccgaaggatctgcaggagctggccggctacatgcgacagcactacgtcgaggcaggagactggtgggagaaccaaggcatccccggcctgcaggacaaggcgctgcccgacgacctgctggacgacttcaagcagatggccgcggctgaagaggccgaagcatga

SEQ ID NO: 324192 - DNA, 750 bp, Pseudomonas aeruginosa
atgagcgatccggccgtcgcggcccaacgccagcagcaacgacagcaaggcctgatcgccggcctggtcacgctgccgttccgcttcttcggcgtgctgtgcggcgcgctgctgctgtgcatcctgatcgaatgcgtcggcatgcacttcttctggcccgagcagggctggcgccacgcgcagggcatgctgcactacgagctggatcagctttccacgcatttcacccgcagcgcgctggtgcaggagccggggcgcaccgcgcaccggctggtcgagcagggctacgactggctgttcgtgaaaagcggtctgctggactggatacgcgacgcctcggcgcaggccagcgccggcagccatcgtccgaccaaggatttccgctactacatcggcttggtctatgtgaacgtggagagctacctgatcgcggcggcctatacgacgctggtcttcctcgtgcggctgctggtgctgtgcctgaccctgccgctgttcctgatggccgccttcgtcgggctggtggacggcctggtgcgccgggacatccgccgcttcggcgcgggacgcgagtcggggttcatctatcaccgcgccagggccagcctgatcccgctggccgtgctgccgtgggtgacttacctggcattgccggtcagcgtgaacccgctgctgatcctgttgcccagtgccgcattgctcggcgtggcggtgtgcattgcggcggcgacgttcaagaagtatctgtag

SEQ ID NO: 324193 - DNA, 2628 bp, Pseudomonas aeruginosa
atgcagaagcccgccgcacagcaaaagaccgtcctggaaacgattctggactggtcaaaggatcgcccactctggcagcgtgacgccctgcgccgcatcatcgcaaacggccgtctaacggacgccgatatcggcgaactcgtggacctttgcaaacaaggcaaaggtgcccccgtaggcgcgctgaaagcggtaccgctggagaaggcccaccttccggccaaccccggtcagaccgcggcggtatcgcttctgtcgattgccgacgtgaccggtgtgaacaaccttgccgccggtcagaccctcggcttggagccgaatggaatcacgatcatctacggcgacaacggtgcgggcaagtccggctacgcacgcatcctgaagcgcgcatgtcgtgcaaggcatgccggaaagatcgaacccaatgtgtatgccgatcagcccccgaagcgcgtcggcgcgaacatcgagtacggggtcggcggtgtgccgcagccggtcgaacagtggcagaacggcgcaaatccgcatgcaacgctgtctgcagtgagcgtgttcgatagcgactgcgcctcagtgcatatccgcgagaagaacgaggttgcattccggcccttcggtctggacgtaccggatgagcttgctgcagcctgtcaggcggtgaaggatgccctcgcggctgaacaaaagcagcttgagaaggcccgcaatccgatctttgcggcgccgacctggaaggccaccacggccgtggggaaggcgcttgccgcgctgaacgccaatacagacgcaaagaagatcgaagcgttggcggcgctctcggcagacgaaagcgtccgtcttgagcgtctgcgggaagacctgtcgaagaatccgaccaaggcagcggcggaacaggccgtcaaagccgacaacgtcatgcggctgattaccgcggtgaacagcgttgcagccaaaaccaccgatgaggaactgctgacggccgcggccctcgccagggacgcacggtcgaaacggggcgccgcacgtcttgccgcggagaaggccttcacgggcgaaccccttgccggcgtcggcggcgagacatggcgggcgctatgggattccgcccgacgctactcgacggagatcgcataccccggacagccgtttccgccgtcggccgaagacgcgcattgcatgctttgccagcagccattggaagctgaggcacgtgcacggatggtgcgtttcgaggatttcatacagaaggacacggaacagcttgcacgcgaggcagagaaggcagctcagaccgcacgtcagaccatagctgccggggcaatcggcacgcgggcggtgaaggccagtcttgacgagctgggccttcagaatgaagtgctgcagcagcagacgcgccgcttcatcgccgcagcccggctgcggcgccacgttctgctcaaagccctgggcggaaacggcgaggtacagcttccgcccgttccaccgtcgccgctgcctgatctcggccagcttcagactacgatccgcgactacgccgcggagctgcgcaagtcggctgacgcagatgaacgcaagaagctcgaagccgatttcgccgagctgagcgaccgggcgctgctcgccggcatgctgccggtcgtcactgacgaaatccagcggctgaagaccatccggtttctgaccgagtgtgcgggcgacacggcgacgaacacaatcaccaagatgggcaatgacattgccgacaccgtgattacgcctcggctgcgcgacagatttcaggaagagattgtcaggcttgcggcgtcgaaggttcgcgtcgaaatcgtgcgctccggcggcaagtacggctcaccgcagtatcaggtgcgcctcttcgccaagccggatgccaaggtccacgaaatcctgagcgaaggggaaaagacctgcgtggcgctggccgccttcatgaccgagcttgccaccgcgatgcaccgctctgctctggtcttcgatgacccggtgtcctcgttggaccatcgctggcgtgggcaggtggccaagcgtctcgtggaagaagcggaaaaccgtcaggtcatcgtcttcacgcatgatttggtgttcgtgaacgatctgaatgaccacgcgacgaagaccgggcgggcagtgcgactcacgacgctcagtcgtggcgccgcgggagccggtatggtggccgacggcctgccctggaaggcccagagcgtcgaagatcgcatcgacaagctggagaaggcggcacgtgcggcaaagctgctgcatgacaacaaccaggaagacgagtacgccgttgaggtggcaaagctctacaacgcgctgcgcgccacatgggagcgcggcctggaggacatcgctttcgtccgcgttattcaacgccacagggactacatcaacgccaaggacctgaagaaggtcagtgcgctcaccgaggctgactgcgatgctttcgccgccggattcaagaagtgctgcgacattgttgacgcacacgatccatccagcggtaggaatgccgcgccgccaccacctactgatctctttcaggacattcaggctttgaaggactgggccgcgtctctgcgagacaggcaaaagaagattgcttga

SEQ ID NO: 324194 - DNA, 2736 bp, Pseudomonas aeruginosa
atgaacgcccgcgtcctgcacgccgtcaccggtcgcctgtcccttcgtccgccccaggcggaatcgctcatcaagctggttcgcgcgctcgatgccgcgcccgaactcttgggccacgagcgcgatgtctcggcgattctctccacgctgaaggccgagttcagcacgctggaggacttcgagcgcgaatttccgtcgctgtgcttcgcgctggccacgggcgtgggcaagacgcgcctgatgggagccttcatcgcctacctgcatctggcgcacggcatcaacaacttcttcgttctcgcgcccaacctgacgatctacaacaagctcatcacggacttcacgcgcaacacgccgaagtacgtgttcaagggcatcgccgaattcgcgcagcaaccgccgctgatcatcaccggcgacaactacgaccagaccggtgcggcggtagatgagcagtcaatgggcttcgcccacgacgtgcgcatcaacatcttcaacatctccaagatcaactccgaggtacgcggaggcaaggagccgcgcatcaagcggatgaaggaagtgctgggcgacagctacttcaaccatctggcgaacctgactgacctcgtgctgctgatggacgaatcgcaccgttaccgggccagcgccggggtgcgctctatcaacgagctcaagccactattcggtctggaagtgacggcgacgccgttcgtcgagtccagccgcgggccggtgccgttcaagaacgtggtgatggactacccgctggctcgggcgatggaggatggcttcgtcaaggagcctgccgtggtcacccagcgcaacttcgacgccaaggcgcacacgcccgaggagatcgagaagaccaagctggaagacggcgtgcgcctgcacgagacgaccaaggtcgaattgctcacctacgcccgagagaacggcgtcaagccggtcaagcccttcatgctcgtcatcgcccgcgataccacgcacgcggggcaactcttggcgcttctggagtcggaagccttctacgaggggcgttaccagggcaaggtgatccaggtcgattccagccgtaccggcgcggaggaagaagagatgatcacgcgcctgctagccgtggagagcgtggacgagccgaccgagatcgtgattcacgtcaacatgctcaaggagggctgggacgtaaccaacctctataccatcgtgccgctgcgcgccgccaatgcccgcacgttgatcgaacagtccatcgggcgtggcctgcgactgccctacggcaaacgcacgggcgtcgcgtcggtggatcgcttgaacatcgtcgcgcacgacaagttccaggagatcatcgacgaggccaaccgcggcgactcgccgattcgcctgaagcaggtcatcctcgatgcgccgagcgccgacgacaagaaggtcagcgtgcaggtcgagtccggggcagcggcgcgtctcggtttgacggaagcaccggtcgtgatcacaggggtttcagccactgacagtggagcggaagtccccgcgcccaaaccggtgttcaccacggaggcggagaagcaggccgcgcgcgtggtcatggacgtcatcggcaagtacgaggtcaagcgcgatctggtgcccaccagcagcgcgctgctgaaaccagaagtgcagaaggaaatcctcgcggaagtggcagagcggctgaagccgctgcaaggcgaattgctggcggacgtggatgaatcagtccccgcacttgacttgtccgccgtggtggcgaagaccaccgagatcgtggtgcagcagaccatcgacatcccacgcattgcggtggtgccgactggcgagatcacaacgggcttccacgccttcaagctggatgtgagccagctccatctccagcctggccagcgcgagatcgtcggtcagatgctgcgcacgaacgagcagttcaccctggccgccgaagtcgggctcaaggagcagcgcccggaggattacatcgtccacgccctggtggacttcgacgacatcgactacttcacccacgccgagctgctctacgacctcgcgggccagatggtgcagcacctgcgcggctatctgtccgaggacgaggccatcagcgtgctggatcgtgaccgccgcctgatcgcacgggaaatccacgcgcagatgatggcccacttctgggaggaggcgaccgagtacgaggtgcaggtcagtcgcggcttcaccgaactcaagccgtgcaactacaccgccacggcaggccagacggcccaccacttccgggagaccgtgaccgagaccagtcgcatcaagcagatgctcttcggtggcttcgcgcgttgtctgtatccgctgcagaagttcgactcggataccgagcggcgcttcgccatcatcctggagcgcgacgcgacgaagtggctcaagcccgcgaaggggcagttccagatctactacaagctcggcaccgagcagccggaatacatccccgacttcgtggccgagacggacgcgaccatcttcatggtggaaacgaaggcacgtgccgacatcaacacgcaggaggttcaggccaaggccgctgccgccatgcgctggtgcaagcacgcttccgatcacgcggcgaacgtaggcgccaagccctggaagtacctcctggtgccccatgacgaaatcaacgagtcgaaacggctcgcggattacctgcgctttgaggtcaaggcgtaa

SEQ ID NO: 324195 - DNA, 1698 bp, Pseudomonas aeruginosa
atgagcaaacaaaaactagaacttgcctggatcgggaaggagaagcggcccaagctggagccgcgcatcctgctcgaagatccagagaagtcatatcacgccaagcatcgcgtgtcggacaacgacatcttcgacaaccggctgatcttcggtgacaacctgcttgcgctgaaagcattggagcaagagttctccggcaaggtgaagtgcgtgttcatcgacccaccgtataacaccggcagcgccttcacgcactacgatgacgggctagagcactcgatctggcttggcttgatgcgcgaccgactggaacttatcaagcggttgctggcggaggatgggtcgctgtggatcaccattgatgacaacgaagcgcattacctcaaggttctgtgcgatgaggtctttgggcgggccaactttgtctcgactgtgatttggcagaagaagtacgcaccaaagtccgactctaagtacttttctgcgtcccatgacttcattcttgtcatggcaaaaaacctcgataagttcaacttgggtcgactgccgaagacagaaaagcaaacggggagatataccaatagagacaacgacccacgcggcccatggaaagcaagtgacgttctgcgaaatgaagcgcgggactatgcgatttttccagtgcgtctcccttcaggtcgcgaggtactcccccccgcgggaacgagttggcggtatacgaaagagaagtttgctgagctcattgcagacaacaggatatggtttggtgttgatggtgacgcgcgaccagcgtacaagcgctttctgtctgaggtcaccgacacgattccggctacaaccatttggccttatgacgaagtcggccataacgatgagtcaaaaaaggaaatgcgttctctgttcggcgagaacttatttgacacaccgaaaccggagcggcttcttcagcggatattgacgctggcaaccactgccggcgatcttgtccttgattcattttcgggttccggcaccaccggcgcggtcgcgcacaagatgggccgtcgctggatcatggtcgagttgggcgagcactgccacacccacatcatcccccgcctgcagaaggtgatcgacggtgaagacaagggcggaatttctgaagccgtcggctggcaaggcggtggcgggttccgctactaccgcgtcgctcccagcctgatcgtcaacgatcgctggggcaaccaagtcatcaatccagagtacaacgcggcaatgctggccgaggccttggcgaagcttgaaggctttacctacgcgccctcggagacgcgctggtggcagcacggccactccagcgagcgcgatttcatctgcgtcacgacccagaacctgtccgccgagcagttacaggcgctgtccggtgaagtcggcccggagcagagcctgctggtgtgctgcgccgctttccacggagtcacggcggccaaagcggcagagcgctggccgaacctgacgctgaagaagatcccgaagatggtgctggcccgctgccattggggccgtgacgactacagcctgaatgtgaccaacctgccaatggcggagattgagaaggccgagcctgcggcctctggcaatggcgccaagaacatcaagagcagaaaagcggccctcgctaacgcgggacagagcggcctgtttggggagaacgaataa

SEQ ID NO: 324196 - DNA, 1791 bp, Pseudomonas aeruginosa
atgccggcgctcgaacctcagtgcttggccatcttgaagcaggtgctcgccgcccgcttcgtgccgttcctgccgccattgctcggcaacgtcaatcccgccgatcacgcggcgaaacagctttcgcgggccttcagcgccttcgtcctccacaaactgctcgacattacgccgcaggtggcggccgcctcggtcgtggatgatttcaacgacaagggcatcgacgcgatccactaccacgcgccgtcggagactctgtacctgctgcaaaccaagttgaaggagtccgagcagttcaagcaggaggatgcgctgccgttctgcgagggcattcgcctgttgctcaaacaggacttcgccgcgttcaacgggaatgtccagaatcggaagaccgacatcgagggcgcactcgatgtgtgcagccacatcaagctggtcgtgccctacacgggcgatggtgtatcgcaaacggctcgcgacgccttgcaggcgctgctcgatgacgaagacctcgacgaagagcggctggccaagcaggtggagtattacacggcaaccgagatcgtctgcgatctgctggcggaacaagcctaccaacccgtgcacacggatatcgcgttgcacaagcacgcgaaagtcgaaagcccgcgagccacgtactacggtgtcgcgcggctggcggacttggtgaccctacaccagatgcacggcaaggccctgtacgaacgcaacatccgctacttcctcggcagcagcaagtctgatgttaacaaggccatcaagacgaccttgcatgacgccccgctggacttcttctatctcaacaacggcgtcacggccgtctgcgacctgatcgagccgaaggctaacaagaatggcgtcaagaagttcaaggtgcgcggcttgtccatcatcaacggcgcgcagacggtggcgtcggctgccgagttcgtgcgccagcatccgggcaagagcatcgatgacgccaaggtgatgctcactttgattaaggcatcggcggacggccagtttgggaagagcgtgaccaaggctcgcaaccaccagaacccggtgcagaccgcgaacttcgcctcgctggacgagaaccaggagcggctacggcaggagatcgcccacctcagcttcgattaccactatcgccccgaggccctcgcgaccggccccaaggccatcacgctcgatgaggctctgcgggcaatggcctcgcaacagaacgacccacgctacgccgtatggctcaagagcgaaccggtgcggctcgccaaccccgactccaccgagtaccaggcgctgttcactgccgcgctaccaggcgtgacgctgatcaatgcggtcctgtgccaccgcgccatccgcgccctggtggtggattacgagcagaaggctccagcgcgcagccaggaacgtctgatctaccgtcacggcgtacacgtcatcacagccgtcatgatgaagcgcctgcgcagccgcattggcacggcggccgtcatcgacccggcagcgattcccgcgctgatcagccagccgctcgatcagctccggcagcaggctttcgacctcggccagcaacgactcattcttgaggggccactggcttacttccgcaaccagggcaacgtcgtgaacttcctggccgacctgatggaggcacactttgcgctgggtgccgatccggccatagcgccactacgcaatattcagaatgcagcggacgcgtatccgcgcaagcgcctgatcgactacttgtcgagccgcgcgccacaactatga

SEQ ID NO: 324197 - DNA, 2346 bp, Pseudomonas aeruginosa
atggcctatgaacacttgcgcttggagcgagaagcgccctcaacggagcgccatccgaggcgtcatccgggaattcgccctcctgccgatccgagagcgcatggtgccgcgttagccgggcggctcgaccaagcgcggcaacgtgcgatggcagaggacgtcggcgggttcgacgaccgtaagctgctcaagattcggctgcgcgcgggcgacaagagcgtgcccgccttcgatgccattcctggcgtggagattgtcagccaggaagatgaatccatcgtgctggcattcgccactgatgacggcttgagcgagttcgagagccgcctggccacccttgcacgtgatggcgttgttacacgcaaggaactgttctacgtcatcgaagacttcgaccactggacaccccaggaccgtaccggcgcggccttgcttgagcaaggatttccagccgcgccaaccttcatgctcgatgtcgaactatggccccaggagcgacaggacaagcgccagcaaatggtgcgtgcctttctcgactggttgcatgcacaaggcattgagcggctggacgacatccagcaaccctcgctcgtcatggtccgtgtgcgctgcaacggtgcgcaggccgagcagatcttgcaccatcgcgatgtgcgcactgccgacctgccgccccgcttgggtgtggccgtacaactgcttcataccgacatcaaccaatttcctccgatcgatcccccttctgacgatgctccgtccattgccgtgctggattcaggcttgacgcgcggacattcgttgctcggcgcagcggtcggcgacgcgcagggctacctcgcaccgcatcgcagtgcggatgacaccgatccccactggcacggcaccttcgtcggcgggcttgcgttgtacggcgatgtccatagcgctattcagcaagggcagttcgtcccgcagcttcgcctgttctccggcaaagtgttcgaagacgacggacaagaccaaactgagttcgtcgaaaaggcggtcgaggaagccgtgcgcgaactgcatgcgcaatacggctgccgggtcttcaacctaagctatggcgacctgaacaaggtctacgatggccgtcatgtgcgcgggctcgcctacacgctggatcggctgacgcgtgagctgggagtcctgttcgtagtaccagcgggcaatttgttgtcatcccagttgccagccgatacacgcgcgagttacccggactacctgttcgaaggccacgcccgcctgctggaccccgccacatcgctcaacgcgctgaccgttggcggcttgagcctgaatgaggccacacgcaatgcacagcgccatcccaacacgattgaagaccacgtgttggcacgggcggagcagccgtttccattgactcgcagcggcccttctgccagcggcgccatcaagcccgacgtggtcgcgcatgccggcaacatcgccttgcggcgcactggaggtggcacagaccatgccggtctgggagtggtgtcgctcaacggcggctttgccttggggccggcgttcaaggaagacatcggcactagctacgccgccccccaagtcgcccaccaagccgcgcggctactggccgaagtgcccgacgcttcgcccagcctgctgcgcgcactgatcggcgcccatgcccgctggccgcaagcctgcgaagcgctgttgaaccccggcaacaatgctgaaggccgcgacaaactcctgcgcctcgtcgggtatgggcgcgtggacgatgcggcgctgttccgctcgcttgatcacaccgtcaccctgctggccgaagagcgcgtcggaaacgaccagcaccacttcttcgaattacctctaccagacagcttctgggacggtggccgccgcacgcgtgaggtgaccgtcgcgctcgcctacagccctgccgtgcgcaccacgcggctggactaccgaagagccaaactgtggttccacctggtgacggctggcagcctggatgagatcacccaagcctaccggcgcaatcgggaagaaggcatgggcgaacgcgccaacggccgctggctacccaacgacacccgcaagaacggcacgttgcaggtctctcgatggcgcttcaaacaggcgctggccaacggtcacaaggtgttcgtcgtggtgacccggcaagacagcctttggtccgatgggcgcgatggggacgagccctatgccgtcgccgtggtgctggcggatcgggagcaggccaacgctcagctctacgcccaggtgcaagcagcgctgcaagcacgtgcccaggcacgtgcgcgcgctcggattggcgggagggcctga

SEQ ID NO: 324198 - DNA, 987 bp, Pseudomonas aeruginosa
atggctagcggaaaattactgcggcaactcatcaaatcgggaacgcaaggcgatgcttcgggctttcgcgcggcgtccgaggcagtgatcaaagaggagcgcgagaagaaccatcatctgctcgcaaatgaccttgagcgtttactttacggcgatcaggcaacggtcgggaagagtgcgcggaagctgcaaagtttgcccagcgtgccgacaaataaagacaacggccttgcgctactagaagagcgtgccgtgattcgagaggagaaagacatcattctctcggatgcttcgcagtcggcactcgatgaaatcctgatggagcacaaccggacggacgtgcttcgatcctatggcctgcaacccgcgcagaagctgttgttttgcgggcctcccggctgcggcaagacgctggccgccgaagtcatcgcgcattccctgtccatgccgctcatcctcgttcggctggactcggtcatctcgtcgtttctgggagagacggccgccaatttgcgcaaagtgttcgattacgtcgcaacgcatcccgtggtcgcattgttcgatgaattcgacgccctgaccaaggatcgtggcgacagcgccgatcatggtgagctcaaacgctccgtaaatgccgtcttgcagatgatggacggttatcgaggcgagagcatcctgatagccaccaccaactacgaaaccttattggacaaggcggtttggcgacgcttcgatgaggttgtgcgcttcgagatgccgaatctggagcagatcaaacgcttgttagctctgaaactctccggtgtccgccgcaatttcgagcccgacgatggccaggtggcatccgtgttcaagggcatgtcgcacgccgacatcgagcgggttcttcggcgctccgtcaaggaaatgatcctgtccggccgggagttcctggagaaaagccacctcgataccgcgcttgcccgtgagtatcgtcataagagttaa

SEQ ID NO: 324199 - DNA, 2943 bp, Pseudomonas aeruginosa
gtgagcgcggaccatgccagccgccgaatcacgctcggggaagaactaaggggaggatcgccgttgacgacacagcagcttctgacgccgcaccagagccagtactttgcttggctgctgaccaggcgtgcagcaggcgactccgtggagtcgctggcttcgactttggtcgattcgcaggtcgatctgaatccccatcaggtcgaggccgcgctcttcgcttgccgcaaccccctctcacgcggcgtgatcctcgccgacgaggttggtctaggcaagaccatcgaagccggcttggtcatctcccaacgctgggcggaacggcggcggaaggtgctcatcatcgttccagcgaacctgcgcaagcaatggcaccaagagctgcaggacaagttcggcctgcaagggctgatcctcgaagccaaaagctacaacgcgatccgcaaacaggagcagcggaacccgttcctgttcgcctccggtccgatcatctgttcctaccagttcgcgaaggccaaggctgacgatgtcaagggcatcgactgggacttggtcgtcctcgacgaagcgcatcgcctgcgcaacgtctacaaaaccagcaacgtcatcgccaagaccctcaaggaggcgttgtcgcgcgttcactccaaggcgctcctgaccgcgacgccgttgcagaactcgctgctcgaactctatgggctggtcagcttcatcgatgaccgcgtgttcggagaccttgatagcttccgctcgcagttcaccggcagagagcaatccttcagcagcctgcgtgaccggctggcgcccatctgcaagcgcaccctgcgcaaacaggttcagccctacgtttcgtacacagcacgcagggccatcgtcgaggagttcacgccatcgagtgaagagcaggaactttccaggctcgtcgccgattatctgcgccgccccaacctcaaggccctgcccgacgggcagcgccaactgatttcactcgtgctgtggaagctgcttgcctccagcacgcacgcgattgcgggtgcgctggagacaatggccaagcgcctccagggtgtgctcgacaaaaccaccgaggttcccgatctggccgaggaactcgatgaggactacgagtcgctcgacgaaaccgccgatgagtggaacgaccaaggctcagacgtcgcagcaccgagccgcttggaacgcgatgccatcgcggaggagatcgaggagcttcgccacttcaaaacgctggcaaccaacatccgggacaacgcgaagggcaaggcactgttcaccgcgctggatcgagccttcgccgaactggatcggctaggcgcgcccaggaaggccatcatcttcaccgagtccaagcgcacgcaggaatacctcctcaacttgctggccgacacgccatacggcgacggcatcgtgctcttcaacggcaccaatagcgaccagcgtgcgcaggcgatctacaaggactggctgaagcgtcacgaaggcaccgaccgcatcaccggctccaagaccgccgacacccgtgcggcactggtcgagcacttcaaggagcgtggcaaggtcatgattgccaccgaggccggagccgaaggcatcaacctccagttctgctcgctcgtcatcaactacgacctgccgtggaacccgcagcgcatcgagcagcgcatcgggcgctgccaccgctacggtcagaagcacgacgtggtggtggtcaacttcgtcgaccgcagcaatgaggccgatgcacgggtgtacgagctgctgtcgcagaagttccagctcttcgagggcgtgtttggggctagcgacgaagtgctgggtgccatcggctccggtgtcgatttcgagcggcgtatcgccgagatctaccagaactgccgagagcccgaggaaatcaagtccagcttcgagcaactccagctcgacctctccggcgaaatcaacgaggcgatggtcaagacgcgccaggtactgcttgagaacttcgatgaggaggtgcaggagaagctgcgcatgcgggccgacgacagccgcaacgcgcgcaaccgcttcgagcgcatgctgatggacttgacccgcgccgaactggtccattgcgccgcgttcgatgacgacggcttcgatctccgccacataccgactggagtcgagcacggcggcctcgcgggcatcgagctggggcgctacgaattgccccgccgctccggcgacgcgcatctataccgcatcaatcatccgctggcgcgatggggcatcgagcaggccaaggctcgcgcactcaacggggctcgtcttgtgttcgactacaacgcccacggtgcaaagatcagcacgcttgaagcctggcgcggcaaggccggatggctcaccgtgaagctaatctcggtcgagacactcggcaaccaggagcaacatctgctggttgcggcgggcacgaccgacggcgtcgtgctcgcggaagaagacccggaaaaactgctgcgcctgcccgcgaccacgcaggcggccagtctgttcaacgcccctgatgccaccctgctggccgacgtggaagcccgcaagaccgcactcctgcgcgacgtcaacgagcgcaacctcggctacttcgagcaggaagtccagaagctggatgcctgggcggacgacctgaagctcggtctggagcaggagatcaaggagatcgaccgcgagatcaaggaggtgcgccgaaccgccgcgacctcgccgacgctggaagaaaagttgtcatggcagaagaagcagcgcgaactggagagtaagcgcagcaagctgcgccgcgagttgtttgcccggcaggacgaagtcgaagcgcagcgcaatgacttgatcagccagcttgaagtgcaactccaacagcaggtcgaggagcgcacgctgttcactgtcgagtgggagctggtgtaa

SEQ ID NO: 324200 - DNA, 201 bp, Pseudomonas aeruginosa
atgagtgaagtcgaaagcgagatcctcacgctggaggaagtcgcggcctacctcaaagccggcaaacggacggtctatcgccttgcccagaaaggagagattccggcgttcaagcttgggggaacctggcgctttcgccgctcggagctggatcggtggatcgccgaaagcatcaacaagaagaagccggaggccgagtga

SEQ ID NO: 324201 - DNA, 366 bp, Pseudomonas aeruginosa
atgggacagaccaaccgccgcacatccgcatggcctgcgcttgccgtggtgttggctgtgtcgttctcggcgctgcagcctgccgtcgccgccgacagcctcgccatggagcgtgagcagctcgccgcgctcgcccgccaactcgacctgatcgaccgcctcgccgagcacgccgcccataccgctccgcaggaacgcgcccgctaccacttcgactacgcccggctgcgcgccgacctgaagcgcgttcgcgccggcctgcaggactacctcgtgccccagcgcgcccagccgcgcgatcccgtcccgatggccggcgattacgtccgccgcgaccgcgcccacgacgaggagccgtcgccatga

SEQ ID NO: 324202 - DNA, 240 bp, Pseudomonas aeruginosa
atgacgccctctgccgatcaggtcgccgccttccaggccaacggcggctttgcgccttcggccgtctctgccgtggtgctcgctttcgtgttcgccgtgttgctgctgtggggcgtgtgggccatgcgcaccgcctacgtcggctgggccgagcaccgcatcactgaacgtcagttcctcgccgtcgtcgtgcgcttcgtggcgatgtacctggtgctgaccttcttcctcctctcctga

SEQ ID NO: 324203 - DNA, 372 bp, Pseudomonas aeruginosa
atgaacctgccatcgacatcccatcgcattccgtcccgcatcgtcgcactgctgctgctaccgctggcgttcgcgggcctgccgctgtcggccttcgcgcagggcctgccgaccatggaagacccatcgcgcggccagggcagcggcatcctgcagaccttgcagaattacggctacgacatcgtgctgctgatcgcgctgctcgtggtcgcctcgatgttcgtcggtgtctgctatcacgcctacacacgctactcggagatccacaccggccgcgccacctggggccagttcggcctgacggtcgccgtgggcgcaatcctgctggtggtcggcatctggctgctcaccaaggccaccggcgtgctgtga

SEQ ID NO: 324204 - DNA, 411 bp, Pseudomonas aeruginosa
atggccgtcccttcggagaccccgcgcgacaccctggtgaccttcctgccgcaccggctgaaccgccagccggtggtcgtgcgcgggctgaccgccgacgagttgtggatctgcgccggtctgtcggccgcagccggattcgtgctcggcctgccgctggcctggctcacgcacagcatcgccatggtgcccacgctgatcgtcgtcggcatcgcgctgggcgtcttcgtcggcggcggtttcctgcgcgcacagaagcgcggccggcccgacacctggctgtaccggcagctccagtggcggctggccctgcggcacccggcgctggcggcactcctgggcgggcagcgcctcatcacccgctcgggcttttggactacccggcgcaatgccgatcgaggtgcgccatga

SEQ ID NO: 324205 - DNA, 693 bp, Pseudomonas aeruginosa
atgagccgtttcaagaacgaggttgcgcacttgcaggcgcacgtgaagacgctgcgtctgggggccggcgcgttgttcgtggtggcgctgctgctcggcttcggttggtggagtgcgccgaagagtctgaccatccatgtgccgccggacttgcgctcgggcagcacgcgcaagtggtgggacgtgccgcccgagagcgtgtatgccttctcgttctacatctggcagcaggtgcagcgctggcccacgaacggcgaagaagactacccgcgcaacctgcgcgcgctgtcggcctacttcacgccgagctgccgggccttcctgcaacaggactacgagtaccggcgcgccagtggcgagctgcgtcagcgcgtgcgcggcatctacgagattcccggccgcggctacggcgatgatccggccacgcgcgtcaaggtgctctccgaccgcgattggatcgtcacgctcgacgtgagcgcggacgaatactacggctccgagcaggtcaagcgcgccctggtgcgctaccccatcaaggtcgtccggctggacatcgaccccgagcgcaaccccttcggcctggcgctggactgctacgccagcgcaccccagcgcatcgaaccgccgccgacgccgacccaggccggcgtgcccgccaacgcccccggccacctgcagggagactccccatga

SEQ ID NO: 324206 - DNA, 915 bp, Pseudomonas aeruginosa
atgaagcccgttgccttgtcggccctggccggcgtcctgctgatcctcggtgtcgtgccggccagccaggccgtggaaatcctgcgctgggagcggctgcccctgccggtgccgctggtggtcggccaggagcgcgtggtcttcatcgaccgcaatgtgcgcgtcggcgtaccggccagcgtcggcgaccatctgcgcgtgcagagtgcgggcggcgcgatctacctgcgggcgagcgagccgattccgcccacgcggctgcaactgcaggacgtggaatccggcgcgctgatcctgctcgacatcgccgccgagccggcgaaggacggccaggcgccgctggagccggtgcgcatcgtggaagcggaggcccccgcgaagcgctacggcggcggtgcagcaagtggcgcggacgagcaggccgatgcgcccgcagacaaatccgttccccggcgcgaaacgccggtatcggtcgtgctgacgcgccatgccgcgcagaacttgtacgcgccgctgcgcaccgtcgagccggtcgccggcatcgggcgcgcaaacctgcgccgcggcctcgcgctggacaccttgctgccgacgctgccggtgcaggcgcgggcactggccgcgtggcgcctggaagaccagtgggtgacggccgtgcgactcaccaacaccgccgcgcgttggctcgacctcgacccgcgcgccctgcaggggaacttcgtggcggcgaccttccagcatccgaacctgggtccggccggcactccgtccgacaccacggtgctctacctggtcacgcgcggccacggcctggctgagtcgctgctgccggcgctgagctcgatcgacgccagcgtgaacctgccgccggccgccgcggccggctcgaccggaggagcgcgcgatgaagagtaa

SEQ ID NO: 324207 - DNA, 1434 bp, Pseudomonas aeruginosa
atgaagagtaatccgctgctcaagtggctgctgatcccgatggcgctgctgctggtgttcgtcggcatcaagctgttctccggcgcccccggcggccagcccgcccccaagggcgcggccagtgcgctcacgcccgaggagatgaaagccctgggcatcgcaggcgacacgccgcgcgataccgttgccacgctggtggcccaagtgaagcagttgcgcaccgagctgcagagcgcgctcggcgacaacaagcagcacaaggccgagaacgagcgcctgcgtgcgcgggaaagcgcgatcgaccaacgcatccagagcgcgctggaaggcgaacgcaaccgcctggagcaggagcgcaatcaggtggccagcgacaggcagcagacccaggggctgctgcaggatctgcagcggcaactggacggcctttccggcaagggtggcccgtccgaccagcccgtcgggctggggctggaagagggtgacggccagcgcttcgaccgcagcgtcggtggcacgcagtgggtcgagcccgacgatgccaaggtcgacgccaagaacggcagcaaggagccgagctttcccctgagcttcgggtcggcccagaaaagtctgtcggccgcagtggaatccgtcgccgacgtcggcagccgcgccgtgggcgcatccacgaaggctgtctacaccgtaccgtcgaactcgacgctcatggggtcggttgccatgacggcgctgatcgggcgcgtgccgatcgatggaaccgtcaacgatccgtacccgttcaaggtgctgatcggcccggacaacctcacggccaacggcatcgacatccccgacgtggccggcgccgtggtcagcggcacggcctcgggcgactggacgctctcgtgcgtgcgcgggcaaatccgctcggtcacgttcgtgttccaggacggcaccatccgcacggtgccggaggacagcagcaagggcggcagcagcggcggcaacgcgggtcacaacggcgccagcatccaaggcggcctgggctggatcagcgacccttacggcattccctgcgtcagcggcgagcggcgcagcaacgcccagcagtacctggggagccaggcgctcatcaccgcagccggcgccggcgcggcctcactcatcaagtccgacaacggcagcgtggccgtggtcgccaacagcaacggctcgctgggcaccgtcggcatcagcggcaacgaagcgatgggccgcatcctcgcgggcggcgtgcgcgacatggccgattgggtcaacaagctctacggccaggccttcgcggcggtctacgtgcagcccggcgctagggtcgccgtgcatctggagcagccgctcgacatcgactacgacgccaaggggcgtcgggtccaccaccgcaccggagaagcccatgcctcggacctggattga

SEQ ID NO: 324208 - DNA, 435 bp, Pseudomonas aeruginosa
atgcctcggacctggattgacgcggccgccgtgctgctggcggccaccctgctcggcggctgcgccaccagcaaggagaagctgctgccgcacggcgacagcaccatgctcgacatctggcatcaggagaccggcggcagcgcgggcggcggccaggccgcgcggcaactgctcgatgcgcgccagggcctgcgccggccgctgaccgaggccgatgtgcaggcggcgcccggcgtgcaggcgcgctatacccgtaccgcgcagaacgagattcaccgccagttccaccgcctgccgaaccccgacctggtgatgtacgtgttcccgcacctggcgggcaccgacccggtgccggtgcccggctacagcacggtgttcccgctctaccagcgcgtgcagtacgcgatgccgggcgagcgcgtggaggactactga

SEQ ID NO: 324209 - DNA, 2889 bp, Pseudomonas aeruginosa
atggcctggtcgctgccgtggtcacgcaagtccgacgcatcgcctgttgacgccgcggatgcgaccgatgatgcctgggcgcggcacgtgacggcgctggcggcacagggtgtcgccgagccgggcagcgcgctcgtccggggccggcgcaggccggccacccaggacgaccacgatgcgctctatggcgtcgcgccgtcgttcgcggacttgctgccctgggttgagtacctgcccggcagcaagtgcatgttgctggaagacggccagtcggtggcggccttcttcgaactggcgccggtcggcaccgagggccgcgagatggcctggctgtggcaggcgcgcgatgcgctggagaacgccctgcaggactcctttgacgagttggacgacaacccctgggtggtgcagctctacgcccaggacgaggccgactgggacaactatctgcgctccctggcgaactatctgcagccgcgtgcgcagggcagcgcgttcagcgacttctacctgcgcttcttcgcccatcacctgcgggccatcgccaagccgggcggcctgttcgaggacaccacggtgacgcgcctgccgtggcgcggccaggtgcggcgcgtgcgcatggtggtctaccgccgcacgtccgcggccccggccccgcggcgcggccagtcgcccgagcaggcgctgaccacgatctgcgaccgcctcgccggcgggctggcgaatgccggcgtgaaggctcggcgtctcggcgcggcggacatccacgcctggctgctgcgctggttcaacccgaatccgaccctgctcggcgccactgccgaagaccgggaacgcttctacgcgctgacccgctacccggaagagcgggaggagggcgagatcgaactcgccagcggcaccgacttcgcgcagcgcctgttcttcggcgagccccgttcggacgtgcccaacggcctgtggttcttcgacggcatgccgcatcgggtgatcgtgatggatcgcctgcgcacgccacccgtgacgggccatctgacgggcgagacgcgcaaaggcggcgatgccatgaacgcgctgttcgaccagatgcccgaggacacggtgatgtgcctgacgctggtcgccacgccccaggacgtgctggaggcgcacctcaaccacctcgccaggaaggccgtcggtgagaccctggcctcggagcaggcccgccaggacgtgcagcaggcgcgcggcctgatcggcagcgcgcacaagctctaccgcggcgcgctggcgttctacctgcgcggccgcgacttggcccagctcgatgcgcgcggcctgcagctcgtcaacgtgatgctcaacgccggcctgcaaccggtacgcgaagaggacgaggtggcgccgctgaacagctatctgcgctggctgccgtgcgtgttcgatccggctgccgacaagcgccagtggtacacccagctcatattcgcgcaacatgcggcgaacctagcgccggtctggggccgcagccagggaacggggcatccgggcatcacgttcttcaaccgcggcggcggcccgatcaccttcgatccgttgaaccgcctcgaccggcagatgaacgcgcacctgttcctgttcggccccacgggttcgggcaagagcgcgacgctcaacaacatcctgaaccaagtcacggcgatctatcggccgcgtctgttcatcgtcgaggctggcaacagcttcggcctgttcggcgacttcgcggcacgattgggcctcaccgtgcatcgcgtgaagctcgcgcccggcgcgggcgtcagtctggctccgttcgccgacgcctggcgtctggtcgatacgccgagccaggtacagacgctggacgccgatgcgctcgacgaagaccagtccgatgccggcatggccgtggaaggcgacgagcagcgcgacgtgctcggcgagctggagatcactgcgcggctgatgatcaccggcggcgaggacaaggaagaagcgcgcatgacgcgcgccgatcgcagcctgatccgccagtgcattctcgatgcggcccagcattgcgtggcggacaaacgcacggtgctcacgcgcgatgtgcgcgacgcgctgcgcgagcgcgcccgcgacgccacgctgccggagatgcggcgcgcacggctgctggagatggccgacgccatggatatgttctgccagggcgtggacggcgagatgttcgaccggtccggcacgccgtggcccgaggcggacatcaccatcgtggatctcgccaccttcgcgcgcgagggctacaacgcccagctctcgattgcctacatctcgctcatcaacaccgtcaacaacatcgccgagcgcgaccagttcctgggccgcccgatcatcaacgtgacggacgaaggccacatcatcacgaagaacccgctgctcgcgccctacgtggtcaagatcaccaagatgtggcgcaagctcggcgcttggttctggctcgccacgcagaatctggacgacctgccgaaagcggccgagcccatgctcaacatgatcgagtggtgggtctgcctgtcgatgccgcccgatgaagtcgagaagatcgcgcgcttccgcgaactcaacgcttcgcagaaggcgctgatgctttcggcccgcaaggaggccggcaagttcagcgagggcgtgatcctgtccaagtcgatggaggtgctgttccgcgccgtgccgcccagcctctacctggcgatggcgatgaccgagcccgaggagaaggccgaacgcttccaattgatgcagcagcacggcatcagcgagctggatgccgccttccgcgtggccgagaagatcgaccgtgcgaggggcatcgaacccctggcgctggacacgctggcctga

SEQ ID NO: 324210 - DNA, 744 bp, Pseudomonas aeruginosa
atgcgcctgccttccttcgcccgccgtcatccctggatcggtctgctgatcgtggcgacgattgcggttgcctcgtggatgctgctgcgcgtgccgcatccggcaaccgagtcgatgcccctggccgccgccggggccgaagcgtcgaaaccggccggcccgccctggctgtatggccgtgccgatgcgcgcttcacggtggtcgggtacgccgacctggagtgtccgtactgccgggcctacttccccgcgctcaagcgctggatcgacgcccaccccgaggtgaactggcagtggcaccacctgccgctgtccatgcacgagccggccgcgactgccggggcgcgcctggccgagtgcgcgggcgagaccggcggacatgccacgttctggcaagccgtggcgtggctctacgcgcacacccgtggcgacggccagggcctgccggagggcctgcgctatcccgacctcacgccagccatgcagggttgtctcgacagcgatcgccccgatgcggtcatccgtgcccaggcggcggaagcagcacagcagggcatcgcggccacgccggccctgcaactgcgcgaccgcgagtccggcaagaccttcctgctgcacggccccgtcgaaggcgatgccttgctgtcggccatcgacctgctcgccgccggcagcacaaccgtagccgaacccgcccattcaccagacatgcccgccggcgttgccggtgacatgcccaggtag

SEQ ID NO: 324211 - DNA, 495 bp, Pseudomonas aeruginosa
atgtctctcgtcatcgccgactcccgcccggagtcgctcaccctgctcgccgcccagcacgaagactggatcatccggcaggccatcaccctgctggagaaccgcgtgttcaaggccggtccggcgctgggcagtcccgccgccgtgcgcgactacctgcgcttgaaactggtcgcggagccgaacgaaatcttcgccgtcgtgtttctcgacaaccagcaccaggtactcgccttcgagccgctgttcaagggcacggtcgaccagacttcggtgtatccgagggtggtggtccagcgtgcgctggcgctcaacgcttcggcgctgatcctggcgcatcagcacccctcggggaacaccgagccctcggccgctgatcgtgcgatcaccgagcggctgaagagtgccctggccaccgtcgatgtccgggtgctggatcacttcatcgtcggcaagggcagcccgtactcgttcgccgaagccggcttgctgtag

SEQ ID NO: 324212 - DNA, 450 bp, Pseudomonas aeruginosa
atgccggctcattccctcaaccttcctgccgcttcgcggcgccccctggccacgaggctggccgctggactgtgcgccgcgctgctcggtcccatcgcggcggccgccgatgtgctcatcgtcaccgacagccgtcatccggtgcaggccccggccggcgtgcggatcatcgagctggaccaggccacgcgcatcgaggtcgaactcgccgcgcacctgccggccgacccgcaacaggccgcggccctggtgcggcagcggttgcatgacggcggcgaggcgctccaacgccgcatcggccatgcctaccaaggtgtcgcggatgcctggggactgggcatcgccaagattcccgccgtggtggtcgatcgacgctacgtggtctacggcgagcccgacgtgccccgcgccgtcgcgcgcatcaaggcctaccggagcacgcagccatga

SEQ ID NO: 324213 - DNA, 945 bp, Pseudomonas aeruginosa
atgagtctcctgctggcatcccggcgcctgcgcgccaccgtcgcctcgctgctgctgagcacggccacgtcgacgttcgccctggacaccgccaccatcgtctcgtcggcgctgtcccccgactgcctcgaataccgcgtggtcggtatctgctactggctgtactgcacgcccttcggctgctcggttcgcacttccgtcaaggtgcgccactacgtccccgatgcggtggtgtcgagctactcgaacaccggcgaaaatccgtggctggaggtcagggcgatgagcatgcccaacccgaccgccaaggcgggcggtgacggcacgaccaaccacgacaacgagaacaacctcgccaagttcaagaacgccgatgtcatcggccatccggccgggctggtgttcagccagttcgccagcgcctccggctacacctgcgaaggcgctggcacggccttcatgccgtatctgctgagcacgctcgacacgatcgcctggcgctacaacatcccggaagcgttctaccccgaagcgctcatccccggccggcgcgaaatcggtacgcgcaccggcctgaacctctggggcaacgtgtatccccgcggtggcttcctgcaccagaccgacgaccacaagagcggcgccgtggtcgcgcagcgcgcgggcgacatcgtgacgcgccgcaaccagattcacgtgtaccagcctctgctggccaacgcccgcgacggctactggccggccggcgcgctgatggagaccgacgcctcgacgggcaagtggcaggagctgacgcccacgctctcgaacagttgcgtggtcttcccgcacagccgcacccgcgtgcaggcccagcagggcgactacgcctgggccttgtggcggccgtactcctgctgccggcgccgtggccaggtcttcctcggcagcgtcgatttcatgtga

SEQ ID NO: 324214 - DNA, 1407 bp, Pseudomonas aeruginosa
atgaacgcctccctccctgactttctgcgccgcgcgaagtcgcccctgcgggccacgctgctcgtggcggccatcacgctggtcgtcggcgtcgcctgggcgcagacccgcatcgaccccaatggcgtgaacgtcagcggcagcgtgatcggcgacgacgtgctctacagcatcggcggcggccgggccgtgtcgatgggtggtgccggcaacatgcagagcatcggcgtcggcgtcggctggaacagcaacctgatctgcggcgacatgagcatcaccacgacgctgcagaaccagctcaacggcatcaccaacggcttccagacgatcatgagcaacgtgatccagaatgccaccagcgccgtggcctcgctgccggccctgatcatccagcgcgccgacccgggtctctacaacctgctgaccaacggcatcctccaggcgcgcctggacttcgaccgctcgaagatgacctgccgggccatcgccaatcggatggcggacatggccggcggccaagccggctgggaccagctcgccgaggggatggcgctgcgggatgcggtcagcagcaccgatgccgtctccgccatcgagcaggccgagtccaacaaagggaacaacggcgtgccctgggtcggcggcggcaacgcgggcggctccggccagagttcgatcaaggtggtcggcgacgtgacgcgcgcgggctacaacctgctcaacgggcgcaacgccaccgatacctcgtcgatcgcgcgcagcgcctgcggcaaccgcctgacctgccaaacctggtcctcgccccaggcggccgccgactgggcgacccgcgtgttgggcgaacgcgagcaacgcacctgcgaaaactgcacgaagacccagaccacgcctggcgtcgggctcacgccaatgatccaggaagagtacgagaccaagctgcaggcgctgcaggaactggtgacgggcgcccggccgacgacgttggccaatctcgacgcagccggcagcagctcgctgccgatcacccgcggcgtgatcgaggccctgcgtgacgaacccgaccaggacgtgctgggccggcgcctcgcgtccgaggctgcgctgtccagcgtgctggagaaggccctgctgctgcaacgcacgttgctgaccggcaagaaggagccgaacgtcgctgccaacgagctggccgtgcaggcggtcgaccaggagaacagcgcgctggagcaggagatcaacaacctcaagaccgagctggaactgcggcgcacgctggccggcaactcggcgatggcgatcatccagcgccacagcacccgcgctgccggctcgcgcggcgtcttcgagggcgacaccacgcgcgaccgtctgcgggaaatccagaagccgcggagcggtacgccatga

SEQ ID NO: 324215 - DNA, 354 bp, Pseudomonas aeruginosa
atgagccggctggcctggctgcggctgccatggctgttcaaccgccgcgtcggcgtggcgctgctgtggaccttgctggtggtcgctgccgcggtggcggtgaacatcgccggcatccacgtggtcggcggcgtcgagggctggcagcactggctgcaggcgcacgccggccacttcttcgtgtggcgtctgtgcctctacggagcgacggcttacggctggtggtggatgcgtcggcgcctgttgcggcgggagccgtcccgcgagacgcatcagcgcctgctgcgcacggagatcgcggccgtcatcgccgtggtcgcgctggaagccagccagctgctgcggcacggctga

SEQ ID NO: 324216 - DNA, 1524 bp, Pseudomonas aeruginosa
atgacgctctacaccacggactacttggagtattacctgaccctggtggcttgggtggtcaacaacggcatctggagcatcctcgtggccagcggcgtgttcgcgctgccgttcgtggccatcgtgatccaggaatggctcaaggcccgcagcgaaggtgcggacgagggcaacaagggtgtgctgtcgacgatgcgcatcgagaaccgggtgtgggtggcgatcgtggtcatcatgttcgcgggcatcccgttcatcccggtggatctcgccacgatcaggttcgacaccacgcgctccgcgcaatgccaggtcaacgtcccgctgcccaacgacacgggctggtccaacgtctacacggcgctcaacgaccagagcgcgctggtgccggtgtggtggttcttcatgcacgcgctgtcgaaagccgtgacgggctccgcggtggcggcgattccctgcggcacggacctgcgtcagattcgcatggatgtggatgccacgcgcatcgacgatccggtgctggcacaggaggtcgccgacttcacgcacgactgctacgggccgtcgcgcgccaagctgttcatgaaccggccgacgctctccgacgagcagatgaacgacgtcacctggatcgggtcgagttacttcctcgacacgcccggcttctatgacacctatcgcgccaagaccccacgcacggcctggccctacgacgcgacccgcgatgcggggttggcacaggtggacagcggcggcggctatccgtcctgccggcagtggtgggccgatggtggccaggggctgcgcagccggctgctggcacaggtcgacccggacctgctgacccgcatcgggcgctgggtgggcttcctgtcgcagcgcgaggtcaatgactcggtgatccgcgccgtcgtctcaccgcggcagcagaagatgaaccagggcgccgtctacaccgactacggcggccagatcgacaagacgctgtcgaacatcgtcacgcgcggcgcgagcgacctggggctgaccgtcggctcgctgggcttctttccggcgatggacgtggtgcgccaggcgctgccgatggtgctgaccatgctcaagatggcgctcgtcatctgcatcccgctggtgctgctgatcggcacctacgacctgaagacggtggtgacggtgagctgcgtccagttcgcgctgttcttcgtggacttctggttccagctcgcacgctggatcgacagcacgatcttggatgcgctctacggctgggggtttggcgcggacaggccgcacacgaacttcgatccgttgatcggtttgaacaacgcctttggcgacatgttgctgaacttcgtcatggcgatgatgttcatcgtgctaccgggtttctgggtagctgcgctcgcgtgggttggtgtccgcgtaggcagcatttcgcagatgctctcagcagccaccgatggcgccaaatctgcgggaggcaaaggcgctgaccttgcaatcaaagcagcgaaggcgaagtag

SEQ ID NO: 324217 - DNA, 369 bp, Pseudomonas aeruginosa
atgactaccaacacgcacaacgggcgctggagccaccggctgggccggggggctggccgtgcctggcgtggatacctgcgccgcgagcagcgtgtcgccggctggctggtgacgcgcggggtgcccgcgggcgcggcgacggcggtgctctggatcgtcaagctggccgtgcttggtgtgctgctctactccgcgttctggctggcgctgctgctggcctttgcagtgatcgctgcctggatggtacgcaacgtcgatgccgacgaaagcagtgatgatgacgagcctcaatggcgaaacggcctggacggatacggtctctaccggggcgaggtacgcatcgacggcggcagcgcggacgacgagtag

SEQ ID NO: 324218 - DNA, 759 bp, Pseudomonas aeruginosa
atggatggaaattctaggcaccaggtaatcaagcggctgcaggcgggactcccccgcggggcgccgttcgaccttgccaccctgagccagttcggggtgtcgccccagctcgccgcccactatgccgacggcggatggctcgtgcgcttggcccatggcgtctatgccttcccgaacgatgaattcggggtctacggtgcgctgaagttcctgcaacagcgcgtgcccggcctgcacgtcggcggcaagagcgccctggccctgcagggtgtgcggcacaacctgggcagccgggaggcgctggtgctgtggggcgacggtcgcttcgcgttgccggcctggttcacttcgcgctttccggcccgctatgtccacgcccgcctgttcgactggtcggacacggcgctggccgccaagaccctgaccacgccgccgggcctgcccgaggatctgcgggtggcagcccccgagcgtgccgttctggagctgctgtacgaagccggcgtcaagcagagcctcgaagaggcccgcaacatcttcgatggactgcgttccccccgcaaggacttgctcggacaactgctgtcctgctgcgccagcgtgaaggccgtgcgcctgttcctcacctgggcgcgcgagaccagcctcgtggatgtggatgccctgctggagcagtacccggttcgcaccggcagcaacacgcgctggatgagccggctcgatgacggcaccttgctgagcctgagacctcatggataa

SEQ ID NO: 324219 - DNA, 921 bp, Pseudomonas aeruginosa
atggataagacctacgcggacaccgttcgcctgctgctggccgtcgcgcccgacgtgttcgccaacgacatcttcgccatgaagggcggcacggccatcaacctcttcgtgcgggacatgccgcgcctgtcggtggacatcgacgtggtatacctcccgtggcagacgccgcgcgacgaagcgctgcaagccatcaaccaggagctggccgccatcgccgcgcgccttgcaccgctgggcgtgcagacacgcctggttcgcgccaaggacctgggggacaccaagctgatcgtcgagaacgatgccagccaggtgaagatcgaggtcaacgtcgtgttccgaggcagcgtgctgcccgtcgagcggcggccgctgagcgccaagaccagcgatttgttcggcgtcgagttcgagctgccggttctggcaccggacgagctgtacgccagcaagctggtggccgcgctggatcggcagcacccccgcgacctgttcgacgtgtggcagctctacgaatcgggcgacatcagcgacggcatggtcgagtgcttcgtgatctatctggcgggccacaaccggccgccccacgaagtgctgttcggcaacgacaaggacatcgccggcgagtacgagcgggcctttgtcggcatgaccgaagtggactgctccctggagacactgctcgatgctcgcgccaggatgcggcgcgagctgccacagcgactgagcaccgcgcacaagcagtttctgagcgggctggcgcgcgcagaaccggactggtcgctggtgcagtgccagcacgccgcgcaactgccggcactgcgctggaagctcgccaatctggagaccttccgcaagcgccgtcccgacgacttcgcagcgcaatccgccgccctcgacaccggcttgggccagagctga

SEQ ID NO: 324220 - DNA, 1851 bp, Pseudomonas aeruginosa
atgctctcgctgttccagcgcaaaagggtgccacccaccgccggcacgccgcccacctccgccatcgaaactccgaaagggtcgatgcggccggagtcggccgcatcgctgctggccacgccgcgccggcagaaactgctggaacacatctggcagcgcacatcgctctcgcgccggcagttcgccacgctctacctcgccccactggagcgctacgccgagttggtccagcagttcccggcctccgagaaccaccaccacgcctatccgggcggcatgctggaccacggcctggagatcgtcgcctatgcgctgaagctgcggcagtcatacctgctgcctgcgggcgtcacgccggaggcacaggcggcccaggccgaagcctggaccgcaggcacggcctacgcggccttgctgcacgacatcggcaagattgcggtcgatctgcacgtcgagcatgccgacggcagcgtctggcatccctggcacggcccgctgcgaaagccctaccgcttccgttaccgaaaggagcgcgagtaccgcctgcacagcgccgccaccgggctgctctacgtgcgccttctcgatcgggacatcttcgactggctcagcggctatcccgacctctgggccgcgctgctgtacgtgctggccggccagtacgagcacgccggcacgctcggcgagctggtcgtgcaggccgaccaggcatcggtcgcccaggaactcggcggcgatcccagcaaggcgctggtggcgcccaagcatgctctgcaacgcaaattgctcgacggcttgcgctacctgctcaaggaagcgttcaagctgaaccaggccggcccggcggacggttggctgacccaagacgccttgtggctggtgagcaagaccgtctccgacaagctgcgcgcacatctgctatcgcaaggcatcgacggcattccggcgagcaacacggcggtgttcaacgtgctgcaggatcacggcatcgtgcagccaacgccggatggcaaggcgatctggaaggcttctgtcaccagcgacgccggctggtcgcacgccttcaccttcctgaaactctcgccggcgatgatctgggatgccgccgaccggccggcgccgttcgcaggccgtgtgcaggtcgaagaggaacaggcggagccgacgccgcaggcgacaacggtggccgatgggccgcgcgccgaaggcatcgaagctgcatccgcgagcacggcgccgatcgcatccgcagccatggacaccggcgtggccgcgctgctcgacctgctgggcgacgccgctccacccacggcaccggagatcccgagttcccctgttgccgagcccgagccggccccttcgaccgtgcccccgccgcagatgagcctcgcgccttcccaggatcgcgcggagccctccggggcgcacttcatggcctggctgcgtcagagcatccagacgcgcaagctcatcatcaacgacgccaaggccctggtgcataccgtcgccggtacgagctacctcgtcagccccggcgtgttccagcgctacgcgcaggagtaccttcaagtcgccgcgctggccaagcaggagaagctggaggggtggcagtgggtacagaaacgcttcgagaagctgggacagcaccgcaagcagccgagcgggctgaacatctggacctgcgaagtcacggggccgcgcaagtcgcgccggctgcacggctacctgctcgtcagcccggatgcgctgttccaggagacgccgccagacaacccatacctgcggctcgtcaacgaggccgcaaagcgcgaagattcagcccttgggggcaaggccgacgatcaggggtag

SEQ ID NO: 324221 - DNA, 300 bp, Pseudomonas aeruginosa
atgccaaagcgttcgatccaaaggggccgccccaccggcaccactacctacgaagcggaaccagccatcgcgtttggggctgccgtgcgggaagaaagaaccaaccagggcatcgctcaggaaacgctggcccacatggccggcatcgaacggtcgcacatgggcaagatcgagcgcggcgagcatgtccccacgctccctctcatcctcaagattgcccgtgcgctgaaatgcagttccgcccacttgatgactctgaccgaagccaagctggcagagtcggccccatccgcagattaa

SEQ ID NO: 324222 - DNA, 627 bp, Pseudomonas aeruginosa
gtggaatcgagtgacatcaccgccgaaattcgcatggccgtcctcggcgaatgggtgccttcccagctcgccgacgtgctcgccctgcagcgtgccgaagagccggagactcatgccgtcttggccggctggacagatcccggtcgaggcgcggagctgccggacgacggcttcgacttcgccttgtctgcggttgcccggcagtggcctggctgggtatgcgaaccgctgtggcatgacacgctggcggtcgccgtggccaagcgctcccacctgctggcctaccgtgaagtgccgtgcggggaagtgctcaagcagcccttgatctgctcgcagtccacgaccgatgaaccatggcgcatgaccgtgcagcgtgtgttcgaaaacgcgctgcaagagcgagagcaaacggtggagacattcgatgtggcgatgacgctggttgccgccggatacgggatcgccattgcgcctgccgcgagactggcgagctacctacgccgaggcatcgccgtgcggccgctggccggcgcaccaacgatcgtgatggcttacctgctccgccgcaacgcttccttgtcggacacccaggcaagattcgcccgccgcgcgcgcttggtgtcctga

SEQ ID NO: 324223 - DNA, 1854 bp, Pseudomonas aeruginosa
atggcactctcagacctggccgttcgacaggccaaggcaactggcaaggcatacaccctccctgacttggatggcctctccctggccgtcacggctgcagggggcaggacttggcacttccgctactactgggcgggcaagcagaagcggatgtcgctcggcacctacccggaggtgacgcttcgcgaggcccgcagcctacgcgacgaagcgcgcgccctgctggccaaaggcaccaatcctcgcgttcaccgcaagcagaagcgcaccgctgtccggctcgccgacgaaaacaccttcgaggcggtgtatcgcaagtggctcaagcatcgcgggctcagcctcaaggaaggccggcagacgaccctctcgatacttccacggatcttcgacaaggatgtgttgcccaccttgggcaagcggtcggtctatgagatcaagcgtcccgacctcttggaggtgatcgccaagatcgagaagcgcagggcactctccgtcgccgagaaagtcaggacgtggttcaaccaactgtttcgctacgcgctggtgatcgtgccgggcctggagcaaaaccccgcctccgatctcgatgtggtggcgctgccgctgccacccgtcaaccacaacccgttcctgcgcatggccgagctgccgaagctgttgcagcggctgcgcagctatcgcggcaggcggcagacccagctcgggctgcggctattgctgctgaccggcgtgcgaaccggcgagctgcgacaggcgacgccggatcaattcgatctggaccgtgggctgtggatcatcccgcccgacgtcgtgaagcaactccagttggatatgcgcaagaagcggcagcagccaaaggacatcccgccctacatcgtgccgctgtcgattcaggccatggagatcgtccggcacctgctggatgagttcaagccggcccagcgccacctgttccggcacgacagcgacttgaagaagcgcatcagcgagaacacgctcaatggtgcgctcaaacgcatgggctatcaggaacgcctgacgggacacggtatccgcggcacgatgtccactgcgctcaacgagatcggctacccgaaggtctgggtggatgcacagctctcgcatgtcgatcccaacaaggtcagcgcgacctacaaccatgccgagtacgtggaacagcgtcgccgcatgatgcaggactgggccgatcggctcgacctcttcgagcagaaccaggtcgaggcggccagcatgccgctcaccgtgcatctggaaggcgtgcccgcgttcccgaatgagcaaaccgcaagcgcaccctccacgccggttgccgcttcgccaatcctgctcgtgacgaagcccggcgacgccatgccgttggtttctgccgccgcacaccggctgccggcggttccgccccctcggtcggccgcgccgctggtgccttcggacattcagcgcgagaggatggaactgttcgatgtcttcgaagcgccgcacaaccttcccgtcgcggcgtttgcgaagatggcgggcaagtcccgcaggtggatcagctacgagatcaaggccggcaacttgctggcgttgaacgtgggcaaccgcggccagcgggtgccggactggcacctcgacccactcaagcacgagctgatccagtccgtcctcaagctgaccaggggtgcggacccttggcagatctaccatgcactgctgcaaccgcgctcgatgctgcgggggcattcggcactggagggcgtgacggccggcaatctcgacaagctcgtcatggcagtgagcacagccgtgaaggaaagcgaatggaccccgccgcgagtcggagtcgcctag

SEQ ID NO: 324224 - DNA, 2400 bp, Pseudomonas aeruginosa
atgagcgaccaggacgttaatcccgaacacatcagcgacgcgcagcccgccggcaccggcctggtgctgcccggccagaccctgccgaccaccctctacgtgatcccgatccacaaccgcccgttcttcccggcgcaggtgctgccggtgatcgtcaacgaagaaccctgggcggaaaccctcgaactggtggccaagaccgaccaccattcgctggccctgttcttcatggacaatcctccggaagacccgcgccacttcgacgtcaacagcctgcccgagcacggcacgctggtccgagtgcaccatgcctcgcgcgagggcggcaagctgcagttcgtcgcccagggcctgtcgcgggtgcgtatccggggctggatcaagcgccatcgtccgccgttcatggtggaggtggactatccgaagaccccgatcgatcccagtgacgaagtgaaggcctacggcatggccctgatcaacgcgatcaaggagctgctgccgctcaatccgctgtacagcgaggaactgaagaactacctgaaccgcttcagtcccaacgacccgtcgccactcaccgacttcgccgcggccctgaccaccgcgcccggcggcgaactgcaggaagtgctggacaccgtgccgatcctcaagcggatggagaaggtcttgccgctgctgcgcaaggaggtggaagtcgcgcgcctgcagaaggaactgtccgccgaggtcaaccgcaagatcggcgaacaccagcgcgaattcttcctcaaggaacagttgaagatcatccagcaggagctgggcatcaccaaggacgacaagagcgccgacgccgacgaattccgcgcccgcctggaaggcaaggtgctgcccgagcaggcgcgcaagcgtatcgacgaagagctgaacaagctgtcgatcctcgagagcggctcgcccgagtacgccgtcacccgcaactacctggactgggccacagccctgccctggggcgtgtacggcaaggacaagctcgacctcaagcatgcgcgcaaggtcctcgacaagcatcacgcgggcctcgacgacatcaaggatcgcatcctcgagttcctcgccgtgggtagtttcaagggcgagatcgccggctccatcgtgctcctggtcggcccgccgggagtgggcaagaccagcatcggcaaatccatcgccgagagcctcggccggccgttctaccgtttcagcgtcggcggcatgcgcgacgaggcggagatcaagggccaccgccgcacctacatcggcgccctgcccggcaagctggtgcaggcgttgaaggaagtcgaggtgatgaacccggtgatcatgctcgacgagatcgacaagctcggcgccagctaccagggcgacccggcctcggcgctgctggaaaccctcgacccggagcagaacgtcgaattcctcgaccactacctggacctgcgcctggacctgtccaaggtgctgttcgtctgcaccgccaacaccctcgactcgatccccggaccgctcctcgaccggatggaagtgatccgcctgtccggctacatctccgaggaaaaactggccatcgccaagcgtcacctgtggcccaagcagttggaaaaggccggtgtgcccaagggccgcctgagcatcagcgatgccgcgctgcgtgcggtgatcgagggctatgcgcgggaagccggggtgcgccagttggagaaacagctcggcaagctggtgcgcaagtcggtggtcaagctgctggaggatcccgagtcgaaggtgaagatcggtcccagggacctcgaggactacctcggcatgccggtgttccgcagcgagcaggtgctttccgggatcggcgtgatcaccgggctggcctggaccagcatgggcggcgccaccctgccgatcgaggcgacccgcatccacacgctgaaccgtggcttcaagctcaccggccagctcggcgacgtgatgaaggaatccgccgagatcgcctatagctacatcggctcgcacctgaagaagtatggcggcgacccgaccttcttcgaccaggcgttcgtccacctgcacgtgccggaaggtgccacgcccaaggacggtcccagcgccggcgtcaccatggccagcgccctgctctccctggcgcgcaaccaggtgccgaagaaaggcgtggcgatgaccggcgaactgaccctgaccggccaggtcctgcccatcggcggggtccgcgagaaggtgatcgccgcgcgccggcagaagatcttcgagctgatcctgccggaagccaaccgcggccacttcgaagagttgcccgactatctcagggaagggctgaccgtgcatttcgccaagcgctacggcgacgtggccaaggtgctgttcccggcctga

SEQ ID NO: 324225 - DNA, 1521 bp, Pseudomonas aeruginosa
atgagtgtcaatacgcccacgctgatcaccttcgtgatctacatcgcggccatggtcctgatcggcctggcggcatatcgctccaccaacaacttctccgactacatcctcggtggccgcagcctcggcagcttcgtcacggcgctgtccgccggcgcctccgacatgagcggctggctgctgatgggcctgcccggcgcggtgtacctgtcgggcctgtccgaaagctggatcgccatcggcctgatcgtcggcgcctacctcaactggctgttcgtcgccggccgcctgcgggtgcagaccgagcacaacggcaacgcgctgaccctgcccgactacttcaccaaccgcttcgaggacaacagccgcctgctgcggatcttctcggccctggtgatcctggtgttcttcaccatctactgcgcttccggcatcgtcgccggtgcgcgcctgttcgagagcaccttcggcctctcctacgagaccgcgctgtgggccggcgccgcggcgaccatcgcctacaccttcatcggtggcttcctcgcggtgagctggaccgacaccgtgcaggcctcgctgatgatcttcgcgctgatcctcaccccggtgatcgtgatgctcgccaccggcggcgtcgagccgaccttcaccgccatcgagctgaaggacgcgaccagcttcgacatgctcaagggcgcctccttcatcggcgtgatctcgctgatggcctggggcctgggctacttcggccagccgcacatcctggcgcgcttcatggccgccgactcggtgaaatcgatccctgccgcgcgccgcatctccatgacctggatgatcctctgcctcggtggcgccgtggccgtgggcttcttcggcatcgcctacttccaggcgcatccggagcaggccggcgcggtcagcgagaaccccgagcgggtattcatcgagctggccaagatcctgttcaacccgtggatcgccggcgtgttgctgtccgccatcctcgccgcggtcatgagcaccctgagctgccagctgctggtctgctcctcggcgctcaccgaggacttctacaaggccttcctgcgcaagggcgccagccagctggaactggtctgggtcggtcgcgccatggtgctgctggtggcggtgatcgccatctggctggcctccaacccggaaaaccgcgtgctcggcctggtgtcctatgcctgggccggcttcggcgccgccttcggcccgctggtgctgttctccctgctgtggaagcggatgacccgcaacggcgcgctggccggcatgatcgtcggcgcggcgacggtgatcctgtggaagaacctgttgggctggaccggcctgtacgagatcatccccggcttcctcttcgccagcgtcgccatcgtcgtcttcagcctgctcggcaaggcgccttcgacgagcatgctcaagcgcttcgacgatgcggagcaggagtaccgcgaggcgcaccagggttccgccgctccggtaacccagcgctga

SEQ ID NO: 324226 - DNA, 639 bp, Pseudomonas aeruginosa
atgagtagaattcttgcagtgcatgccagcccgcgaggcgatcgctcgcaatcccggcgtctcgccgaggttttcctggcggcctatcgcgaagcccatccgcaggcccgcgtggctcgccgcgaagtcggccgggtaccgcttccggcggtcaccgaggccttcgtcgccgccgccttccatccccagccggaacagcgttcgctggcgatgcaggccgacctggcgctgagcgaccaactggtcggcgaactgttcgacagcgacctgctggtgatctccacgccgatgtacaacttcagcgtgcccagcggcctgaaggcctggatcgaccagatcgtgcgcctcggggcgaccttcgatttcgtcctcgacaatggcatcgcccagtaccggccgctgctgcgtggcaaacgtgcgctgatcgtcaccagtcgcggtggccatggcttcggcccgggcggcgagaaccaggcgatgaaccacgccgatccctggttgcgcaccgcgctgggtttcatcggcatcgacgaggtcacggtggtcgcggcggaaggcgaggaatccggcggcaggtccttcgaggactcctgcgccgaggcggaacagcgcctgctggcgctggcgcggtcggcctga

SEQ ID NO: 324227 - DNA, 636 bp, Pseudomonas aeruginosa
atgcgctggagccgggcacggcatccccgcatgacgaggaatcgaagcggccattcaaggcgattgcgtgttggcgatgggatgcgctcgccctctgtttggcattttgtgaagcgcttcgcaccttgcccgggcggcgctttgtccgggcaaaaccgtcaccgcacagtccccttccaccttcatccccctgcgacgcacctcgcaatgcaaccagcatcccggctgcgccaccctctacctagactgcagcgcagccagcgaagatctgttcgacaccgcccgcacccgtctggagtcggcgatcggaacgctgagcgtcctcgacctgctcgacgaaaccgaagaccggcgaaagcaccgccgcatcaccggctccttgctgtcgttgctcagcgacgccctgtcgctgttcgaggcggaatacgcacgcagacaacgataaccgacggaggcggtgccccccggcgaggccgggggttagaggagtctctatgtgagccggtatgttcattgagccgaattcacacaggccttaactatgagcgtctgtgccgtactatccgccttgtctggctaggctgttgtggtgaattgggcatgccttttcgctacatgcctaacgatctcaagtag

SEQ ID NO: 324228 - DNA, 696 bp, Pseudomonas aeruginosa
atgcccgccgttatcgctgagaatgatgtgtcgatctgggacgacgaaactggagctgtctaccactatccaaggcgatacagcgccatccttaagccaggggtgcaggtggtttactacaagggcaagctgacagataagtcctttgctgatcagcgcctcagtgctcagccgcattactttggtattgcgcgtatcggcaaggtttaccctgaccctgaaagctcgaaaggtgatctcttcgcgttgatcgagagttttcagccatttgagcaggcagtcctggcaaaagaagggaatagctacctagagcccattccgccatcgaaggccagcaactactggcgtagtggtgtccgggagattggacaggtcacctttgatagcatcctggcaagggccgagattaagcctttgcaggttgccgagagttggggcgatagagctttggggggcttcgagtctcgcaccgagggcagtctgtccacctactacggggtccgctacgagcgtgacccaacgctgcgtctccaggcaattgcgattcatggtgtagcttgcaaggcgtgcggttttgatttcggaaaggcatacggcgagtacgcgaagggttttatccacgttcaccacacgcagcccatttctgagttcgaagcccccaaagccgtgaaccctgaaactgtagtggtctactga

SEQ ID NO: 324229 - DNA, 489 bp, Pseudomonas aeruginosa; identical to SEQ ID NO: 323149

SEQ ID NO: 324230 - DNA, 1005 bp, Pseudomonas aeruginosa
atgaataattcgaatcttgctgctgcgcgtaatttgatacaagttgttaccggggaatggaagtcccgttgcgtctacgtcgctacgcgcctcgggctggccgatctgatcgagagcgggatcgacagcgacgagacgctggccgccgcggtcggttccgatgccgagcgcatccatcgactgatgcgcctgctggtggccttcgagatcttccagggcgatacccgcgacggctacgccaatacccccaccagccacctgctgagggatgtcgagggctccttccgcgacatggtgctgttctacggcgaggagttccacgccgcctggacgcccgcctgcgaggcgctgctcagcggtaccccaggcttcgagctggcgttcggcgaagacttctacagctacctgaagcgctgcccggatgccggccggcgcttcctgctggcgatgaaggcgagcaacctggccttccacgagatccccaggctcctggatttccgcgggcgtaacttcgtcgacgtcggtggcggttccggcgaattgaccaaggccatcctgcaggccgagcccagcgcccggggcgtgatgctcgaccgcgagggttccctcggcgtggcccgcgacaacctctccagcctgttggcaggggagcgcgtcagcctggtgggcggcgacatgctgcaagaggtgccgtccaacggcgatatctacctgctgtcgcggatcatcggcgatctggacgaagccgccagcctgcggttgctcggcaattgccgcgaggcgatggccggcgacggccgggtggtggtgatcgagcggaccatctcggccagcgagccgtcgccgatgtcggtgctctgggacgtgcacctgttcatggcctgcgctggccgtcaccgcaccaccgaggaggtggtcgacctgctcgggcgcggcggcttcgcggtggagcggatcgtcgacctgccgatggaaacccgcatgatcgtcgctgccagggcctga

SEQ ID NO: 324231 - DNA, 369 bp, Pseudomonas aeruginosa
atgaagcagagttcgattctggcggaaactcgccatgagctgctggacgacattgcggcacatacagcaacagtactgtctgaacatggtattgacgctggcctggctgaacaggccggccatgcggtagctgaccatctggcgaaccagtggcgtggcgccacgctgtacatcccctccgactatcgccaccaggttaccaagcgtgatctccagattctctccgagttcaacggacgaaaccatcacgccctggcccggaagtacggactgacgcccagttctatatataagctgttaaagcgtattcaggatcgtaagttcgaacgtgaccagggcaaactggacctcggcgacggcctggcttga

SEQ ID NO: 324232 - DNA, 549 bp, Pseudomonas aeruginosa
atgcaattgcagtgcccctgctgcggcgagcagtttccggtagaggccgggttcgcagataccgacggcaagaggctggcggcgctgtttgccggcctcgatccgaaactgggccgcgcaatactcaattacctacgcctgttcagtccagccaaacgaggcctgcgcatgacgcgcgccataaagcttgtggaggagctgctcaacctggtcaatacaggcacagtgcaaaaggatgcccgctccaacgacaccaagccggcttcgccacgtctatggaccaccggtatcgaacagatgatcaccggccgcgagcgcctgcaactgccgcttgagaaccacaactacctgcgcgcggtggtgtggggcctggccagtgatccagcgcaggctctggccgcttcctcaaagcggccgcaggccggtggacccagcacccagcaattgctccaagaccaagtcggtcgaattcagtccgatatcgtgttggggctgattactaaagaggatggagagcgccagatcgcggcgctgaaggggggagcatga

SEQ ID NO: 324233 - DNA, 567 bp, Pseudomonas aeruginosa
atggcactcgctaggggactgctcagcaagatccacatcgctcgtcagcagctcggcctgcaggacgatgtctatcggcagaagctgcaggtgatgttcggcaaggggtcggcgcgggatctcaacctgcgccaggctgagcagttgctgaccgagttcaagcgcctgggctggcagccacagcccagcaagcgagcagccggcaagccgcacaattggcggcaactgccagcggaggtcgaggtgatcgaggctcaacttaccaacatggggctgccttggagctacgccgatgcgatcgccaaacgccagtttggcgtagccaaagtggcctggctgaagaagcctgaacagctcaaagcagtgttggctgccctgcatgttgagcaggagaagcgcgggcttttgggtagcgtggaggagttgctcaagctgctcggcgagcatgatccaaactggagggtggatctggaacacctgcccaaaggctgggagcggcgacgtccaattctcaagagcctggtcgaaacactgcgtgcagcagcgtctgctcgggggctcttgtaa

SEQ ID NO: 324234 - DNA, 468 bp, Pseudomonas aeruginosa
atggagcgctaccactcaacggctggcgatccgcctcggcgcgatgctgacgtaaagcggcaggaggcccaggaactggacgaacttgttcagcaattcctggccggcggcggtcagatcgagaaagtcgggtacaagatgcgcgagctgccggacactttcgtcatcaaccccatgaagacgccggtatacaacggagccctggccgagaattcatcgctcaaagcgaagcctgccgcgccacgtacgcaagccaagaccgagccccagcgctccccagcgcccttgccggctttacagccggctcctggcgtgaacccgaaggtctggttgagccggatgatcaaagcccaggcgctgctggctgcgcagacggccaggctcgctcgcgaattgggcgtcagcgatgctgagctgcgccggctggggcgtcggcatggcatggaggtgttccatggcactcgctag

SEQ ID NO: 324235 - DNA, 192 bp, Pseudomonas aeruginosa
atgtcgcaagccaatccgttcatccgtcctgacaaggactacggtgcagtgagtgctgatgatcgcctgcgcgctctggacagcttcaatctagagcaatgccgtgctgcgctctcggtacccggcctgcagaagaccgtcgagaagaagctgcacagccgcattcgacagctcaacaaggaggccaggtga

SEQ ID NO: 324236 - DNA, 690 bp, Pseudomonas aeruginosa
atggaccaggaccgtatcctcgacaagatcaagaagtgcctggaaatggcgaagggacggggctccaacccgaacgaggccgagatcgcgctgcgtcatgcccacaaactgatggaagcctacaacctggagatgggcgacgtgctggccagcatggctggcgaaaccaaggttcccgctggctcggatggaaaaccgccggcctggcgggtgagcctcgctcaagtgtgctgccatgccttcggcacgcacctgatcatctgcacctcctatttcgaaagcgcttcgttcctgttcgtcggctgcgcggcagcgccggagctgaccggctacgcctaccaggtgctggagcgacagctgcagaaggcgcgcaaggacttcctgagcacgcagaaacgctgcaagcggtccaccaaggtagcccgtggagatgctttcgcgcatggatggatcgaggccgtgtacgccaaggtcgaccagttcgcgggcgtcgacgacaacatcgcagacgcgattcaggcgtacatggcgaagcaccacgctgacgtcggcaagttcgagatgaagcgccgcaagctcaaggcacgtgacgaagtggccagtgaagcggggtatgccgcgggcaagcgcgcgcggctgcaccaggggatcgggcaccaggccgtggctcggcttactcagggggtgtga

SEQ ID NO: 324237 - DNA, 624 bp, Pseudomonas aeruginosa
atggctgaacaaccagtgcatgttcccgccgggtaccgcatggacgccaaggggcgcctggtacctgaagaaatgatcaagcccatcgacctggagcgggaccgccttgtgcaggagatcgtcgccaaggggaaggccctgaacaaggcgttgctggacttcaaactggcgacattcggcgatatcgaagccttcatcaccctgtcggccgagcagtaccaggcgaaggtaggtggcaagaagggcaacgcctccctggtcagcttcgacggtcgctacaaggtcattcgggccatggccgacaacatcgccttcgacgagcgcctgcaggcggccaaggcgttgatcgacgagtgcctccacgaatggacagaaggcgctcgcgcagaggtcatcacgctgatcaacgatgcgttccgcgtggaccaagcagggaacatccgtaccggcagcgtgcttgccctgcgccgcctgcagatcgatgacgaacgttggcagcgtgcaatgcaggccatcggcgaggctgtccaggtcgtgagcaccaaggcgtacgtgcgtatccaggagcgggtcggggacaccgaccagtaccgctccattcctcttgatatcgcaggggtgtga

SEQ ID NO: 324238 - DNA, 201 bp, Pseudomonas aeruginosa
atggctgatgttctggaaatcgactgccccgcgtgcagcacgccgtaccccgaaatcaccgcaggctctgcagctcatgacccgagcctgatcgagctggtgatcacctgcagcaactgcggacacaccctgaatgcgttcgtctccctggctgagatgagcgttgtaccgaatcccgaagaggaaccctcccatggctga

SEQ ID NO: 324239 - DNA, 534 bp, Pseudomonas aeruginosa
atgagcgttgaagcgtacatccgcggcatggcggcccgtggatttagccgctcggccgccgcagcggcactcgggatgcactgggtcaagttcatggacctgctcgaacgcatgccagatatcgagtggggctatccctacaagtcctttgaccgccgcaggcatgccaagaacctgaagggataccggttccgggatagcgaaggacgccaacggtcggtggcggccttgcgggctgtcaaccaggcgagacggcatgagtacaccgtctttggcgtcaccgacagcttgagcaacctggtgaagcgcttcggttgtgtcgccaaaagcactgtgcagaagcgcttggccaagggcatgtccatcgagcaggcgcttacgacgcctcgctctgaccatctttctggcttgaagcgtaagccagagagtcatccctggaagcgggctgaccgtcgaggagtgatcaaccaccgtgaacgccaactcaaggcgaaacgggatcaacgtcaagcggaggaacgcttgcatggctga

SEQ ID NO: 324240 - DNA, 681 bp, Pseudomonas aeruginosa
atggacagcaaactttccgcttccatggcggcgctgcgcaaggtcgtaaagagcccacatccggcgatgttctggcaggagaccatggggcacgtcgcggtggtcctggatcacctgcaggaattgatcagtgatggcagcaccgctccagccatcgaggttcaacccggcgatcactcggaacttcgccgcattgctgtcgcgctcaagaacccactgctgaacggccaagaggcctcggacctgatggtccgctacgaggctctgaccatgcccgatcacatcatcgcgctgatcgatgggctgcctcagcacgttctggataagcaatgccgcgacgacgtggcgcgtgcgctgggattgtgtccgaaccaagagcgcggtttcgcatggtcctacctgctgacatcgatcaagtcgtgcgtgaaagcgtccgaggatacctgccgggctcagcacagtgtgccggcggggtggaagctggtgccgattgagccgaccccggaaatgctggacgcacgccgcgactgcgaggacggaatggacgggtatctcgttgaggataccgagtactacttcccggatcgaggtgcggttcgcgacttcctggcatgtgtctatcacggcatgctcgctgccgcgccagcgccctcgaagaggagcgctgacgatgagcgttga

SEQ ID NO: 324241 - DNA, 285 bp, Pseudomonas aeruginosa
atgactgtcatcacccatgcctacaccccgctgatggacgttgattccatgagcgaagaggactgccgtctggccctgaaggatgttctgcaggatggcttcgcgaaggaccagcaactggttgagctgaagactggcatccacaagctggacaggatgctggtcaagctcatcgacctcttcatcgccggggacttctccaagctgcatgcggagctgcagagcatggcggcctacctccaggagcagcgtgccgcccagaagtcggcaaggaaggtgcactga

SEQ ID NO: 324242 - DNA, 342 bp, Pseudomonas aeruginosa
atgaacgtcgtaccgatcactggccgcctccctgaagagcagccgaaagctacccatctgccgctctgcacagtactgacgccagagctggcccgctgcctggaggccgtcaacagcgccacccgcgccttgcgccaggccggcattccgattgagcagacgtcggtgctcgatcgccgcctgttcatccgcgaagaggattcgctgcggctgcaccgccgcttccgcaacgccatccgcggtattcgccagaccactcacgggatggtcaccgtccatgtcgtcagcctgctcggtgttgacgtggcctggacgaccccggtgaaggagcaagaccaatga

SEQ ID NO: 324243 - DNA, 1167 bp, Pseudomonas aeruginosa
atgctgaagctcaaggaagtcctggccagcctcggcaagccgcagaccgatctggcccgtgcggtcgatctcagtccggcggcgatcgctcaactgatcaaccacagccagtggccgaaatcgctggaccagcagcaactggcctggcggatcaccgaatacctgatggctcagggcgcgcagttcgacaccgtgcgccaggccttcgacgaagtggggccccgacgcagcaacgtcggggcccctgcaacccccgaagacgctcaagaaaacgaggagtgcgaacccatgctaatgcgcaaacaggtattgctgccagccacgaagaaggctttcgacatccgtcgcgaccccttcgacgaactgcacagcgccgacgacatcttcatcaacgctgatatccgctatgtacgcgaggcgatgcaccaggtcgctatgcacgatggtttcctggcagtgatcggcgagtcaggggcgggcaagtccaccttgcgccgagatctggagcatcgactggaaggcagcccggtgacggtcattcagccatacgtgctggggatggaagacaacgacaccaagggcaagcccctcaagagcgagcatatcgccgaggccatcctggcggagatcgcgccagaccaaacgccgcggaacagctcgcaggcccgctgggcgcaactgcacaaggctctgaaggccagccacaccgcaggctcgcgccacctgctgatcatcgaggaggcacacagcctatcgaccccgacgatcaagcacctcaagcgctaccgcgaactcgaactgggctacaccaagctggtgtcgatcatcctgatcggtcagcccgaactgctcatcaagttgtcgccgcgcaacggcgaagtccgagaggtggcccagcgcatcgagatcgtcgagttgccgccgctcacggtcggcgggctggaacagcacctggcgtttcgtttcgagcgggttggcaaggcactgagcgatgtgatcgatgcatccggcctgcaggccgtcatcgagaggctggggggcgtcaaggaaaacaagcccagcctgctctatccgctggccatcggcaacctggtgaaggccgctatgaactatgccgcgctcgtcggcgagccgcgcgtcactgctgacgtggttcgggaggcctga

SEQ ID NO: 324244 - DNA, 1785 bp, Pseudomonas aeruginosa
atgagcgccgtcattactcaagccctggtcgatctggagcgcgcccttcgcgccgccccacgcgggcagcgcgtagagattgcccagtcgacggcccagcggctcgacatgtcactcgccacgctttaccgcaagctgagggaggtcaccgcagacagcaagccccgcaaacgccggagtgacgccggcaccagtgccctgagccgggaagatgccctgaccatcagtagcgcgctgatggagagtgcgcgccgcaacgaaaagcgcctgtatagcctggaggatgcggtggaagcgctacgggccagcaagatgatccgggcggacgtcgttgacgaggacacgggcgagattcggccgctgtccatcagtgcgatatccagggctctctacagcttcggggttcatccccagcaattgctgcagcctgctccggtaacggagctgggcagttgccaccccaaccacgtttggcagatcgatgcctcgctgtgtgttctttattacctcaagcccggcgccgacgagcacggtaacggcctgcgcgtcatggagcatgaccagttctacaagaacaagccgaagaacgtggcccgcatcgcctccaaccgggtctggtcgtacgagatcaccgagcacgccagtggctggatttacctgaagtacgtcatgggggccgagagcggtgagaacctgtgtgatgtgctgatcgacgccatgcaggagcgcggtggcaacgacattctgcacggcgtgccgaagattctgatgatggacccaggttctgccaacacctcggccatggccaggaacctttgccgtgcgctgcgcatccgcgtcatcgttcacaagcccggtgccgcgcgggtgactggccaggtggagaacgcccggaacctcatcgagcgcaagttcgaggcgggactgcgcttccagcctgtcgccgatctggacgaactgaacgctgccgccaagacctggcgcgcgtggttcaacgccgcgaagaagcactcccgccatgggatgacccgctcggaggcctggatgcgcatccgtgagcaccagttggtgaaagcgcccagcgtcgaagtatgccgccagttggcaatcgccgagccggagagccgcaaggtcactagcaagctgcgcgtcagcttccagggaaccgaatacgacgtctcggtcgtacctggcgtgatgaacggcgagaagctgatgatcacccgcaacccctggcaaagcgatgccgcccaggcgatcactttcgaccaggacggccatgaagtcttccacgtcattccgaggatcgagaaggacaacttcggcttcgacgtgcgcgcccccatgatcggcgaggagttccggccgcatgcggagacgcctgcacagaaggctcgcaaggaagcggcccgcctagccatgggcgtcgataccgatgccgaagagcaggccgcacgcaaggccaaggccattccgttcggcgggaggctcaagccctaccagcacatcgaagacgctcagttgccgaccttcatgccacgcaagggcagcgagctgcagctcgacgtgacgttgcccaccgtcgagagcaagccactgagccacccggcagccgccaagatcctccgagcgcggctggatggcgtctggagtcccgagtcgatgctctggctcaagtccaactaccccgacggagtactggaggaccagctcgacagcatcgttgagcagttgcaggcggcgtccagccggcccgcgctgcgcgttgtgggaggtaactcgtaa

SEQ ID NO: 324245 - DNA, 975 bp, Pseudomonas aeruginosa
atggcccgtaaagcatcccccgtgaaagtggaatccatacctgaagtcaaccagcaggcgtaccaggccgaggcaggcgcgctgaccatgctgggcgacattgcccagggcatgcatgaggagcgcgacctggtcaaccaactgctcggccaagcgcagatggcaggggcgttcgaggaattttcccgaacggttcggacttccaagctcgcttacgtcaaggaaaacaagctctaccgtgccattgccgggaagaaaagtccgaacggttcggagttttctggcacttgggacgagttctgctcgttgctcggcatctctgtcgacaaggcaaacatggatatcgccaacctccgcactttcggcgaagaagccctggaatccatgtcccgcatgggcatcggctaccgcgagctgcgccagtggcgaaagctgcccgatgacgcccgtagcgccctgatcgaagcggccaagcagggcaacaaggacgccgtcgagtacctggccgaggaactgatcgccacccacaccaaggaaaaggctgccctggagaagcaggtcgaggatctacgggcggacaacgaagccctgggcgagcgcatggcacgcaagtcccgcgagctggacgaaaccgtccacgaactggaaaagaccaagcggcgcatccaaaccatgaaggcggatgaggccgagaaagagcttcgccaggaggcaacggcgatcgctttcgaagccgaggccgacatcagcggcaagctgcgcgaagccttctccgtcatgctcgaccacgccgaaaagaccggtaccgacccccgcaccttccaggccggtctggtgcgccacctcgaaaaactgctcctgcagattcgcgaagagttccagttgcccgacggcgaagcccccgatgacatcagcgaattcggctggatcgagcaaatgggcaagtcccagcctgcaggcgtggctgaggactga

SEQ ID NO: 324246 - DNA, 315 bp, Pseudomonas aeruginosa
atgagcaccgaaaaataccgctccgagcaggtccagcgaaccctacgggtcatgctggccctcgccgccaacgaattccgggggctgctgctgaaggaggtggcggtcgccgccgagtgcgacgccagcgccgccctgcgcgccctggaaaacctgcgcatcgccggcttggccgaccgcagcccgcatgacgacaagcgctggctgctcggaccgcgcctggtccaggtggcctttggattcgacgaagccctgcgccgcggccaggacgaactcaacgagcgtcgccaacgctacacccgtctcccgaactaa

SEQ ID NO: 324247 - DNA, 261 bp, Pseudomonas aeruginosa
atgagtgagtccatcaacctgcaggcgctgctgcagcgcctggacgagcaagcctatgagcagctctgcatcgaagctgcgcgccttgccgaagagaacgagtacctgcgcaccgaactgacccgcatggaggaatgtgccgaagggtggtgcaacgaggcccagcatctccaccagcaactggcggaggccaccggtggccaagccgctatcacccagtccggcgccttggtcgtcatcccgatggagcgctgcgcatga

SEQ ID NO: 324248 - DNA, 489 bp, Pseudomonas aeruginosa
atgaagcgccggaattggaagcactgggtgccgcgctcgccggccgaagcgctggacggctgtgcgcagttggccatgcagcgctacaaccgcgggatcgagcggcttgccacagaccatctgtgccagaacaacgccagcaccctctacaaatggatgggcaatggccgcctgccgttgaccatggtgctgtcattggagaaagcctgcggcctgccgctgatcacccgctacctggccgccgctcacggcaagctcctggtcgacatcccggttggcaaggcctgcaacgccaacgacctgcagcaactgcagggcgtgctgcacaacgccaccggcgcgctgatggccttctacgacggcaagcaaaccgccgaacagaccctggacgccatccgcgccggcctcgaatccctcgcttggcaccacggcaacgtcgcccaggcagaaaccccgcaactggactttggagtggctgacgatgagtga

SEQ ID NO: 324249 - DNA, 231 bp, Pseudomonas aeruginosa
atgaacgtcccgtatccgctccccactcgcacgccgtacaccggcgagcgcgttaaggaactcttccgcgccgccggtataacgatctcggcctgggccgaggccaacggctatccccgtcaccaggtgtacatggtcatcaacggccagttcaaaggccgccgcggcacctcccatgaaatcgccctgaagctcggcatgaagctctccgtcgagcaactcgccgcctga

SEQ ID NO: 324250 - DNA, 504 bp, Pseudomonas aeruginosa
atggatttcaaagtactgcttggggcagtgatgttggtcagcctatcggtggccggatgctccacgaaaaactatggccgacagccggaactgactgacttcgaacggcagaccatgagctgccgcgagattgacctggaacaggccaaggttcagggcttcctgacccacgtgcgtgaggagagcgagttcgacggacgctcggtgctgtctttcctgggcgacttcgggatcggcaacctgatggagaaggacgcagcagtcgacagtgccaatcagcgcctgacccagttggcaggtgccaagatgcagcgcggctgcacctatgcctatgaggctgaggccccagctcagcagccgtacgcgccaccacgcgcctatgccccagacgggcccgcatcagcttctgcgcgttctgtcgacgcccagctcgacgagctgaaccgtatgcaattgccctacgaggagtaccagcggcgataccgagaaattacggggcaataa

SEQ ID NO: 324251 - DNA, 297 bp, Pseudomonas aeruginosa
atgtcatcgccgcaaccccggcgccgccgcgcgccgcgtatgaccagctggacgctggtcaccctcgtcctgctgatcatcctcgccgcgattcgcccggagcagctccaggtcgtcgcctacaaacttgtcctagtgaccctgggcgcggtggccggttactggatcgatcgcagcctgtttccctacgtggctcgcccgcatgagtgctcagccaatctggttgtcgtgggcgcctggctgcgccgtgggctgatcgtactggcttgcatcctcggcctgacgctggggctctga

SEQ ID NO: 324252 - DNA, 159 bp, Pseudomonas aeruginosa
atgggcgccccgcaaatcatctggatcgtgctggccgctgtggtcctggttacgtcctatgcgtgcgatggcctcaccaacgtgatcagcttcaagcagcgcgtgttcgacgtgatcgcgatgacggccctggtgtggtggggaggcttcttcggatga

SEQ ID NO: 324253 - DNA, 630 bp, Pseudomonas aeruginosa
atgaagcgcctgctcaccctcggcctgctgggcctgctgagcgcctgccagccggccttcgcgacggatcgcatccccactgccgccgagcagtaccggcgcaccctggtgcgcagcgcccatgctgaatggggcctgtcggcaccgatcgccacctttgccgcacaggttcaccaagaaagccgttggcgtgctgatgcccgctcgcctgttggtgcccagggtctggcgcagttcatgcccggaaccgcggagtggatcgccggcctgtatccgaccgccctcggcaccaatcagccgttcaatcctggctgggcactgcgcgcgctggtcacctacgaccgttggctctacgaccgaaaccaggcctccagcgagtgtgatcgctgggcattcgtactgtccgcttacaacggcggccaggggtgggtaaatcgcgaccgtaggctggcctcggcatccggcgccgacccgctggcctggttcgattccgtcgagcgcttcaacgccgggcgctcggccgccaacttccgcgagaaccgcaactacccgcgcctcatcctgcttcgctatgagcggatctacctgcagtggggcgacggcgtgtgcggagagaggtacaccctgtga

SEQ ID NO: 324254 - DNA, 624 bp, Pseudomonas aeruginosa
atgggcatccttagtctcctgcgctccaactggttctggatcgcgctgattgcggtgctgtacagcgtagctgtagtgatccacggctccgcaagctacgaccgtgggtacgccaccgctcgcgccgaaggtgacgcagcgctgctcaacctgcagctgcagcattccaacgagctggccaagatcgctgaggacaacttcctgcagttccagcagcaggtcactcgcgcgaatcaggcggaagcgcgattcctgtcagcccaggaccagttcactgccctccagcaacagctatcggagcgtatcgcccatgtctcgactcaataccggccggcaccaggtgcttcccctgtgcctgctcctcgcttcgttgtcacttgcggctggctgcgggactacaaccacgccctcggcgccgatctgccctcgccagcagcctgcagaactgccgccagccctcaagaaacggcctggcccgcctccggcgctgacgccgaactactggaaagcggtgtcagcgcggctgacatcctggcccatgcccgcgattacgggaaatggtctctcaccaacctggcgcaactgaatgcgctgctcgatgtaaacgacaaggaaactcactga

SEQ ID NO: 324255 - DNA, 321 bp, Pseudomonas aeruginosa
atggacttggacttcgtgctgcgcgccggccagttcgtattcaccgcggcggtgggcctgtactcgctggctgctgcgcgtcgctccagctccaaggccgaggccgaacacctgacgaatcggctttcatcccaggacaaccgacttctcaccctggagcagcagatgctccacctgccggacagccagcagctgtcggagctggccggcgacatgaaagccatgcgcgccgagctgtcggggttggccaaagcgctggaccctttgactcgctcggttgatcgcatcaatgactacctgctcagcgagagacgcccatga

SEQ ID NO: 324256 - DNA, 303 bp, Pseudomonas aeruginosa
atgactagcaactactccgatttcatcagccaggaccgccgcctggtgatcctgcgcatccttgcggaaatgccgacctaccaggccaatagctcggtactgcacgccgtcctcagccagtgggggcatgaccccagtcgcgaccaggtgaagggcgagttgcgctggctggaggagcagcaactggtgaagatcgaggacgtcagcaacggcgcagtgctggtcgcgaagctgactgagcgcggcgccgacgtggccgccggccgcgcccgagtggacggcgtgaagcgtccgggagcctga

SEQ ID NO: 324257 - DNA, 549 bp, Pseudomonas aeruginosa
atgggccgcaagtccagcatcgacaagctgccaccggatgtgcgttcgttcatcgagcgctccctgcgcgagaaccgcctgaccctggacgagctgatcgagcagttgcaggagcgcttcccgggcaaggaaaagcccagccgttcagcgatcggccgatacaaggtcagcttcgacgagatgacccggcgcctgcgcgagcagcaagcgatggccagcctgctggtggaagagctaggcgagaacccagacgaacgtgcaggcgcgctcctggtgcaatccatcaccaccttgacgacccatgcggccttcgctgcgcagaccgaggacgaggtcgacatcgaggacgtccgcaagctggctcgggcagccaaggatgtcctgcaggcccgcaaagccagtatggaggagcgccgccagatcgagcgcgaagcccgcgagaagctgctccaggagcaggagcagcgcttggaagagcagcgtggcagcgacgggatgagcgagcagctcgaaaaccgaatccgcggcatcctcctggggaaagcctga

SEQ ID NO: 324258 - DNA, 1674 bp, Pseudomonas aeruginosa
atggccatgcgcgcaaccactgccgagctgggtaagaggcttactgcgaccagtgccccgcgtaagatcgacctggccgaggagatggagctgctcggcgtcgacgtgccgcaggaaatctccgaagcccagccggccaatgagcccgtcttcctgccgtaccagcagcgctggttcgaggacgagagccagatcatgatcgcggagaagtcccgccgtaccggcctgacctgggccgaggccgggcgcaacgtgatcaatgccgccaagccgcggcgccgaggtggctgcaacaccttctacgtcggcagcaagcaggagatggcgttggagtacatcgccgcctgtgctctgttcgcccgtgctttcaacgagctggcagaggccgacgtctacgagcagaccttctgggacgaagggaagaaggaagagatcctgacctacatgatccgcttcccgaaaacggggcggaaaatccaggccctgagcagccggccgagtaacctgcgcggcctgcagggcgacgtggtgatcgatgaagcagcgttccatgagtccctggaggagctgctgaaggccgccctggcattgacgatgtggggcaacaaggtgcgcctgatcagcactcacaacggcgtcgacaaccccttcaacacctacatccaggatgcccgagagggccggaaagactacagcatccaccgcatcaccctcgatgacgcgattgctgagggactgtacaagcgcatctgctacgtcacgggccaggcttggtcacccgagtccgagaaagcctggcgtgatggtctgtacaagaacgcccccaacatcgagtcggccgaggaagagtacggctgcgtcccgaaaaagtccggcggcgcctacctgtcgcgggtgctcatcgagcaggcgatggtcgccgaccactcgatccgcattcaccgctacgaggcgccggccggcttcgagagctggacgccagagctgcgagaggcggaggttcgcacctggtgcgaagagaacctcctgccagagttggcccgccttagcgaccagaaccgccacaccttcggcgaggacttcgcgcgccgcggcgacctgaccgtcttcacgcctttggcgatctcgccgaccctgcgcaagcgcgtccccttccaggtcgagctacggaacctcacctacgaagctcagcgcgacatcatgcgcttcatctgcgatcgcctgccgcgactcagtggactggccttcgacgccaccggcaacggcggctacctggccgagcaggctgcgctgaagtacggcgccgggatggtcgaccaggtgcagctcaacctggcctggtacgccacctggatgccgaagctcaagggcgaattcgaggcattcaacctggagatcccgcggcaccagaccgagctggatgacctgctctcgatcaaggtcgagaaaggcatccctgtcatcgacaaaggccgcaccaaggacttggagtcagccagcggcaagggcaagcgtcacggggacgccgccatttccttggtcatggccgtccgagccagctacatggagggtggcgagatcgcctttacggcgctgccacgccatagccgcggcttcgacaacgtccaggaccacaacaacgatatcgagctaccggagccttcagcatggtga

SEQ ID NO: 324259 - DNA, 1575 bp, Pseudomonas aeruginosa
atggtgactatgacccggattctcggccccgacggccagccgctgcgcctgaacgagatccgtgagccccagaccgcccaactgaccagcctgcaccatgaggtcgctggtcacccatctcgtggactcacgccttcaaggcttgcctcgctcctcgactccgccgagcaaggtgacatcgtcgcccaatatgagctgttcgaagatatggaggagaaggatggccatatccacgccgagatgtccaagcggcgccgcgcggtggctcagttggactgggacatcgttccacccgacaacgcaacagctaaggagaaggaagctgcggcggccttgtacaacctcatgcaaggtctggacgactttgaagaggtaatcttcgataccaccgacgccatcggcaagggcttcgcctgccaggagttcgacggctggcaacgcgttgatggtaactggctccccaaggcgatcatccatcgcccccagtcatggttccaactaccgcgaggcgttcggcaagagatccggttgcgtggtccgtcgggagggacgccgttgcaacccttcggttggatcacgcacgttcacaagtccaagagcggttatctggagcgctcggctctgttccgtgtcctggtctggccctacctgttcaagaactactcggtaggcgacctggccgagtttctggagatctacggcatccccatgcgggtcggtaaatacccgaccggtgccaccgagaaagagaagctcacactgctgcgcgccctggccgcacttgggcacaacgctgccgggatcatccctcttggcatggagctggattttctgaacgcagcccagggcgatccggccgcgttccagttgatgatcgagtggtgcgaacgaactcagtcaaaagccatcctcggtggcacgttgaccagccaagcagatggaaagacctccaccaacgccctgggcaatgtccacaacggggtacgcaaggacttgcgggacgccgacgcgaaactgttggcgaaaacactcagtcgtgacctggtctacccgattgccgtcctgaatggccttgtcgacagttgggcacgctgtccccggctggtcttcgacgtccaggaggccgaagacctcagcgcctacgccacagctcttccaccattggtgaagctcgggatgcagatccctcgcagttgggcgcaacagcgcctggcaatcccggagccagccgagggcgaggaagtgctcgcgaccgtgatcgagccggtcgtaccgccggcgcaggtacccacacgtgccttgggaaaagcggtggccaccgctgagacacctccgccgaagaccgccgaccagcagttggatgacgcgctccgcccgaccaccgaccgatggatcgaccaagtccgtgcgctggtgcagagtgcatccagcctggatgaaatccgtgatggcctggagcaactgcttccggacatgaccctggaacagtacgcggatgcgatggcgcaggccctggccgctgcggcgctacaggggcgagtcgagatcctgcaggaggtggccggtggcgcttag

SEQ ID NO: 324260 - DNA, 1239 bp, Pseudomonas aeruginosa
gtggcgcttagagcaacctcactgcctttcgccgagcagaaccagttcttccggcgcaagctcaatctaccgaccaacgcctggacggacatctacacccgcgagcatgactatgccttcgtcgtcgccggcgccaaccgcgacgacctggtgcaggacttccgtcaggcagtggagaaggcaatagccgatggcactacgctggaggagttccgccgtgacttcgaccgtatcgtcgccaagtacggctggagctaccggggcgggcgcaactggcgcagtcgagtgatctacgagaccaacatgcgcagcagctacatggccggtcgcctggagcagctcatggctgtgcgcgaggaacgtccttactggcaatacctgcacagcgatgctgttgagcatccgagaccgaagcatgagtcctggaatggcctggtcctgcgttgggacgatccttggtggcaataccatttcccgatcaatgcctggggatgccagtgcagcgtgcgcgcgctcagcgaggatgacctacgccgtatgggcaaggatggcccggacgaggcaccaccgattgtgtggcaggcccggaccatcggccagaacagcccagacgggccgcgagtggtcgaagtaccagaaggcattgatcccggcttcgagtacatgccgggccaagccagactggacactgcggtgcctcagcctcgcaatggcgggcctacgcctccggccggtctaccaagcactccggcttctgacccgctacctgcgcctcgtcctgttccgaccaaccagttgctggaccaggacatgctcgatgccgacgcgatcaaacgcttcctgcggccgttcggcgcgaccctggataagccggccgtcttccaggatgtagtcggtcagcgcgtagtggtggggcgcgagatgtttgtcagccgagccggcggtgatctgctagtagcggaatccggcatgtcgaagaagtggttgatgctggcggctgaagcactgcggcgtccggcagagatatgggtacggctggattgggtcgaatctctgaaaaaggctgtggtccgtcgatgttacctggccagcctgcaggtaagcggcgaagcggctcccgtccaggttgttgtcgagctggacgccaacggctgggcggcgagcgccgcggtcgtccagccagggcagcaaccgctggcaccatatcgccaaggtgttcggctgtaccaggagacgtga

SEQ ID NO: 324261 - DNA, 576 bp, Pseudomonas aeruginosa
gtggctggagtaacccttgaatacagcagtgagaaggtacttgaggcgctgagggcagccgctgatctcatgcgctccccggccccgatgttccgtgatatgggcgagtacatgctcatcgccttggacgaacgcttcgagagccagagcgcacctgacggtacgccttggcaggcgttgtccccggcctatcagcggcgaaagcggaagaaccaggacaagatcttggtgctcgatggctatctgaaaaacaccatccgatatcaggccagcgacgacgaactggcggtcgggtccaaccgtgcctatgcagcgattcatcaattcggtggtgaaatacagattgcggctcgcagccagcaagcgtatttccggcatgacgccaagaccaacgaggtcagcccccagttcgtgaacagacgtcgggcgaacttctctcagtgggtgtccctcggtccctacactatcaagatcccggctcggccgtggctaggcaccagcaaccgcgacgatgacgagctgctagcgatcgcacagaagcacctcgatcgagcgctttccgggaaaagctcctga

SEQ ID NO: 324262 - DNA, 1110 bp, Pseudomonas aeruginosa
atgaaaacgaagccccttctcgccgccatagctctcgccgcctgcagcttcgatatacaggcgccgaccgagggcaatctcatcaccctgcaggtaaccccggccgggcagttcaagccgcgcgacaaccgggaaatgaaagtccccgcctggaatattgacgctgcgttggcagcggctgtcgtgcagcggttcgcggcaaagaaaacgcctccggtgctcgactacgagcaccagaccctgtggaaagaggaaaacgggcagccggcacccgctgctggcttcttccgcgccctggagtggcgtgagggccagggcttgttcgcccaagtcgagctaaccgcccgtgcaaagcagtacatcaccgatggcgagtatcgctatttcagccctgtcttcctgttcgaccccgtgacgggtgacgtcctggaccttcagatgggagcgctcaccaacaacccggctatcgacggcatgcaagccctaagcgagcgcgctgcagccactttccaactgaccatcgatccatccaacgaggaatcgctcgtgaaaccactgctgaaagcggtgcttgccgcactcggcctggccgagaacaccaccgaggagcaggccatcgccgcgctctccgcccataccactgacctggcctcgatgcgcaagcagctgggcctcgacgacactgctgcctgcagcgccatgcttgcagcctgcactgggctgaaagccaaggcagcgaccgcagtagatccggccaagcatgttcccgttaccgtcgtcgatgagctgaagagcgagatcgcggcgctgaccatccgactcggccaacgcgacgagaaggaactggatgccgagatcgcgactgcactggaagacggccggctgcacaagagcatggaaaagtgggctcgggagttgggcaaggaaaaccgtgcctctcttactgcgtacctttccgctgcacagccgatcgctgcactgtccggctcgcagactcggggccagccgccggtaccggacgagaaaaccgggctgacggccgacgaactggccgtatgcacggccatgggtatcaccattgaggccttcaaggccgcgaaggaggcctga

SEQ ID NO: 324263 - DNA, 405 bp, Pseudomonas aeruginosa
atggccctgaccaaagaccgcaacaccccacgccgcgacggcatgcagttcaacgacccggtggcggccaacgccaagatctttgccggcagcctggtgtgtctcgacgcttcgggcaacgccgtaccaggagcgctgtcgaccaccattgcggcgcgcggtatcgcccaggagcaggtcgacaacaccggtggcgccgccggcgccaagcgtatcgaaacccgccggggtgtattccagctcgccaacagtgcctcggccgaccagatcacccgcgccgacatcggcaaggagtgcttcatcgtcgacgatcagacggtcgccaagacctctgccactgacacccgctcggttgccggcgtcgtccgcgatgtggatgacggcggtgtctgggtagagatctaa

SEQ ID NO: 324264 - DNA, 897 bp, Pseudomonas aeruginosa
atgattatcaaccagcaaaacctgcggaacctcttcatcggttaccgcgcggcgttccagaatgccttcgcaggtgttcagcctgacttcaaccagttcgtgctgaccgtgacgtccggtaatgcctccgagcagtatgggtggctcggtaactcgaccgcgttccgggaatggctcggcgaccgagtgatccagaacttgggcgtgcacgactacaccatcaagaacaagaccttcgagaacaccgtaggtgttcctcgcgagagcatcgaagacgacagctacgggctgttcacccccttgatggggcaattgggccaggactccgcgatgcacccggcggaactcgtctacgcgctgctcagtggtggtttcactcaaacctgctacgacggccagtacttcttcgacaccgaccacccggtaactagcgcggctggcaacgaggtttccgtcagcaacttccagggcggcagcggcacaccgtggttcctgctcgacaccacgcgaatcatgaagccgctgatcctacagaagcggaaggactacaacttcgtgaccatggacgccgagaaagacgaaaacgtcttcatgcgtaaggagtacgtatacggcgttgacgcgcgcttgaatgccggtttcgggttgtggcagctcgcctactcctccagggaagcgctggatgcgagcagcttcaacgatgtctacgcggcgatgcagagtttgcgtggagataagggcaaacgactcggtatccgaccgaagctcctggtcgttccgccatcgctgcgcagccaggcgttggaagtggtcaaggccgaacgcaatgcggctggagccaccaatatcaaccgcgacgtggtggacgtgcttgtcaccccgtggctggcggcctga

SEQ ID NO: 324265 - DNA, 516 bp, Pseudomonas aeruginosa
atggactacatcactctcgtccacctcgccgaacgtcctggtgcaaaggagctggctcaagtcgccaccgcccagcacctgaagatcgtcgattccgcgctcctcgatgccgcgttgcgtggtggagatctgagtgcctggacgccggagcaggtggcgggggttgatctcgtcctggagcgaatcaccgaggccatgaccgaggccgaaagcatcgtcaatggttacctggccaagcgaggctacggcctgccgctgagtccggtgcctggcctggttaccggctgggtgcgcgacatcggtcgctacctgctgcacaaggaccgaatctcagacgacaaggacgccatcctgcgcaactacaaggatgccttgaagttcctgcagatggtcgccgacggcacgttcagtctcggcgccgaggatccgatcgccaacaatcccatgttggccgatgttcgcttcgatgccgacgagaacgtattcaatcgccagcagctgaggagcttccggtga

SEQ ID NO: 324266 - DNA, 453 bp, Pseudomonas aeruginosa
gtgagcaacgctcctttcgatcaccgtctggtcatcgagcgcctcaccgctacggtgccggcgttgcgactgatcggcacggcagcggacttcggagcagttaaggcgctgcgggactatccaacgccggccgcctatgtgctgctcgctgaggaaagcggtgagccgcgaccaaccggcaatagcggtgggcctgcccggcagcgcgtcggcgcgctgttcggcgttgtgctggccgtccgcagctaccgatacgaccagttggccgatgcggccgacgatctccagtcgattctcgaccaggttcgcggcgcgatggtgggctgggtacccagtttgcccttggccaggggaacccagttcgttatcggcaaggtgctggactctgacgacaccacgctcctctggggcgagatctattccactcaacacgccatcgggagagacccatga

SEQ ID NO: 324267 - DNA, 204 bp, Pseudomonas aeruginosa
atgagtaccaagcaagtcgccgacaccgctgaagtgaagcgggagaaggtcattctgatcgccgatcacacccatggtgaacagaagtgcaagacgggtgacgagatcagtgtcaccagcatcgagaaagaatggttgattcgccacaagcgcattgctgcgccggccgatcaggccgctgccgccggcaaggcgaaggagtaa

SEQ ID NO: 324268 - DNA, 741 bp, Pseudomonas aeruginosa
atgtctctgatttctctccaaggcaagatttggatggctgagcgcagtgctcaaggcaaggcgttgaagcagacctgggtgggcaatgccccgacctgtgaactgcaattggccaccgaaaccaccaacaaaaccgagagcttcagcggtaatcgcctgcagtacggccagctcgaccgcggaaagaccgcgacgattaacctggcgctcgacgaatggctactgcccaacctgatcctggggctgtacgcgcagcaggtcgccattcccggcgtgacggtaactggcgaggcgcttcccacgccgattgcggttggtgatgtgttccgcctggcaaaacccttcatcagcgatctggtgctcacccagtcgagcactccgctcgtcgcaggaaccgactacaagatcgaatctgccacggccggtctgatcgagttcctgactgcccaagcatctgcggtaagcgccgcctatgagtccgaggaagctgtggcgctgacgatgttcacccaacggcctccggagcgctggctattcctggacggcatcgacaccgaaaccggcaagtcggtcttggtcgacttgttccgctgcaagttcaacccggtcggaactctggcaatgatccatgaggaatacggcaatctgccgttgaccggcagtgtcctgtatgacccgctgaatgccggtgatccgatgctcggtggatatggccgatacatcgagaagaaggcggcctga

SEQ ID NO: 324269 - DNA, 483 bp, Pseudomonas aeruginosa
atggcgcggaaggtaaccaggaagaaatctgccactggtgcagaggacctgtctgtcatccaccccgaccgcacgataatcattgcaggccgggacgtggtgatgcgcgagtatgggttcttcgagtcgctggagctgctccctctgttggaaccgatcctggtcgaccttgaggagcaagcgaaagcgaacgcgccctggccgggcatcgaggcggttccttctttcctgggcaatcatttctcggtcctggtacatctgattgccaaggcggcttcggtcgatatggagtggatgcgcgggcttggtgcagacgacggctatgaactggtctggtggtggtggatcgtcaatggccctttctgcaagcgctgcgccgagaaacgtctgctgacggcgcaggccatcgccgagcaggccaggaagcgggacgctggtcagacgccatcgactacctcgtcgccgccggttacggctccgtag

SEQ ID NO: 324270 - DNA, 3597 bp, Pseudomonas aeruginosa
atgaaagacggccaggctgccgtcgaagctttggcggccgcgatcagggatgtcggtagcaaggcgtccgaggccggcacgggcctgcagaaagtcggtgctaccggcgccgtcgaccaggcccaaggggccatcgacaagctcggccactcgctggatggtgtgagtgctaaggcgtccgaggccggcaagggcctacagaaggtcgggactaccgggggcgttgatcaggcccaggcgcccatcgacaagctcggccactcactggatggcgtgagtgacaaagcgtccgaggccagcaaggatctgcagaaggtcggggccaccggggccgtcgatcaggcccaggcctccgtcgacaggcttggccaatccctggactccacaggtaaacgcgcaggcgacgcatcccgtcagatcacccaagtcggcgaatccgcagagcaacaagctgctcgaatcaaggcaatggtcgcggcatcgctgcagcaaaagtctgcgcaagatgaggcggcagatagcacccagcgactgaataccgctgtccaggcaggaaacaccgcttggagggatagcgctcaggcgcagtccaacgccatgaacaccttccacaacgccgagcgcgcccgtgtccagcaggtcgctgcggaaaagcgcgcggcggaagctgcagccgccgctgctgctgagacctctcggcaggaagcggcagcccgcaagcttctcggggctattgatccaacttaccgctccctcgctcaattggcggaccaggaacgacagctcaccgagcactttcgtgctggtcgtattgaggctacggcgtacgcaagcgccttggacagaatccgagcgcggcgtgatgtcctcaatggcattggcaacgatgccaggacctctaccgtggctctcaacagcatgggagcggctatccgtcgagtgcagggcctgttggtggcaggcgtagctgggtacggcgtagcgtccttctccaaggaagtcgtcaacaccaacctgcagtggcagcaggcgttgtacaccatggaggcagctacggggtcggcggcgaaggcgaggcaggagttggagtacgtccgcgaggtttccgaacgcctcggcttggagctgctcaacaccagccaggcctattcccgcctggtggcggccgcgaaagaaaccccagagctaggcggttccctgcgcacgatcttcgaaggcgtcgcctcggccaccactgcgctgcacctcacccgccaggaaaccaacggcatcctgctcgccctggagcagatggtcagcaagggcaaggtccagacccaggagctagttctgcaactcggccagcgcgttcccggcgcgttctcgcttgccgccaaggctctggacaccaacaccaagcagctcagcgagtggctggaaaagggcatgatcccggcggccgagtttctgccgcggttcggcgctgccctgcaggaggcttatgggccagcctcacagaaagcggccaccggcttgcaggccgaactcaaccgtttggagaacgcattcactgacctgaagatccaggctggcgagtcggggttcatcgacaccttcactcaggccgtgcgagatctgcgtgatgtgctgaaagatccggcggtggtggagggcctgaatctcctgatcaagggcctgggtactgccatcggttatgcggccaagggggctgcgggcgtcgtcaacgtcaccaagttcgtcgcggaggagattgcggcgcgcgtgaacggtcccgccgctgatgacgtaccccgcttggacgatgccatcgctcgtgaaaccgagtacatggcaagggttcagtccgcgcttgacgatgcctacgagaagaacgaccagaagcgcatccagcgatacgaagaagcactcagcaaggcacaagcgcagatccagcaatggcaggaccagcgtgacgcggtgctgaacggtgccggccaggtcgcggcgctacccgcgactacggtcaccggtacaggccccaccaccaagacacccttcacgccatcaggcggcgaagacaaggccgctgcgcgcctggccaaacagaacgaagactgggtcaagcagttggagaaggaagcggcgacctacggcaagggccgggctgcgttgcgtgagtacgagcttgaccaacgcaatctgacaggagccctggaagcccgcgctcgcgccgcctgggcgaccctggatgcggcagaaaagcagaagaaggccgacgaacaggcaaagaaagacgccacaaccctgaagcaactcaacctggactaccttcgggccaccggccaaaccgtcgaagcggccggcgccgagatcgagaagaagtacggcgacctgcagaagcgtctgctcgccacgggtgacaccgaaggcgccggcctggtcagcaagctgatgggaatcgagaaggccaaggctgagctgcagcagctccaggaccaggtcgaccggatcttcggcgagcagtctcggcaggagtcgagtattcaggccgcccagcaggccggtctcgtcagcgaactggccgcgcggcagcaactgctagacctgcatcggtccaccgccgacgaggtagagcaacttgtgcctcgcatggaagagctggccaaggcaactggcgatccggcagcgatcgagcgcgtgaaggatctccgccagcagctcgaaaacacccgcgtggccgccgaccagctcactttggctctgcgatccggtatcgagaacggcatgcaggatgcgctgcgcggtctcgccgatggcaccctgtcgctgcaggaggccgcggtttcgttcctgcaggcggttagccgatcgctggccgacgttgccgcgcagcagctggcccagaaggctacagcagggctcatgagtccgttcggccaaggtgagcaagacaccagcatggtaacgggagccgcggccgtgacatcggctgcgggggctctggctgcggccggaggaacgctggttactggcgcagctgctctacagagtgccgccgggagtcttgcgctggcgaatggggtaaagggggcaggtgtcgctgccagtggtgccggtgcggccggtgcggccggtgcggctgccggtggtagcgggtggtggtcctcgatcacaagcatgttcggtttcgcctccggtgggcacatcaaggggccaggaacaggcaccagcgacagcatcccgatcctggcctccaacgacgagttcatgacccgtgccgccgtggtgaggcagcccggcgcactcgcgtttctggagcagttcaaccggtatggcatggctgccctgagcgcctgggcgaacccggtccgccacgctacgggcggcctgatggggactcctgctccggccatgcccgctccgggcttggctgcttcgcgcctgcaggagcccgcaaagaatctcagcgcgacgctgaagaacaaccagaacttctacctggtcgacgaccccagccgcatcggtgatgtgatggcaggtcgttacggcgacgaggcaatggttctgcacatcagccgcgacccgcagaaattccgtcaactactgggaatcaactga

SEQ ID NO: 324271 - DNA, 957 bp, Pseudomonas aeruginosa
atggccaccgaattcggcacagccgcgaaccacgccgacctggtcgaacgactcgtccagttcctcaccgccaacccgacgctcgtcgcggccggccaggcctacgagaaaacgttcgacaacaccattcccgcatccgggacggcgatcgcgattcgccaagtgacactgcgtgctcctggcctcggcggcgacgacagcatcttcatgggcgtccagtcctacggcgacaccgcgctcgactactacaacgtccggctgatgggcggtaccgcgttcaatcctggcgcgctgccgccgggtggtgacttctggacggcgttcgtcaactacagcccgcgagtacagctgcttgcctggaaccagccgatgccctactggttcttcgccaacggccgcaggttctggctggtcgtcaaggtcagcacgatttacgagtcggccggcgcgggcttcatcctgccaccctgtccgccgtcgcagttcccgtatccactggctgtcgtgggctcctaccgtggcgacgttgcaacccgatggtccgacgttagcgaccggcaccggggcatcagcagcccctacgagcgcagctgctatctccgcgatcccgccgggcgctggctcggtttcactgtcgcaggtgggtcagccaacgaatctgactacagcaatcggacgctcctcccgctgggctgcggccgttatgcgggcagcagtgaagccgttgtcaatcaactgcgggattcgttcgggaagttccccctcaaggcgttgagcctcgtgacccgcgaaactgaaggcaggaggtacttgggcgacttcgacggcgcctggtacgtcccgacgctcaactccggcgccgaagacgtcatcaccgagaacggagtcgatcacgttgttttccagacggcgtggcggtctggcaatccctggctctttgcaattagggcggactga

SEQ ID NO: 324272 - DNA, 924 bp, Pseudomonas aeruginosa
atggcctacttcaccggaacagcgaacaacccgtcggatctgctgggcaagctccgcacccacgctgaaaccctcggctgggtcaccgaccgcgcctcggcatcggaatggctttgtcacaacgccgacggctactggtcattcaacgccggttccaatcaatggcagctcgccggcaatacggggttcgataacggcctggcgtggaacgcgcagccgggcagctcggtgcagaacaacccgtattcgtcgaaagaagcaaccatagcgcagctcagcgccgggccattcacgcgctatcacctgttcgccaccgctgcctatctgcaccttcacgtcgaaatcgctgccggtcagttccgtccagtgatgatcggctccctgaacaagcgtggcgtcgcctatacaggcggtcagtatgtttgcggctcgttcatctacagccctggccaagcgctgacaaacaattggtcgtcgcaccccttcgatggctatcacattcggtacagtggcggcggcagcgtgctgcggctggacagcctcgacggtagcccatcgccggactggttgccgttcgactacacaacgaacgtctcccggcgcgtcgtcggccccggtcgcggaaactacagcagtcagtaccatcccgacgtggggctgatcgacgcgagcgccaacgagctgaacagctcgaccaacgtggtgccgtgcgccatctatgcgttcggcgctcagcagcgttcgaggtacattggcgaagcgcccgatttcggtctgtgccggatggacttcctcgcgcctggggactcgatcaccatcggaaccgacacatggcgcgtcttccctttgctgcagcgcggaacagccagcgatttcggcaacaccagcgcgctggtcggctatgcattccgggtggtcgagtag

SEQ ID NO: 324273 - DNA, 1707 bp, Pseudomonas aeruginosa
atggcgaccttccccggatttcaggtacctcggccggtcgaagcggtcgttgccggcatcaccccgaacatctccgctctgttcctgaaccaggacatcaccctcggctcggccagcgcctcgatctgggctggcagctatgcggcacaccagccggttgacgtcattcactcagcgtactcggcagttcaccagtccgacctggccgagaacttctacaaccgcatctggctgatccctggccgattggatctggggaacgtcgtgagcgtccaggaacgtcccgtctcagtttggaacgcccacttcacgccccgcaccctgtcgcagatcgatcgcgaggacgccgatggcatcagcctggccggccagccgtcgccgccgttgccgttcgcggcgctgcaggagcgcatctggactgttgcggtatcgacggatggaccgccggtagtggacgctcgcatcgtctggcaactgcaggacgagcagccgttgatcctggtcattaccggaaaccgaatcaccgcttggcccttcgcgccggactgggctgacggtgtccaagagtcgctggagtggttgaccgagctgctgacaagcacgtcgggagtcgagcaacggcgatcgctgcgcctgtcaccccggcgttcattcgaagccgagttctacgcggaggggcgcgagcgagtgctcctcgacctcagccttgcaggctggggtgggcgaatctgggcgctgccggtgtggccggacatccagttgctggcaagcgtcaccgctgccggcgcgctgacggtcgagtgcgatacgcgctggcgggacttccgtgccggcggccttgcgctgctgcgcggtgagtcagcattcgagtacgaggtcgtggagatccaggctctggcggcgtcggccattcagcttgcgcgcccggttcagcggcgctggccggccggctcccgcttgtaccccattcgcaccgcacagctgacggagcaaccggcgctgacccggctgaccgacaccctctacagcgcacaagcgcggttcctggtgatggacagcagcgattggccggaggtcatgccctcgacaacgtaccggggctggcctgtgctcgagcagcggcccgaggagtccgaagacttgtccgtgtcgtaccagcgcctgattgatgtcctggacaacgagacagggctgccgcagttcagtgaccaggctggaatagggttcccggtgcatggcttccgctggcagaccgagggccgcgaggagcacgcggcgctgcgcagcctgctgtatgccctgcgcggtaggcagaaagcgatctggattccgacccatgccgccgacctggtgctggtcgacacggtggctgcgaccagttccgtcctcgatgtcgagctggttggcctggcgaggttcttcagggctgatgcgcccggccggcgtgatatccgcatcgagctgtacggcgggcaggtcttccatcggcgcatcctcgacgtcagcgagctgaacgtcgacgtcgagcgcatggcgatcgacagcgcgctcggcacagttgtccggccgagcgacgttgcgcgcatctcgttcatgaccctctgccggcaagacagcgacagcgtgcagatcacccacgaaaccgacaccgacggcatcagcacagccagcacggtgttccgaggagtacgcgatgagcttcagtga

SEQ ID NO: 324274 - DNA, 819 bp, Pseudomonas aeruginosa
atgagcttcagtgatcgcgagcggtcgctcgccgatggccaggcgatcagcttgtacgacttccgcctcggcccgatccgttggacctacacaacagcgaatcgagacatcgagttcaacaacatgacgttccgggcgcggccggtgagcgacgatggacggcgcatgaccggccaggtcagcgccgacatcatgacggttactggcccgagcgacttggaagtcgcgcagctgtaccggggcgctcggccatcgaaggctccaacactgaccgtctgggacatccactggaacgagccgcaggggcttgtggtgtggatgggcaggatcgacgaggtgaactggccggccgacagccgggtgcagatcaagtgccggctgctcggcaccgaaccgcgtacatcgatcagcctcgcatggggacgtgagtgcccttacacggtgttcgatcacaactgccgggcagaccgcgagcaataccgcgtgccgttcacggtcgagttgcgtgatggcaacagcgtgacgggggccggcaacgcgatcggcggctaccccgatgcttggttccgcggaggctacgtcgagtgggacagcggccagggagtgatcgagcagcgtggtatccagctgcacaccggcaaccgcctggtcctggtgggtggcacctcgctgttggctcctggtactcgggctgtcgcgttccctggctgtgaccagctcattcagacctgcaacgacaagttcgacaacacgcccaactgcggtgcagtgccgtttcttccgggcaagtcgccgttcgacggcgatccctggtggtag

SEQ ID NO: 324275 - DNA, 231 bp, Pseudomonas aeruginosa
atgtgggtgcaaatcgcgattctggtcgcatcgtatctgatcagcagcgctacttctgcgaaagcgccgaagccgaaaccggaggcgctgacttccgaagatcttccgcagaccgaggacggcaccggccactacgtgatcttcggcgatgtgtggatcgaggactggatcgtcctcgggaccggtcacgagcggatgcaggcagtcaaatcgaaggggtcgaagaagtga

SEQ ID NO: 324276 - DNA, 2211 bp, Pseudomonas aeruginosa
atgggcggccgtagcaaagcgcaaactgtcggctttcgctacctcatgggcattctcatgggttttgccagggggccgctggatgagctggtcgagatcaaggcaggtgatcgcactgcatggaaaggatcggtcaagagcaaccagaccatccagatcaatgccggcgaattgttcggtggagacaaggccgagggtggcatcgtcgggccgctggacgtcatgttcggcgccccggaccaaccggtgaatcctcgactggcggcgatggtgggcggcctggtacctgcgttccgcggggtcaccactgctttcttcgacggtcagctctgcgcgatgaacaagtacccgaaagcctggatgagccggtggcgacgagcactcaacggatgggacggtggaacctggtatcccgagaaagcagtgatcagcctggccggcgaccaggtgaaggcgatgaaccccgctcacatcttgttcgagtgccagacaaaccgcgactggggccgtggcaaggatcgcggcctgctggaccaggcgtcgtatcggaaggccgcagatacgttgttcgccgagggctttggcctgtgcctcaagtttcgcgtggcagacgagttggacaacttcgagcagaccgtcctcgatcacattggcgccactcagttcctttcccgctcgaccggactctggacgctgcggctgatccgtgacgactacgacgtcgcgacgctgcccgtattcgatgaggacagcgggctgctcgggatcgacgacgacagcatcacatcgctcgacggcacggcgaaccagttcgtcgtcgtctggcatgaccccatcacaaacaccgaccggcgtgcccgtgcgaagaatgccggcgcgatccgcgcggccggtggcgtgataacgacgacgaaggagtatccgggcctaccgaccggcgagttggccggcagggtggcggcgcgcgactgcaacgtgtcgacgtcggctatccgcaagctccaagtgcggctcgatcggcgcgcctatgcgctgaaccctggcgacgtgttctgcgttcgcagccggaagcgcgggatcgaactgatcgtcctgcgggccggcaagatcgactatggcaccctcacgaagggcaccatcgccatcaccgcgctggaagacgtgttcggactgccggcagccgggacgtccgcagtccagccgccgaactggaccccacccgaccgcaccccgcgggtcattgcgacccgccggctcattgaggcgccgtaccgcgacctcgcggcggcactgagcgatgcggatctcgcccaactgcagcccgagacgggtgtcctcgccgtgataggcatgcggccgtccggcctgcagatgaactacgcgctgctcagccgcgtggggtctgcaccattcgaagagcggacgtccggcgacttctgcccggtcgcgacgatctcagcagatatcggccggggcctgtccagcgtcagcgtcacgcttgtccaaggggttgatcttgacctcgtcgaggtgggctcggccgcgatgatcgatgacgagatcttccgcgtcgacgcgatcaacgccgcggccggcaccgcggtgctcgcgcggggatgtgtcgatacgctgccagcgccgcatgaggccggcgcgctgatctggttctatgaagactggacggctgaggacacgcgtgagtacgtgaccggcgagacggtgcaagtaaagctgctgagccgtaccagctcggcgacgctcgcagagaacctggcaccggtcgactcactgcgaatgaaccagcgccaggcgcggccctatgcgccaggccgcgtgcttgtgtgcggtgttgcgtatccgactaagacctacggtgtgctgaccgtgtcttgggcgcaccgcaaccggctgctgcaggccgaccaactggttgactcgtctgcgagcagcatttcgctggaggctggcacgacatacacgctgagcatctacagcggcacaagcctgaagaagtcgtacaccggcctcaccggcacgacctggacttacccggtcgaggacgacatagcgcacgggctgctgccggtgctgcacatcgtgctgttcagcgttcgcgacggtctgcagagctggcagcagcacgacatcacaatcgaacgacacggccttggcttccgcctcggcgaggaacttggaggcgtagcacaatga

SEQ ID NO: 324277 - DNA, 1149 bp, Pseudomonas aeruginosa
atgactctttatatgggaccgaataccggtctgctgatcaatggcttgccgggagaagggcattacagcgatctgattcggatgtggcgctgggacgacttcctccgccagccggtcgtcaaggggcgcgtcgcctcgttgcccacaagcggccaggccgagggcgacacttacattttcaccggcagcggcgcgaaccagaaccgaattgcacgctggtgggcaacgggtgcgacgacgcccatttgggagtacatgccgccacgactgggctggcgggtgcaggttgcgaacgagacgacgccgagcggccaggtcaagacctacgagtattccggcagcgcctggactgagctggtgggcggtatgtcggacgcgcctagcgacggaaaggcatatgcccgcgaaagcggcgcctggactgagctgggatctgccgcgaagtcggcactcaacgttctgccgttcatgaacctgatgcccgacatggggcgcttcgcgggaaccgcagccaatccgctgaatacgatgttcacaacgtcatggactccaagcaccttcatcaatggctggaacggcgcggccctcgcagatgggggcaagttctcgttcgacaacagcacgaacggcggggcggggccggcgctcaatgcgagggtacaggcacttctcacggcaatgggccgcacctggacatcggtttcaaggtacggcgtcgagttcttcaccaccgttctgacggcgggatcgcagacaacaaccggctcggccggcgcggatggggttacgcgctatctgtgctgctccaacggcagtaagacagttttcaacgcgggcgcgtgggcgacggtggtcatgtggctgcgagtcgaaagcggctcagctcatatctcgtcggcgccttatacgacccatcgcctttggatcaatggcgctgttgctgctccaggggttgtgctgccggcaggccaatgggtgcatctgcgattctcgatgcagtcatataacggctatgacaacgcgtgtccgtacatctacgcatccgcaggggctcagatcgcgtttgcatgcccggcgtggttcggtggcctcgtcgatccgggtatccacgttgcacccatcctgacaatcaacggagcaagcgcatga

SEQ ID NO: 324278 - DNA, 291 bp, Pseudomonas aeruginosa
atgaccatgaaacgagttctactgaaaggcgagttcttcgcggaatgggatggcacgctggacgaggccgcagcactcgctggcgtcccggtcggcgacctggcgttccacccggatgatgtgctcgccgaggtcaaggagctacgccgccaggcctatcgcaccgagtctgacccgctgcgcctggaggccgagtttgacgccatcgccgctggttccgagccggatctggcggcatgggtcgcggccgtgcaggcgatcaaggcgcggtatccacttccctcggagtaa

SEQ ID NO: 324279 - DNA, 795 bp, Pseudomonas aeruginosa
atgtccgcccaacccatcatcccctggatagggggcaaacgtcggctcgccgatcggatcttccagttgttcccacgccactcctgctatgtagagccgttcgcaggaggagctgctctgtttttcctccgcccggtgccggcagaggttgaggttctcaacgacgtcaacggcgacttggtcaatctgtaccgggtcgttcagcaccacctggaggagttcgtccgtcaattcaaatgggcactcagttctcgccaggtattcaagtggctgcaggagacgcgcgtggagaccctgaccgacatccaacgcgcggccaggttctactacctgcagcagagtgccttcggcgggcgtgtggatggccaaagttacggaacggccaccacgcaaccgccaggcctcaacctgctgcggatcgaggaggcgctctctgccgctcacctgcgtctgagtaacacgtacatcgagcatctgacctggcaggactgcatgaagcgctacgaccgcgagcacacgctcttctacatggacccgccatactgggagactgagggctacggcgtgccgttcggcttcgagcaatacctggagatggctgagatgctgaagcggttgaaggggaaggcaatcatcagcctgaacgaccatccagatatccgacgctgctttaccgactatcacatcgaggcgacggacatccggtacacggtcggaggtggcaaggggagtgacgcgcgggaggttctgatcttcagttgggatatccaggcggaacccgccgggctattctga

SEQ ID NO: 324280 - DNA, 588 bp, Pseudomonas aeruginosa
atgtccccatctccatcgccagccctcgccgcactccgcgacgccacccgtgacctgcacgcagaactggaccgccgttcgccgttgggcgacgacgatctcgacgaccgcgcctacctcgaccatgccggacgcatccttggctggctcgaacccctggagcgcgcgctgcgcgacaaccgcagcggctggccggcggcgctgcgggccgacgcgcggctggtcaagagcacctggctggaaagcgacctgctggccggcggcatgagccgcgcgcaggtggaggcgctaccgcgctgcgccgacctgccgaatgcgacacaggccgcggaggtcttcggggtggcctacgtgatggaaggcgcgacgctgggcggcgcgtatctctacaaacgactagctccacgcctgcccggtctgccgctacagtggttgcggggctacggccaggcaaccggggtgcgctggcaggagtttctcgaacagctcgcccggcagatcgacagccccgaagccatcggccttgcgcaggatgcggcacaggctacattcctttcgtttcgtcgatgggttctcgacgaggcctga

SEQ ID NO: 324281 - DNA, 222 bp, Pseudomonas aeruginosa
atgctcgagagcgagatcgttgcggcacgccgggcctatgccgccagcctgggagtgacgcttagcggagcgatcagcaacgccgacgagccggtccatatccgccacgccgtcagcaattccaatcacaaccccaacgcctcaaaccgtatcaaccttgggagggcccgagcgtataaaaaaaggcgcgaggaaggtgattacttcttcatcgacacttga

SEQ ID NO: 324282 - DNA, 876 bp, Pseudomonas aeruginosa
gtgcaattgtctcagctccgcgccttctgcgccgtggcccacaccggctcgatcaacgccgcggcgaaggcgctgaaccgtgtcccgtcgagtctctccgtacgcatccgccagcttgaggaagacctcggttgccagctgttcctgcgcgagcaccagcgtctgcgcctgtcgccggacggtcggcgtctgctggagcatgcccggcgaatcctcgatctcagcgacagtacccgggccatgatgcgcaacgaagagagcggcggccgcctggtggtaggtgccctcgacgtggttctggtcgccttcatgccatgcctgatcgggcggttccgccaacgccaccgcgcgatcgaactggacatccgcagcgaagcctcggaagccttggtgcagcaggtctcggatggagtgctagacctggccctgagcgatggtcccgtgcgctctcagaccctggaaagtagcctggccttcgtcgacgaaatggtgctggttaccgagctggatcatccaccgatcaccagtccgcgcgacctgcgttgcgccgaactgtatgggttccgtcacgactgctcgttccgcttccgcatggatcgctggctggaggaagccgactgcctgcaacaactgccagtgctggaaatcgagtcctaccacaccatgctcgcctgcgtcagcgcaggcatgggtgccgcctgggtgctgcgctccgtgcttgcgacgctacctggcaaccaccaggtccgcgcgcatccgttgcgcgactatggcaccaccgagatccatttcatctggcacagcggccatctcacgcccaacgcgcaacgcttgatggctgtacaccaggacgcgctcgtcgagcgccgcgactga

SEQ ID NO: 324283 - DNA, 753 bp, Pseudomonas aeruginosa
atggatctgcaactcgcacagcgcagggtgctggttagtggcggttcgcgcggtatcggccgcgccatcgtcgaacattttctcgccgaaggggccgaggtggccttctgcgcccgtggtgaggcgggcgtggccgaagcagcggattgcttcggcgagcgtgcctttggcatgtctgtggacatcaccgacccgcagcaggtgcgcggttgggtaacgcgctcggcgctgcacttgggcggcatcgacatcgttgtgcccaacgtcagcgcgctggccggtggcggagacctggacacctggcggcgcgctttcgagaccgacctgctgggcagcgtgggcatggtcgctgccgccctgccgtggttgaaacgctccgaggctgcctcggtggtgctgatctccagtgtttctggccgcgaggtggacatgttcgccgagccctatggcgtgctcaaggcggccctggtccactacgggaagacgcttgccagccgccatgcggaggacggcattcgggtcaatacggtgtcgccgggcaacgtctatttcgaagatggcgtatggggcgcgatcgaacgggatagcccggaaaccttcgcccgttgtctcgccgccaatcccatggggcgcatggcgcgacccgacgaggtggcgcgggcggtgctgttcctggccagcccggcggccagcttcaccaccggaaccaacctgctggtggacggcgggttgacccggggcgtgcagttctga

SEQ ID NO: 324284 - DNA, 1743 bp, Pseudomonas aeruginosa
atgggcgcggggcgaaaaagaacgccgggcgaggcccggcagcacacccagaaaggtgccgacatgacttccactgcccgccgttcgttcgactacatcgtggtcggcgccggctccgccggttgcgtcctggccaaccgtctttccgccgatcccgccgtctcggtctgcctggtcgaggccggccccagcgaccgcacgccgctccccgccgcctacatccgcacgccggccgggatcatccgcctgatcgccaacccgaagtggaactggatgcatcgcttcgccgcccagcccggcaccgccaaccagccgatcgcctgcccgcgcggcaaggtctggggcggctccagcgcgatcaacgggatgatctacatccgcggcgaccgccacgactacgaccgctgggcatccctcggcaaccgtggctggagctacgacgagctgctgccctactttcgccgctcggaacatttcgagccgggcgaatcgccctggcacgggcgcggcggcgaattgaacgtcgccgcgcagcgcagcccgggcccgatcaaccaggtgttcttccaggccgccgaggaaatgggctggccgtacaacgccgacttcaacggcgagcgccaggaaggcatcggcccgttccacgtcacccaggtcaacggcgaacgctgtagcgcggcgcgcgccttcctgcacccggccctggcgcggcccaacctcaccgtgctcagctcggcgctgaccctgcgcgtgctgctggaaggtacccgcgccaccggcgtggagatcagccaggctggcgaggtcgtgcaattgcaggcacgccgcgaagtgatcctcagcgccggctcgatcaactcgccgcagctcctgttgctctccggcatcggcccggcggcggaactggcgcgccacggcatcgtccagcgccatgagttgcctggggtcggcgagaacctgcaggaccaccaggacatcgtgctgatgtaccgcaccgaggccaagctcggctacggcctgggcttctcgccgaagggctggctgccgctgctgcgctcgccctggcagtacctgttcggccggcgcggggcgctgacctcgaacaccgtcgagtccggtggcttcctccgcctcgacccgcaggcagagaccccggagctgggtctgatcgtcgcccccgcgctgaagaaccagccgcagcgcctggtccccttcggccacggggtcagcctgcacgtcgcggtgatgcacccgcagagccgcgggcgggtccgcctgaactcgccggacccgcacgaccggccgctgatcgaagccaacttcctcagccaccctgccgacctcgataccctggtccggggtttccaactggtccgcaaactggccgccagccgcagcttcgcccgtcacctcaagggcgagctggtaccgggcccgcaggtttccagccgcggccagatcgaggcctggatccgcgccaacctgggcaccgtgttccatccggtgggcacctgcaagatgggccacgaccagctcgcggtggtcgacgaccagttgcgcgtgcacggcctgcaaggcctgcgggtggccgatgcgtcgatcatgccgacgctgatcaccggcaataccaacgccccggcgatcatgatcggcgagaaggccgccgacctgatcctcggcaagccggcgccccatgcgccgacggaacagcggcgggatgcgccggagctggtagaggcctga

SEQ ID NO: 324285 - DNA, 1305 bp, Pseudomonas aeruginosa
atgaaaaccctccgcaccttgccggcgctgctctgcgccggtttcctcggtctctccgcgcaggccgccgaagacagccgcagcggcccgctggccgggttcggcgaacgactccagcgccacggcgtgaagacccacgcgcagttctggagcctgtcgctgaagaacctcgacaccggcccgcgccagcacagcttcggcaacagcggcgacctgttcctcggcgccgacctcgacctcgccaccctcgccggcctggacggcgcctcgctgcacatcgaggaaaccctgttcatcctcgaccgcggcaccggtcagcccaccgggccgagctggcagggcgcggtgggcagctacttcggcggcgcgccgctgcacaacgacatcggcgccaaccagctgagcctgctcacctggcagcagcagtggctgggcggacgcctcgacagccatctcggacggaccaatgcgcggcgctatttcctgatctacaactgcgagaccgtggtcacctgcaacgacccgatcatcgacgcctccaccggcatcctgccgccgccctacggcgcctggggcggctacttgaagtaccgggcgaccccgaccctgtacctgcacgccggggccttcgagtccaacccggtggattacctgaagaagcgccatggcctcgatttcggcaccgacgacgccagcggcaccagcctgctgctggggatcggcgacaagcgcgaggaaagcctcgatccctaccgctcgcactatgaactcaacgcctacctgaacaccgccaaccaggtcgacccgctcaccggcgccagcgaccacggcagcgccggcggcttcttcaagttccagcagctgttctggcgcgccgacggcggccgcctcgattcgccgagggcgctggggctgttcggctcgctgtcggtatcggccgacgacaagcagccgttccgtcatttcgccgagctgggcctgacctaccatgcgcccttcgaccgcacgcgggacaagctcaacctcaaggccagctacctgcgcctgaacgatcaccagctggagttccagcgccaggcgcggatcgccgctggcggcgatgcgaaactcggccagcgcgacgtgtacgccctggaaaccaatgcgcacatcgcactgaccccgcacatcgcgctggagccgtcggtgcagtacatcttcaacccggacaactactacaaccccggcgctcgcgaactgagcggagacggtttcgtcgtcggcctgcaactgatggtcgacatgggctcgctgctggggctttag

SEQ ID NO: 324286 - DNA, 645 bp, Pseudomonas aeruginosa
atggtagctattacccacacacccaaactcaaacacctagacaagctgctcgcacactgtcaccgccgccgctacaccgcaaagagcaccatcatctatgccggcgatcgctgcgaaacgctgttcttcatcatcaagggttcggtcaccatcctcatcgaggacgacgacggccgcgaaatgatcatcggctacctcaacagcggtgatttcttcggcgagctgggattgttcgaaaaggaaggcagcgaacaggaacgcagcgcctgggttcgcgccaaggtggaatgcgaagtcgccgagatcagctatgcgaagttccgcgaactgtcgcagcaggactcggagatcctctacaccctcggcagccagatggccgaccgcctgcgcaagaccacccgcaaggtgggcgacctggccttcctcgacgtcaccggacgcgtcgcccgcaccttgctggacctgtgccagcaaccggacgccatgacccacccggacggcatgcagatcaagatcacccgccaggagatcggccggatcgtcggctgctcgcgggaaatggtcggacgcgtgctgaagagcctggaggagcagggcctggtgcatgtgaaaggaaagaccatggtggtcttcggcacccgctga

SEQ ID NO: 324287 - DNA, 990 bp, Pseudomonas aeruginosa
gtgcaaccgagtttccgtatcgttgccgacggcaccgacgtcacccagcggctgaatgaccgcctgctcaagctgaccctgctggacaagccgggcatggagtccgacagcctgaccttgaggatcgacgatcgcgatggacaggtggccttacccaggcgcggtgcggtgctggaggttcatctcggctatgccggcgagccactgatgcgcatgggacgctttaccgtggacaccttgcagtgggctggtccgccggactgcctgaccgtcactgccaaggccggcgacatgcgcggcagtggcaagacgatacgcagcggaggttgggagggcactaccctggctcaggtctgccgcgatgttggcgcacgcaacggctggcgcgtggagtgtccgttgcaggtggcgatcgcccgggtcgaccaggtcaatgagtccgactaccacttcgtcacccgtctggcgcgccagtacgactgcaccgccaagctggccgagggcatgctcatggtgctgccgcgacagagcgggcagagcgccacggggcgtcggatcgaacctttggtgttgggacgtgctgacgtcggtagcttcgacgttaccttcgacgaccgcagcctgatgagaacggtgaagacccgctaccaattgcccggcagcggcgaggtcaagagcgtcgagttgaagaacccgaaggcaccggctacggctatgggcgagcatgtcgaccggcacctctataccagccgtggagaggccgagcaggcggcgaaggctcgcctggcgagcttcagccgctccagcgccagtgtgcgcctggaactgccagggcgtggcgacctgttcgccgagcgcagcctgctgctccaaggcttcaaggcgggaatcgacggcgagttcctgatcgactcggtggagcacacctacagctccagcggatggaccactgtcgtgcaatgcaacggcggccgaggcggcaaggggtga

SEQ ID NO: 324288 - DNA, 207 bp, Pseudomonas aeruginosa
atggcgacgacctgccgaaccgctgacggcgacatgctggacagcctctgctaccacgtctatggccatctgttgggctgcgtcgaggcgaccctcgacgccaatcccgggctggccgatgagcagcagccattccgcgccggcttgctgatcagtttccctgacatgccggtggtcaatgtcgaacaggtgcgcctgtgggattga

SEQ ID NO: 324289 - DNA, 873 bp, Pseudomonas aeruginosa
atggcatatctggaacaattgcaggccggcctgaggtacctgggtcgcgccggcgagtccggacgcaagagtctggacaaggtggtcgctccggtgaacggcgcgatcagcgagatccgcggcgcagccgcggagctggagaacctgcccggcgtatcgccggaaatggctgcccggctgcagcgtgccatgcgcggcatcggccaggcgcagggcaaggtgaaccgcgtggtctccacctatgaccgggcgagccgggcgttgcttggtatcgacgaacgcctggatgcgctgaaggtgcaggtgaacagtgccgcgcaggcggtcggcaaggtcgctggcgacatcagtccgacgctggcgggggtgctgccgtcgtggctgctggcaccctcggcgacgcccccgagcgaggccgcagcgtccttgccgcacctgctggtactgcagccgctgaccgccaatgcccaaccgttctacttcaacctgaatactgccgccttcgacgccctgcagcgcaacagtgcctacaactggagcgggcaggtgcgcctgggtcggcggccggcgctgcagagcgtcggcatgggcgaggagagcatcctgctcaagggtgcggtattcccgctgcgtcgacaggtaggtaaccaggaaaaggtcgtcggtctggagcagctcgaagcgctgcgccggttggcggagcggcgtgagccgctgatcctgagcagcggctacggcgaggtgcagatgggcctctggtgtctggtgcggatcagcgagaaccagagcgccctactgggcaacggcgctccccgcaaacaaaccttcgacctggagttcaagcgctatggcgacgacctgccgaaccgctga

SEQ ID NO: 324290 - DNA, 2238 bp, Pseudomonas aeruginosa
atgagtaaagacatggacctggtggtctccatcggcggcatcgccgacccctccttgggcaaggcattcgagaccgtcaaggcacggctcgacagtctccaggaacgtgcccgccaggcttccagcctgagggatgtgctgggagacgccatacgcctggagcgagagctcgccgatatgcgcaaggttggggatcgcggcgttgctgagcatgcccggcagcttggcgaacgccaggagcaactgaagcgactcggcatcgaggccagggccgcgggcgatgcctacgctcgactgggcgagatgcagcgtggcctggatatgcaggtccgcggcctgcaacggctggagcaggccagccaggcaatgccattggctagcgcattttccggactggtcgtggaagccagcaagacggctgccggttatcaagcgcggttgcgcgacctggcgatccgcaacggcctggacgccggccgggagccagccttggcatccctgatccaggacagtgcaagccagagcggcctgggacgcacggcgacgctggacatgctggagcacttgaacgccaccggcatggggttcgccgccgcgcaaatgaatctgggactggcgggccgcttcggctttggccaagggattgcttcagccgaggctgcggggctggttcgagcgttgcaactggcccagggttcggactcgccagagcaattgtccgcctccctcgaccgcctggtcgtcctgggtaaaggcagagtcggcagtgaggccctggcgcgtcgcctgcctgccttgttgtcagcgctgggcaatgcgggagaggccacggccggcgatgtcggtgcactgggtgccttgctggagattcaggcaaagaacaccacgccagacaaagcggacgtgcggatgaaggcctggctggagttcgtcggcagcggcagcttgaaacgcgcttatggccaggactacgaccgggacctggaagcgctgcgcaaggacggagcgagtctgctggaggccaacctggagctggctgcgcgctatcgggataagggcggcaagctcagcgccggcgtggcgtcgccggcgcttgaagcctatcgagcgtcgcgcggcgagttccagggcttgctcgaatcccagcagtcttccgtaggctcttcggagcgcgatgcgcagcgtcgcaaggggatgtcccaggagctgtggaaggcttccagcgacagttgggagagggcgcagaccgctttgggcagcgccctgaatccatatctggacaacctggccaaggggagcaaggcactcggcgagtcgactgcggagctgctcgaagcctatccgcggacgacggccggtcttaccgccgccgcaggtgcggtgttatccgggtatctcgcctacaagggagggcgcggcgctatcgacgtgctgcgtggcggtcggctcggtcggcgagggaccgctgccgtcggcgacctgatcgaacggggtgcaggccgggtatcgggtggtagcgaaatacaacgcgtgttcgttaccaactggccggtgccgggaggcgactctacgctggagtccgcgaggaggccggcacaacgaaagcgcggtcaaacaccacgcaggaagagaggcaagggcggtgggctgaaggcccgctcccttccatcccttggcttctcggctggaggaggcttgggggcgatggcaggaaagctgccgcgcctgtcgcgtttgcccatacgcaacgcgccgctgcaagtggcctcgtcgttgatcgatgttgctgaggtctactccagcgacctgtcggagagcgaaaagaccgttgcctatggcgaggcaggtggctccctggctggttccctggctggcgccgctctgggagcgagcatcggctcggtggtgccggtggtcggtacgctgatcggtggattggttggcggcgctatcggcgcctggggcggtagcgaactgggggggcgcctggggcgcagtctggctggcgatccgccggcggcctcggacaacaagccggcggtggccgtaccacaggccggacccgtcgcggctgcgcccaactggaccttcgcgccgcagatcaacctgacggtgcaaggcaacgtgcacgagccgcagcgcctggccgacgagttgctgccctacctgcaacgcatgcttgtcgacttcgccgacgagcggcagcggcgcagcctctacgacccggcgatggtttaa

SEQ ID NO: 324291 - DNA, 345 bp, Pseudomonas aeruginosa
atgacccaagagaatcgactgccgggctggctgacgctggatgccgacgccgccctcgttcgtctctcgcgtccggcacagtgcaacggggtcagcgtcgacacgctgaccctgcgtgcacccaccgtgcgtgatatccgcctggccggcaaggtggccggcgacgatgccgaggagcgcgaactgcaactgttcgcctcgctggcgcaggtcagccgccaggacctggaggggctgaagctgagcgactaccagcggctgcaaggcgcctactttcgcctggtgcaagacgacacggacgacaccttcgcgtatgcgtcaactggcgaggcgcctggccattga

SEQ ID NO: 324292 - DNA, 504 bp, Pseudomonas aeruginosa
atgattccgcaaaccctgaccaataccaatctgttcatcgacggcgtgagcttcgccggtgacgtgccatccctgaccctgcccaagctggctgtgaagaccgagcaataccgtgccggcggcatggatgcgccggtatccatcgacatgggcctggaggcgatggaagccaagttctccaccaacggtgcccgccgagaagcgctgaatttcttcggcctggccgaccagagcgctttcaatggcgtgttccgtggctccttcaagggccagaagggcgccagcgtgccattggtggctaccctgcgcggcctgctcaaggaggtcgacccgggcgactggaaagccggcgagaaagccgagttcaagtacgccgttgcggtcagctactacaagctggaagtcgatggccgcgaggtctacgagatcgatccggtcaacggtgtccgcgcgatcaacggtgtcgaccagttggccggcatgcgcaacgacctcggcttgtaa

SEQ ID NO: 324293 - DNA, 1161 bp, Pseudomonas aeruginosa
atgagtttcttccacggcgttacggtaaccaacgtcgatatcggtgcgcgcaccatcgcgctgccggccagttccgtcatcggcctctgcgatgtgttcacgccgggggcgcaggcaagcgccaagcccaacgtcccggtgctgctcaccagcaagaaggacgccgccgcggcgttcggcatcggctcgtctatctacctggcctgcgaggccatctataaccgtgcccaggccgtgatcgtggcggtgggcgtggaagccgcggagactcccgaggcccaggccagcgccgtcataggtggtatcagtgccgccggcgagcgcaccgggctgcaggctttgctcgacggcaagagccgcttcaatgcccagccacgtctactagttgcgccgggtcattcggcccagcaagcggtggccaccgccatggacgggctggccgagaaactgcgggccatcgccattctcgatggtcccaatagcaccgacgaggcggccgtcgcctacgccaagaacttcggcagcaagcgccttttcatggtcgacccgggcgttcaggtttgggacagcgccaccaatgccgcgcgcaacgccccggcttcggcctacgccgccggcctgttcgcctggaccgacgccgagtacggcttctggtcctcgccgtcgaacaaggagatcaagggcgtcaccggcaccagccgtccggtggagttcctcgacggcgatgagacctgtcgcgccaacctgctcaacaacgccaatatcgcgacgatcattcgcgacgatggctatcgcctgtggggcaaccgcaccttgtccagcgacagcaagtgggctttcgtcacccgtgttcggaccatggacctggtgatggatgcgatcctcgccgggcacaagtgggcggtggaccgcggtatcaccaagacctacgtgaaggatgtcaccgagggcctgcgcgccttcatgcgcgatctgaagaaccagggagcggtgatcaacttcgaggtctatgccgacccggacctgaacagcgccagccagctggcccagggcaaggtgtactggaacatccgcttcaccgatgtgccgcctgccgagaaccccaatttccgtgtcgaggtgaccgatcagtggctcaccgaagttctggatgtcgcctaa

SEQ ID NO: 324294 - DNA, 441 bp, Pseudomonas aeruginosa
atgatttttttccatgccgccacgggcggcttttattcgaaggaaattcatgggtcccgcatgcctctggaggatgaaatgcatcctctcgaagacgccgagtaccaggctcttcttcgtgcgcagagcgaagggaaacgaattgtcacggaccacaccggtcgccctatctgcgtcgatccaccggctccggccaaggacattctggtccaacgggaacgcatctggcgcgaccggcagttacagctcaccgacgggcctctcgctcggcatcgtgacgagcaggacctgggaaaaactacgactctgagccaggagcagcttcgtgagctaactctctatcgcgccgttcttcgcgactggcctattgccgcggagtttcccgacctgaacgcaaggcccgagccgcctgcctggctccaatcgctcatcaccccctga

SEQ ID NO: 324295 - DNA, 2106 bp, Pseudomonas aeruginosa
atgacgaccaatactccgaaatacggtggcctgctcaccgacataggtgccgctgcgctggctgcggccagtgcagcaggcaagaaatggcagccgactcatatgctgatcggcgatgccggcggtgcgccgggcgacacgccggatccattgccttctgcggcgcagaagagcctgatcaaccaacgccatcgggctcagctgaatcggctgttcgtttccgacaagaacgccaataccttggttgccgaggtggtgctgccagttgaggtaggtggcttctggatccgcgagatcggcctgcaggatgccgacggcaagttcgtcgcggtatccaactgcccgcccagctacaaggctgcaatggaaagtggcagtgcgcggacccagaccattcgggtgaacatcgcgctctccggcctggagaatgtccagctgctgatcgacaacggcatcatctacgccactcaggactgggtgaaggaaaaggtcgctgccgatttcaagggccgcaagattctggctggcaatggcttggtcggtgggggcgatctttctgccgaccgcagcattggtctggcgccttccggcgtgacggcgggcagctatcgttcggtcacggtgaacgccaacggggtggtcacccagggcagcaatccgaccaccctggccggctatgcgatcggagatgcctataccaaggccgataccgatggaaaactggcgcagaaagcgaacaaggccaccaccctggccggctatggcattaccgatgcgctgcgagtcgatggcaacgccgtgtcatccagcaggctggccgcaccgcgtagcctggcagccagtggcgatgcctcctggtcggtgaccttcgacggcagtgccaatgtttctgcgccgctgagtctttccgctaccggtgtggcggcgggcagctatccgaaggtgaccgtggatacgaagggaagggtgactgctggaatggcgctggcggcgacggacattcccgggctggatgcttcgaagttggtcagcggggtgctggccgagcagcgtttgccggtattcgcgcgcgggttggctactgctgtctcgaacagtagcgatccgaacaccgcgaccgtgccgttgatgctgaccaatcatgcgaacggacctgttgccggacgatacttctacatccagtcgatgttctatccggatcagaacggcaatgcttcgcagattgcaacgagctacaacgctacatccgagatgtatgtacgggtgtcctacgcggccaaccctagcatccgggagtggttgccctggcagcgttgcgacattggaggttccttcacgaagacgactgacggatccattggaaatggcgtcaatataaacagcttcgtcaattccggatggtggttgcaatcgacatcggaatgggcggcgggtggagctaactatcccgtggggctggccggtttgctgattgtctaccgcgcacatgcagaccatatctatcagacctacgtaacactcaacggaagcacatattcgcgctgctgctatgcgggctcttggcgtccgtggcggcagaactgggacgatggaaacttcgatccggccagctacctgccaaaggcgggatttacctgggcggctttgccgggtaagccggcaactttcccgccctcagggcataaccacgataccagccagatcacctccggcatcttgcctctcgctcgtggtggccttggcgccaatacagcggccggagcacgcaacaacattggtgccggagtgccggccacggcgagccgggcgctcaatggttggtggaaggacaacgataccggtctgatcgtccagtggatgcaggtgaacgtaggagatcatcccggtggaataatcgatcgtaccttgacgttcccgatcgcgttccctagcgcctgtctgcatgtcgtaccgactgtcaaggaggtggggcgaccagcgacgtccgcgtcgaccgttacggtcgccgatgtcagcgtcagcaacacgggatgtgtgatcgtttcctccgagtactacggactggctcaaaactatggcatcagagtgatggccatcggctattga

SEQ ID NO: 324296 - DNA, 534 bp, Pseudomonas aeruginosa
atgagtagccgcctgctgccgccaaacaggagttctctggaacgctctctgggtgatgtattgcctgccgagctgccggtgccgcttcgtgagcttaacgatccggcacgctgtgaggcggccttgctgccctacctggcctggacgcgctcggtggaccgctgggacccggactggagcgacgaggccaagcgcaatgcggtagcgacgtccttcgtcctgcaccagcgcaaaggcacgctgaccgcgttgcgccaagtggtcgagccgatcggtgcgctgagcgaggtcaccgaatggtggcagcgaagcccgcttggcgtgccggggaccttcgagatcaccgtggacgtcagcgaccgtggcatcgacgaaggcaccgtactggagctggagcgcttgctcgatgacgtccgcccggtgagcagacacctgacccggctggacctgcgcattaccccggtaatccggtcccgtcacggactggccgtgaccgacggcgacaccctggaaatcttcccctggaaacagtga

SEQ ID NO: 324297 - DNA, 888 bp, Pseudomonas aeruginosa
gtgatcatcgatctttcccagttgccggagccagaggttatcgaaaacctcgatttcgagacgatttaccaagagctgttgggcgacttccgcgaagccatggctggcgaatggacagcggaggtggagtccgatccggttctcaaacttctgcaactggcggcctatcgagaactgctgctgcgggcgcggatcaacgatgcggcgcgggcggtgatgctggcatacgccagcggtgccgatctcgaccagatcggtgccggcttcaatgtgcagcgtttgctgatcaggcccgctcagcccgaggcggtaccgccggtggaggcgcagtacgagagcgacaagtcgctgcgcaatcgcatccagctcgcgttcgagcagctatccgtcgcaggaccgcggaacgcctatatagcccatgcgctgggcgcggatggaagggtggcggatgcctctgcgaccagtccggcgccctgcgaagtgctgatcagcgtgctcggggtggaaggcaacgggcaggcaccggaaacggtgttgcaggcagtgcgcctggcgctgaacgcggaggacgtgcgtcctgtcgcggatcgggtaacggtgcgctcggcaggaatcgttccctatcaggtcaaggcgcagctctacctgtttcccggccccgaggccgagctgatccgtgccgccgccgaggcttcgctgcgcgactacatttccgcccagcgccgcctgggccgcgacatccggcgttcggccctgttcgccaccctgcatgtcgaaggcgtgcagcgcgtcgaactgcaggagcctgcggccgacgtggtcctggatgaaacccaggcggcctattgcacggggtacgcgatcaccttgggaggcgtcgatgagtag

SEQ ID NO: 324298 - DNA, 327 bp, Pseudomonas aeruginosa
atgatcgggatggatcgccgtagcgggctgcccctgtccggcctggctcatcttaaacagtccgtcgaggacatcctgaccaccccgttgggcagcaggcgcatgcgccccgagtacggcagcaagctgcggcggatggtcgacatgccggtgagcgaaggctggaaaagcgccgtgcaggccgaggtagcccgttccctggggcgctgggaaccgcgcatcgcattgtctgccgtgcgagtcgtcgcggtcgtcgatggccgcgtggatctgctcctgagcggcgtgttcgagggcgagaacatcaatatggaggtctcggcgtga

SEQ ID NO: 324299 - DNA, 558 bp, Pseudomonas aeruginosa
atgagctatgtcagtgcggagcatgaccgcatgctcgccgcgatgatcctgccctgcgtggtggtcgccgtggacctggcagcggcgcgggtacgggtgcgctccggcgactggaccagcggctggctgcgctggcactccctggcagccggcaaggttcgacactggcgtgcgccgagcataggcgaacaggggacactgctcagcccgtcgggcggagtgtcaatgggcacctttattcccggtctgtacggcgatgcgggcacggcgccggacaacagcgccagcagtgagacctggcgtttcgacgacggcgcctcgttgagttacgactgggctgcacatcgctaccgcgtcgagctgcccagcggcacagtggaagtgaaggtcggcgccagcgaggtgcgggtcagcgacggggcggtcagtctcaaggcgccgaagatcagcctggaaggaccggtggagatcgccgggacactgacggtcagcggagacatcctcggcggcggctcgatcatcgacaccgccggcaacagcaaccaccacacccattga

SEQ ID NO: 324300 - DNA, 516 bp, Pseudomonas aeruginosa
atgcctgaacaggctgttacgctcgaggctctgtacgcggccatcgagcaggtactgcgtgagcgtctgccggaggcgcagttgatcggcttctggccaggcgtgccggaaaataccccggcggtttccctggagatagccgagctactgcccgagcgcgatcccggtaccggcgagagtgccctgctgtgccgcctgcaggcgcggataatggtgccgcctggtgccgatcgccaggcggtatccattgcttgcggaatcgttcggacattgcgcgagcagacctggaacctgtctctggaaccggcgcgcttcgtacgctcggccgtcgacggcagtcgcgaggagctgaagagcctgcgtgtctggctggtcgagtggacgcagtcgctgcgtctcggagacccggagtgggcctgggaggaccagccgcccggcagcctgatgctgggcttcgacccgcagaccggccccggccatgagccggactacttcgctccggaggcgttggcatga

SEQ ID NO: 324301 - DNA, 1038 bp, Pseudomonas aeruginosa
atgagcgcgccccgggttcgcctcggcgacctctcggtcggcttcgtccaggcgctggccgacgccctgctcgccgccggcgtcgagcccgcagcactgctcgagcagtacggcctcgaccagcggcgcctggccgaacccggggcgcgcctgtcgatccctcgctacatgcgcctcggccatgccgccatacagctcagcggcgaccccgcccttggcctgcagatgggccgcctgagccgtctcggacagatgggcctggccggcgtcagcgtcgcccaggcgcccaacctgcgcgccgccgcgcgggcaatgatccacctggaaccgctttacgcgcagaactaccggggccagtcgagcctggtggaagacgccggcggcgcctggctgcgcttctattcgatcagcccttataacgcctataaccgcttcgtcgtcgattcggtgctggcaggctggatcagccatctcggcgccctggcaaggcagccgttgaaagcggagcgggtggagatcgaatatccagcgccgccttgggccgagcgctacgaggcattcttcggctgcccggtggaattcggcgcgccgaccaaccagttgcgcctgagccaggccagcctggccctggcgaatgccgagcactgtccgagcacctggagccagatgctggaactctgcaaccgcgaactggagcagttgacccgcacccgcagttggcgcgagcgcgtcagccgcctgctggggccgatgctcaatggccgcgagccggacctcgaggaaatcgccgcgcgcctcaagttgccgacctggaccctgcggcgcaagctggccgaggaaggcacccagttccgcagcatcctcaacgacacccgccgcgacctggcgatggtctacatccgcgagaccgacctggctttcggcgaaatcgcctacctgctcggcttcgcctcggcggaagccttccagcgcgccttcaagcgctggagcgggcagacgcccggcgaattccgccgcgcccagcgacagagcgcctga

SEQ ID NO: 324302 - DNA, 939 bp, Pseudomonas aeruginosa
atgctgagcgccgccccgggcgtcgaactgggcctcgacgagcttctggaaatgcgccaccggctccacgaagcgcgcctgttctcctcgcagaaccgccgcagcccgctggtcggcctgcatcactcgcgcctgcgcggacgcggcgtggacttcgaccaggtgcgcatctaccagcccggcgacgacgtacggaccatcgactggcgcgtcaccgcgcgcacccgcgagccgcacaccaagctgttccacgaggaacgcgagcgaccggtgttcgtcctggtcgaacagagccagcgcctgttcttcggctccggcctgtgcttcaaggcagtgctggcggcacgcgcggcggccttcatcggctggtcggcgctggcccacaacgaccgtatcggcggcctggtattcagcgaccgcgactgccacgaaatcaagccgcgacgcagcaagcacagcctgctgcaactgttcaaccagctattgcgggccaatcgcgagctgcgcgagacgccggccgagcggcctggcgaactgttcggcctggccctgcgccgcgcccgcgaagtgctgcgcccgggcagcctgatcctggtgctgtgcgacgagcgcacactcaatgacgtcgccgagcagcaactcagcctgatcgcacgccataccgacctggtgctgctgccgctgtccgacccgctcgaccatgccctccccgccgccggactgctgcgcttccgcgaaggcgccgccgacctcgagctggacacccacgccgacgagctgcgccaggcctatcgcgaactggccgaggcgcgccgcgcgcgctggcagcggctggcccagcgactgggcgtgccgctgctgccgctgtcgacccaggaagacctggtggagcagttgcgggacctgctggaacaacaccagccggggtatcgcgcatga

SEQ ID NO: 324303 - DNA, 1524 bp, Pseudomonas aeruginosa
atgaccgaacacaccgctccgacggcgcccgtcgccgatgtctgcctgctgctggagggcacctggccctatgtccgcggcggcgtctccagctgggtcaaccagttgatcctcggtctccccgacctgaccttctcggtgttcttcatcggcggccagaaggatgcctacggcaagcgccactacccgatcccggacaatgtgctgcacatcgaggaacacttcctggaaaccgcctggagttcgccgaacccgcagacgcgacagggcagtagcgagaccgaaaaggcgttgcgcgatctgcaccgtttcttccactacccggagacgccggacgtggaggagggcgacgcgctgctcgacctgctcgccgagggccgcatcggccgcgaggactttctccacagcaaggccagttgggaggcgatcaccgcaggctacgagcgctattgcaccgatccgtccttcgtcaattacttctggaccctgcgctcgatgcaggcgccggtgttcatgctcgccgaggcggcccggcggatgccgcgggcgcgcatgctgcactcgatctccaccggctacgccggcctgctgggctgcatcctgcaacgtcgctggggctgccgctacctgctcagcgagcacggcatctacaccaaggagcgcaagatcgacctggcccaggccaactggatcgcggagaaccccgacgagcagctgagtaccggactggatgccgaggtcagctacatccgtcgcttgtggatccgcttcttcgagcgtgtcggcctgctcacctatcgcgccgccaatccgatcgtcgccctctacgaaggcaaccgccagcgccaggtactcgatggcgccgagccacggcgcacccgggtgatccccaacggcatcgacctcgatgcctgggccggcgccctcgaacggcggccgccggggattccgccggtggtcgggctggtcggccgggtagtgccgatcaaggacgtgaagaccttcatccgcgccatgcgcggggtggtcagcgcgatgccggaggcggagggctggatcgtcggtccggaggaggaagatccggactatgccagcgaatgccgcagcctggtggccagcctcggcctgcaggacaaggtgaagttcctcggtttccgtcggatcggcgaggtcctgccgcaactcggcctgatggtcctcacctcgatcagcgaagcgcagccgctggtgatcctcgaagcctgggctgccggcgccccggtggtgagcagcgacgtcggctcctgccgcgaactgatcgaaggcgccgacgccgaagatcgcgccctgggtcgcgccggggaggtggtggcgatcgccgacccgcaggccacttcgcgggcgatcctcgccctgctgcgcaatccgcagcgctggcaggcggcccaggcggtcggcctgcaacgggtcgaacgctactacaccgaggcgctgatgctcggacgttaccgcgggctgtaccgcgaagccacggagattgcatga

SEQ ID NO: 324304 - DNA, 1905 bp, Pseudomonas aeruginosa
gtgttcccttgccaaccccgttcgctactcgccggcgtcctgctggcgagcgccctgcccgctcacgcggagctgccccacgcgcccgcctacatcgatgacagcgcctacccggccgcggcccgccagcgcatcctgccaccgatgttcgagcagaagctgggcagcctgcgctacctcgccaagcccggcgaccccttgatcacccaggccgagagcagcgacttccagcgcaccagcgactaccgcgagacccgcgcctacctggagaaactggtagccgcctcctccggccgcatcgccctgcgcgagttgcccgagcgcagcgccgagggccacccgatgctgctggtgaccgcctccaccgaggccgacaagtccgccgccggcctgaagcgctccgccaagccgaccttgctggtggaagccgagatccatcccggcgaggccaacggcaaggacgccatgttcatgctgctgcgcgacatgagcgctgccgaccgcccgctcgccgggctgctggagaagatcaacctgctgttcatcccggtggtcaacgtcgacggcgacctgcgccgcagcgcctacgggcggatcaaccagaacggcccgcaggagaccggctggcgggtgaacggccgcaatctcaatctcaaccgcgacttcaccaagctcgacagcgcggagatccgcaacgtcgcctgggtgttcaaccactacgagctgagcttcttcgccgacacccactccaccgacggcgccatgtatccctacgacagctcctactgccacaacggcaacggctggtcaccggcgagcagcgcctggatggaccaggtcatgcgcaagccggtgtaccaggcgctggaaagcctcgggcacatggtccatgaatgcatcagcctgaacgacaaccaggatccgacccagggctactacccctaccgcaccgacctggcgcgcttctccaaccagtacggcgacatccgcaacgtgccgtcgatcctcatcgagcaacacgccctgcatccgtacaagacccaggtgctgggcaactacgtgatgctcaaggcgatgttcgaggtgatcggcgagcaggccgccagcctgcgccaggccatcgccagcgaccgcgagcgcctgctgcgacagaaggaggtgatcctcacctggaagccgggcgaggccgccgagacgccgttcgtggtgggcgactaccgctacgagcaatcgccggtcaccggagcccgcaccatcgtctggagcaaccagccgaagacactgaaactaccggtgaccgacaacggcgtacccgacctggtggtgccgcgtccccagcgtttcatcgtcccggcgcagtggcacgaggtgatcgcccggatcaaggcccatggcatccgctatagcaccctcgagcgtccgaccgaaatcgccgtgaccctgtaccgcatggacgacatcaagctcgccgatggcttcgaaccggatcgcgtgcaaggcaaccggattccgggctacgaaggtcgcctgctggtcagcggcacgccgaagccgttccagcgcctgcagaccttcccggccggctcgctgtcgatcgacaccgcccagccgctgggcgtcctggccatcgacctgctgcaaccgcagagtccggattccttctggtcctggggcttcttcaattccaccctggtggccgccgaggaaccggaggaatacgtgatggagccgatggcgcgcaagatgctggcggaagacccggcgctgaaggccgccttcgacaaacgcctgcgcgaggacaaggccttcgccgccgatccgcaggcgcgcctgcaatggttctaccagcgcacgccgttctacgacgtgaacgccttcgtctatccggtaggagtggtgttctga

SEQ ID NO: 324305 - DNA, 1002 bp, Pseudomonas aeruginosa
atgtccctaccccgcctcagtctctgtctcgccctcgcctgcgggccggcgctggccagccaggcgccggtctacggcgaacgcctggaaggcttcgactacgcctatccggtgcattatctggacttcacctcccagggccagccgctgagcatggcctacctcgacgtcgcgccgaagaaagccaacggccgcaccatcctgctcatgcacggcaagaatttctgcgccgggacctgggagcgcaccatcgacgtgctcgccgacgccggctaccgggtgatcgccgtcgaccaggtcggcttctgcaagtcgagcaagccggcccattaccagtacagcttccagcaactggcagccaacacccacgccctgctggaacggctcggcgtcgcccgggccagcgtgatcggccattccatgggcggcatgctcgctacccgctacgccctgctctacccgcggcaggtcgaacgactggtgctggtcaaccccatcggcctggaggactggaaggccctgggcgtgccctggcgcagtgtcgacgactggtacaggcgcgacttgcagaccagcgccgaaggcattcgccaataccagcaagccacctactacgccggcgaatggcgccccgagttcgatcgctgggtacagatgcaggccggcatgtatcgcggcaaggggcgcgagtcggtggcctggaactcggcgctgacctacgacatgatcttcacccagccggtggtctacgaactggaccggttgcagatgccgaccctgctgctgatcggcgagaaagacaacaccgccatcggcaaggacgccgcgccggcagaactgaaagccaggctgggcaactacgcgcaactgggcaaggacgccgcccgacggattccccaggcgaccctggtggaattccccgaccttggccataccccgcagatacaggctccggaacgcttccaccaggcactgctgaagggtctgcaaacccagccctga

SEQ ID NO: 324306 - DNA, 213 bp, Pseudomonas aeruginosa
atgagaagacttaagcgtgatccgttggaaagagccttcttgcgtggttatcagaacggcataaccggtaaatctcgtgatctttgtccgttcacccatcctacgacgcggcagtcctggctcaacggctggcgcgagggccgtggcgacaactgggacggcctcactggcacggccggcttacaacgtctcaatcaactccagcacgtgtaa

SEQ ID NO: 324307 - DNA, 2178 bp, Pseudomonas aeruginosa
atggctgatgtttacgaattgtttctgacctgcccgaaaggcctggaaagcctgctcctcgaagaggcgcaggggctcggcctggacgaggcgcgcgcccaggtgtcggcggtgcgcgggcagggcagcctggaggtggcctatcgcctctgcctgtggtcgcgcctggccaaccgggtcttgctggtgctggcgcgattcccggtggagaacgccgagtccatgtacatggcggtccacgcggtgaactgggaagaccacctggacgccggcggcacgctggcggtggagttcagcggcaagggctcgggcatcgacaacacccatttcggggcgctgaaggtcaaggatgcgatcgtcgacaacctgcgcgagcgctccggccgacgcccgtcggtggacaaggtcaatccggacgtgcgcgtccacctgcacctcgaccgcggccaggcgaccctctccttggacctctccgggcatagcctgcaccagcgcggctatcgtctgcagcagggcgccgcgccgctgaaggagaacctggcggcggcggtgttgatccgtgccggctggccgaagatcgccgccgagggcggtgccctggccgacccgatgtgcggcgtcggcaccttcctggtcgaggcggcgctgatggctgccgatatcgcgccgaacctcaggcgcgagcgctggggcttcagcaattggctaggtcacgtgccggcgctgtggcgcaagctccacgaggaagcccagcagcgcgcggcgaccggcctggccaggccgccgttgtggattcgcggctacgaggccgacccgcgcctgatccagccggcgcgcaacaatatcgagcgtgccggagtggccgactgggtgaagatctaccagggcgaactggcgactttcgagccgcgcccggacaagggccagaccggcctggtgatctgcaacccgccctatggcgagcgtctcggcgacgaagccagcctgctgtatctctaccagaacctcggcgagcgcctgcgccagagctgcatcggctggagcgccggggtgtttaccggggcgccggaactgggcaagcgcatgggcatccgcagccataagcaatacgcgttctggaacggcgcgctggcctgcaagctgctgatgatccaggtcgagccgcgccagttcgtcaccggcgagcgtggcgaacgcaacgacgaaggcctggcgcgggcgccgagcgagccggcacggctgagcgagggcgggcagatgttcgccaatcgcctgcagaagaacctccggcaactgggcaaatgggcgcgccgcgacaagatcgagtgctatcgcctgtatgacgccgacatgccggagtatgccctggcggtggatatctacggcgattgggttcacgtccaggagtacgccgcgcccaagtcgatcgatccggcaaaagcccaggcgcgcctgttcgacgccctggcggcgattccgcagaccctgggcgttgcccaggagcgagtggtggtcaagcgccgcgagcgccaggccggcaagaagcagtacgaacggcagagcagcgagggcaagttcctcgaggtgggtgagggcgatgtgcgcctgctggtgaacctgaccgattacctggataccgggctgttccttgatcaccggccgatgcgcctgcgcatccagaaggaggcggccggtaagcgcttcctcaacctgttctgctataccgccacggccaccgtacatgcggccaggggcggcgcgcgcagcaccaccagcgtcgacctgtcgaagacctacctggactgggcgcgccgcaacctgtcgctcaacggcttttccgacaagcagcgcctggtgcacggcgacgtgatggagtggttgcgggaagacgatggccagtacgaactgatcttcatcgacccgccgaccttctccaactccaagcgcatggaaggcgtgttcgacgtgcagcgcgaccacgtcgaactgctcgacctggccatggcgcggctggcgccgggcggggtgctgtatttctccaacaacttccgcaagttcgaactggacgagagcgtgcaggcccgctatgcggtcgaagagatcactggcgaaaccctcgatccggatttcgcgcgtaatccgaagatccatcgggcctggagaatcaccgttcgctga

SEQ ID NO: 324308 - DNA, 1431 bp, Pseudomonas aeruginosa
atgttcaagtcgctgcgtactcttgccttcgccacgctcctgcctttcgcccttcccaccctcgcccaggtcaacgccaccctgccggccaacgtgcagaaagccctgcagaccaacaagctgaccggcaacgatctgtcgctggtgctgattccgctcgacggcccgggcaaccccacctactacaacgccgacgtatcggtgaacccggcctcgaccatgaagctgttcaccacctatgccgccctggaaatgctcggcccgacctaccagtggaagaccgagttctacaccgacggccagctcaagaacggagtgctcaacggcaacctctacctcaagggcggcggcgatccgaaactgaacatggagaagctctggctgctgatgcgcgacctgcgcgccaatggcgtgaccaaggtcacaggtgacctggtactcgaccgcagctacttcaacatcccgcagttgccggtattcaacgacgacggcggcgacgacaccaagccgttcctggtcggtccggactcgctgctggtcaacctgaagagcgtgcgcatggtggtgcgcaccgacggcaacaaggtcaacgtgcagatggacccgccgctggccaacgtacgcatcgacaaccaggtgaagatgaccgcgccggccacctgcccagcctggccgaagctgcgcttcagcccggtgacccagttcgacggcaccaccctgctggccaccggacagattccccagggctgtagcgcgcagacctacatgtcgctgctcgaccaccccggctacaccgccggcgcggtgcgcggcatctggcaggaactgggcggcagcatcctaggcaaggaccgccagggcagcgtaccgcgcaacgccacgctgatcgccaaggccttctcgccagacctggtcgagatcatccgcgacatcaacaaatacagtaacaacaccatggcccggcagttgttcctctccatcggcgcgcagttccgcaacagcgccgacggcgacgacgcccaggccgcgcagcgggtggtgcggcagtggctggcgcgcaagggcatcaccgcgccgcgcctggtgatggagaacggctcgggactgtcgcgccaggaacgggttagcgcccgtgagatggcggcgatgctgcaagccgcctggcacagcccctatgcagcggagtacatctcctcgctgccgctggccggcctcgacggcaccatgcgcaaacgcctgcggcgcaccgcactggtcggcgaggcgcacgtgaagaccggcaccctcaacaccgtgcgcgccctcgccggcttcagccgcgacgccagcggccacaactgggtggtggtggcgatcctcaacagcccgcggccgtggggcgcttcggcgatcctcgaccaggtactgctgagcctgcacgcgcggaaataa

SEQ ID NO: 324309 - DNA, 738 bp, Pseudomonas aeruginosa
atgagtgtctacgcgattatcggaggaaccggcctgacccagctggaagggctgacgctgagcgagtccctgccgatcgaaacgccgtatggcgcgccgtccgcgccgctccagcgtggccgctacgccgggcgcgaggtgctgttcctggcacgtcacggtcatccgcaccgcttcccgccgcaccaggtgaactaccgggccaatctctgggcgctgaagcaggcgggtgccgaggcggtgatcgcggtcaacgcggtgggtggcatccatgcggcgatgggaacggggcacctgtgcgtgccgcaccagttgatcgactacacctcgggacgcgagcacacctatttcgccggcgatatcgagcatgtcacccatatcgacttcagccacccctatgacgagccgttgcgccagcgcctgatcgaggcgttgcgtgcgttggggctggcgcacagcagccatggggtctacgcctgcacccaagggccgcgcctggaaacggtggcggaaatcgcccggttggagcgggacggcaacgatatcgtcggcatgaccggcatgcccgaggcggcactggcccgcgagctggacctgccctacgcctgcctggcgctggtggtcaatcccgcggcgggcaagtcggcggggatcatcaccatggccgaaatcgaacaggcgttgcacgatggcatcggcaaggtgcgcgaggtgctggcgcgggtcctggccggctag

SEQ ID NO: 324310 - DNA, 207 bp, Pseudomonas aeruginosa
atgccgacgatcgccgctaccttgatgatcgcgaaccagaactcggtctcgccgaaggctttcacgttggccaggttgatcgcgttgatcagcacgaagaacgccgccgccgtcgcccaggtcggcacgtccggccaccaatactggatgtacttgcccaccgcggtcagctccgacatgcccaccaggatgtacagcacccagtag

SEQ ID NO: 324311 - DNA, 477 bp, Pseudomonas aeruginosa
atgagcctggcgctgctgttgcgcgtccgacgcctgcgcctggaccgggccgagcgcgcccagggccgccaattgctacgggttcgcgccgcggcgcaggaacacaccgagcgccaggcggcgcaacgggactaccgcgactggcgactggccgaagagcaacggctgtttctcgcctgccaggcggccatgctcgaccgccgacgcctggaagcctggcagcagcaggtagggctgctgcgggaaaaggaagccggcctggaacaggactgcgccgagaccgcgcagcgcctcgaaggggagcgcgagcgcctgcggcagtgccggcgagaactgctggaacgccagcggcaactggagaagttcgccgaactggagcgccacgtcgacgccgagcgccaggggctgcgcgaacgcagcgaggaaggcgaactggaagaattcacccgccacgagacctggccatgctcaagctga

SEQ ID NO: 324312 - DNA, 867 bp, Pseudomonas aeruginosa
atggacatcctccagagttcctccgccgcgcccctcgcgccgcgggaagcggccaacgcccccgcgcagcaggccggcggcagcttccagggcgagcgcgtccactacgtctccgtttcgcagtcgctggccgatgccgcggaagagctgaccttcgccttttccgagcgcgccgagaaatccctggccaagcgccgcctgagcgacgcccatgcgcgcctgagcgaagtccaggccatgctgcaggagtactggaagcgcattccggacctggaaagccagcagaagctcgaggcgctgatcgcccacctgggcagcggtcaactgagcagcctggcgcagctcagcgcttacctggagggcttctccagcgagatcagccagcgcttcctggcgctgtcgcgggcgcgcgacgtcctggccgggcggccggaggcgcgggcgatgctggcgctggtcgaccaggcgttgctgcggatggccgacgagcagggcctggagatcgaactcggcctgcgcatcgagccgctggccgccgaggcttccgccgccggtgtcggcgatatccaggcgctgcgcgatacctaccgtgacgcagtactcgactaccgaggcctgtcggcggcctggcaggacatccaggcgcgcttcgccgcgacgccgctggagcgggtcgtggccttcctgcagaaagccctgagcgccgacctggacagtcagtcgagccggctcgatccggtgaagctggagcgggtcatgagcgacatgcacaagctgcgcgtgctcggcggcctggcggagcaggtgggggcgctctggcaggtgctggtgacgggggagcggggccatggcatacgggccttctga

SEQ ID NO: 324313 - DNA, 1383 bp, Pseudomonas aeruginosa
gtgctgcagatctacaacacgctgagcaagaccaaagaagtcttcacgccgctggtcggcaaccaggtacgcatgtacgtgtgcggcatgaccgtgtacgactactgccatctgggccacggccgcagcatggtggcgttcgacgtgatcacccgctggttgcgccaccgtggctacgacctgacgtacgtgcgcaacatcaccgatatcgatgacaagatcatcaatcgcgccaacgagaacggcgagccgttcgatgtgctgaccgagcgcatgatcgcggcgatgcacgaggacgaggcccggctgaacatcctcaagccggaccaggagccacgcgccaccgatcacatcgccggcatgcacgcgatgatccagaccctgatcgacaagggctatgcctacgcgccgggcaacggggacgtgtactaccgggtcggcaagttcgctggctacggcaagttgtcgcggcggcgggtcgaggacctgcgcatcggtgcgcggatcgagccgggcgaagcgaaggaggatccgctcgatttcgtgctctggaagggcgccaagccgggcgagccgagctggtcgtcgccctggggcgaggggcgcccgggctggcacatcgaatgctcggtgatgtccacctgctgcctgggcgattccttcgacatccatggcggtggcaacgacctggagttccctcaccacgagaacgagatcgcccagagcgaggccgcgaccggcaagccctacgccaagtcctggctgcactgcgggatgatcaccatcaacggcgagaagatgtccaagtcgctgggcaatttcttcaccatccgcgaagtgctggagaaatatcaccccgaagtggtgcgttacctgctgatcgccagccattaccgcagtccgatcaactactcggaggagaacctgcgcgaggccaaggcggccctggaccgtttctacaacgcgctcaaggggctgcccgaggcggcgccggcggaagcggtggagtatgtcgagcgcttcgccgcggcgatggacgacgacttcaataccgcgggtgcctgctcggtgctgttcgagctggcgcgggaggtcaatcgtctgcgcgaaagcgacctgtcggcggctgccgcgctggccgcgcgcctgaagcagttggctggcctgctgggggtgctgcagctggagccggaagccttcctgcaggcgggcgccgagggcaaggtcgatgcggccgaggtcgaggcgctgatccaggcgcgcctggaggcgcgggcggcgaagaactgggcggagtccgaccggattcgcgaccagctcaccgccatgggcgtggtgctggaggatggcaagggcggcactacctggcgcctggccgactga

SEQ ID NO: 324314 - DNA, 855 bp, Pseudomonas aeruginosa
atgaccgcacaactgatcgacggcaaagcgatcgccgccaaccttcgccagcagatagcccaacgcgtgaccgagcgccgccagcaaggcctgcgcgttcccggcctggcggtgatcctggtcggcaccgatccggcctctcaggtctatgtggcgcacaagcgcaaggactgcgaggaagtcggctttctctcccaggcctacgatcttcccgccgaaaccagccaggacgacctgctggccctgatcgaccgcctgaacgacgatcccgccatcgacggcatcctggtccagctacccctgcccgcccacctggacgcctccctgctgctggagcgtatccacccggacaaggacgtggacggtttccatccctacaacatcggccgcctggcccagcgcatgcccctgctgcgcccctgcaccccgaaaggcatcatgaccctgctcgccagcaccggcgccgacctgtacggcatggacgcggtcgtggtcggcgcctcgaacatcgtcggccggcccatggctctggagttgctgctgggtggctgcaccgtcaccgtgacccaccgcttcacccgcgacctggccgaccatgtgtcgcgcgccgacctggtggtggtcgctgccggcaagccgggactggtcaagggcgagtggatcaaggaaggcgccatcgtcatcgacgtcggcatcaaccgccaggccgacggccgcctggtcggcgacgtggaatacgaggtggcggcacaacgcgccagctggatcaccccggtgccgggcggcgtcgggccgatgacccgcgcctgcctgctggaaaataccctgcacgccgccgaacacctgcacgactga

SEQ ID NO: 324315 - DNA, 615 bp, Pseudomonas aeruginosa
gtgccgagcccggaggaccggcgacagctatacggtcgctacgcaacccgccaaggccagattcgcctgtacgagcgcaggggtcgcctgtacgcggatttcggcgaacaacgcgtggaactgttacgcgacacctcgggctggctgcagatgagaaaaagactgctggggttctggcctgtcggcgtggacagcgccggacagttgcaactggacgtggtcagctacggccaacgccgaatcctggtgtcccgccgccacgaccagaccgcctacctcggcgagcgcatcgagccgacatccctgccccaggcctggaccgaagccgtcggcacctaccgcgtcgccagcacgggccggcacagctacctgaacggcctgagcatcaggatcgaagacggcttcctgctggtgcgcgggcaagccggaggaacccgctccggcgagttcatcctgcaacccatcgacagcgcacacgccgtcctggccggcagcggccagggcctgggagacaccttcagtcgcgacttcgacggtctgaacgcgctcggctaccgcttcgcccagcaaggcaccaaggcacgtccctggctgcaacggaaggagtccccatga

SEQ ID NO: 324316 - DNA, 246 bp, Pseudomonas aeruginosa
atgggccttttccgcctcctgttctggatcgccctgatcgccatcgcgttctggctctggcgtcgctttacccgtcccactccgcgccagcagcaacgtccgcaggacgagccgagcgcatcgccgatggtccgctgcgcccattgcggcgtccacgtgccgcaggccaacgccctcgcccacgaacaacgctggtattgcagccaggcgcacctgcgccaggaccagggcgaccgtgcgcgctga

SEQ ID NO: 324317 - DNA, 1281 bp, Pseudomonas aeruginosa
atgacgccgcagcagctcaccgaggagtacatcttcgcgcacgatctccgagaagccagcgcgaagatctaccgcgccgcgaccaaggcgctgctcaagcacttcggccctacggcaaccgtacaggaagtggaccacaggtctgtgctgggatggcggcgcaaggtcttggaacaaggcctgtcgaagcggagctggaacacgtattcgaatcatctgcgaacaatctggggctatgccatcgagcacgagctggtgacgcactcccaagtcaacccgttcagaaagaccaccgtcatcccccccaggcgagcaagcaaaactgtcgcagccgaagccatcctgcgcgcccgcaattggctcaacatgcaggtcggcgcagagcgctgcaccggcgatcgcgcacgcatcactcccgcctggttctggctttgcacgtttgaggtcttctactacaccggcatccggttgaacgcgctgctgtgcatccgcaagcgcgacatcgactgggataatcaactgatcctcatccgcggcgagacagagaaaactcataaagagttcgtagtgccaataacggaggggcttgtgcctcacctatcgcggctcctgaaggaggccgataaagccggattcgccgatgacgaccagttgttcaacgtcaaccggttctcaccgcactacaagagcaagatgatgaactccgaccaggtcgaagccatgtaccggaagttgaccgagaaggttggggtgcggatgaccccgcaccgtttccggcacaccctggccaccgacttgatgaaggcacccgagcggaacatccatctcacgaagtgcctgctcaaccactcgaatatccagaccaccatgagctacatcgaggccgactacgaccacatgcgtgccgtgctgcatgccagaagcctggcccaaggagcgctggagaacgtcaggaaggtggattacagcggctccccgcaagcctctgccaaaccgaagccatgcgggcaacctctcgctcgaatgggtgaagtaccgccgccggaggccaggacagaacctgcagaaccaagggagcacataccagggacaggcattcagggaggtccaaccgtgcgggaagaagcgctaccacagccacctgacaccttcgaccaaagcgtgctgttcactctgatggctcaacacttatcgaaccgtgccgcctcggcatccgcggctcccgctgcaacaagcggatctggtggatggggatctactgcccgaagcagtctcgcctag

SEQ ID NO: 324318 - DNA, 1920 bp, Pseudomonas aeruginosa
atgtttcaactcctttcctggatatccaggaagccgtcccccaccccaccaaccaaagctgccccagggggattcatccctcctctgagcagtacggagctgctcggcacgcctcggcgccggcagctactggagaacatctggcagcgtgcctcgctatccaagcagcaattcgaggagatctaccggcggccattggccaactatgcccagctggtccagcagctcccagcttcggaaaaccatcaccatgcccatccaggcgggatgatcgatcacggcctggagatcgtggcctatgcactgaaggtgcggcagacttacctgctcccgatcggcgcagcgccagagtcacagtcagcccaagctgaagcctggtcggccgccgcggcttatggtgccctggctcacgacataggcaagatcgtcgtcgacctgcaggttgagctgcaggacggcagcacctggcacccttggaacggaccgatcaaccagccttaccgcttcaagtacgtgaagtcccgcgaataccagcttcacggcgctgcctcagcactcctcatccaccaactgcttccgcgcactgcactcgactggctcagtcgctttccagagctgtgggctcaattgatctatctgttcgcagggcagtacgagcacgctgggatcctcggcgagatcatcgtgaaggcagaccaggcctcagtcgcgcaggagctggggggtaatccggatcgagcgctggctgcaccgaagcagtcgctgcagcggcagttggcagacggcctgcgcttcctggtgaaggacaaattcaagctgaatcagccgggcggcccgtccgacgggtggctgactcaggacgcactctggctggtgagcaagcccgcggccgatcagttgagagcctacctgctggctcagggaatcgaaggggtcccctcctccaacgcgccattcttcaacatgctccaggaccaggccgtcatccagacgaacgccgaagacaaggccatttggacggccacgatagacaatggtgctgggtggagaaacaagttcacgctcctcaagatcgctccagccttgatttggacagaccctaccgagcgtcccgcgccctacggcggatcactcgtaattgaagagggcaacgcctcccctgaaaagccggaaacgacctgcgaaatccccaacgatccgattgaacagcgacaggtactagaagccaagatgacgctccgccaacctgcgccgatcgttgcgaaaccgtcaaacgagatgcgggcgattgcgaagccctcaactgatgttcaggaagaaacagacgatttgtacgcgcttcttggtaatatcaattcgccactagaagagctagacattagccacgactcaccggctgcttctcctacgaacactcgcggggaggagaacctacagcagccactagggaacaaggagctaacagattgcgctcctgaagcagttgaagatgtatttatgcctagcagaagcactgatctgggacagggattcgttggctggatgaaatctggtatcgcgacccgtcgcctgttcatcaacgacaccaaagccttggtgcataccgtcgacgggaccgccatgctggtcacgccaggaatcttcaagcgttatgtccaggagcatccggagctcgaaaagctggcccaggccaaggagacgaccggctggaagctggtgcagcgcgcgttcgagaaacaagggcttcaccggaagaccagtaagagcctgaacatctggaccatcaaagtctcaggccctcgtaaaacgaaagagctcaaggcttacctgctccaggatcccaaactgctgttccctgaacagcctctggacaacccaagcctcacggtcattaccgacgccgaagggggtgtcgaatga

SEQ ID NO: 324319 - DNA, 882 bp, Pseudomonas aeruginosa
atgacctcttcctatgtaggccgcttcgccccgacgcccagcggctacctgcacttcggttccctggtggcggccgtcgcctcctacctggacgcgcgtgccgtcggcggccgctggctggtgcgcatggaggacctcgacccgccccgcgaagtcccgggcgcccagcaggcgatcctggaaaccctggagcgctacggcttcgaatgggacggcgcggtggagcggcagagcgaacgcttcccggcctacgccgcagtggtcgagcaactgctgcgcagcggcctggcctacgcctgcagttgctcgcgcaagcagcttgagggattcgccgggatctacccgggcttctgccgcgatgccgggcacgcccgcgaggatgcggcgatccgcctgcgcgtgccggagctggaatatcgcttcgtcgaccgcgtgcagggcgaagtccgccagcatctcggccgcgaggtcggcgatttcgtcatccagcgccgcgatggcttctacgcctaccaactggcggtggtgctggacgacgcctggcagggcatcaccgacatcgtccgcggcgccgacctgctcgactcgaccccgcgccagctttacctccaggaattgctggggttgagccagccgcgctacctgcacgtgccgctgatcgtccagccggacgggcacaagctcggcaagtcctaccgctccccgccactgcccgccgagcaggccgccgcgccgctgacccgcgccctgcgcgcgctcggccagcggccgccggccgaactggcccaggccagcgccagcgaggcgctggcctggggcgtcacgcactgggacgccacgcgcatcccgcgctgcgctacccttcccgaggaacgcctgtag

SEQ ID NO: 324320 - DNA, 1437 bp, Pseudomonas aeruginosa
atggcacatattctgatcgtcgaagacgaaaccattatccgatctgcattgcgacgcctgctggagcgcaaccagtaccaggtcagcgaagccggctcggtgcaggaagcccaggagcgctacaccatcccctccttcgacatggtggtcagcgacctgcgcctgccgggcgcccccggcaccgaactgatcaagctcgccgaaggcattccggttctgatcatgaccagctacgccagcctgcgttcggcggtggattcgatgaagatgggcgcggtggactacatcgccaagcctttcgaccacgacgaaatgctccaggccgtggcgcgcatcctcaaggaccgccaggagaaccgcagcgcggccccggtctccgccaacggcggcaaggccggcggcgagcgcggcgccagcccggcggcagccgacggcgagataggcatcatcggctcctgtgcgccgatgcaagagctgtacagcaagattcgcaaggtcgcgccgaccgactccacggtactgatccagggcgagtccggcaccggcaaggaactggtcgcccgcgccctgcacaacctgtcgaagcgcgccaaggcgccgctgatctcggtgaactgtgcggcgattccggaaaccctgatcgaatccgagctgttcggccatgaaaaaggcgccttcaccggtgccagcgccgggcgcgccgggctggtcgaagcggccgacggcggcaccctgttcctcgacgagatcggcgaactgccgctggaggcccaggcccgcctgctgcgcgtattgcaggaaggcgagatccgccgggtcggctcggtgcaatcgcagaaggtcgacgtgcgcctgatcgctgccacccaccgcgacctgaaaaccctggccaagaccgggcaattccgcgaagacctctattaccgcctgcatgtgatctcgctgaagctgcccgccctgcgcgagcgtggcaacgacgtgatggagatcgcccgcgcctttctggctcgccagtgcacccggatggggcgcgcgccgctcagcttcgcccacgacgccgaacaggcgatccgccattacccatggccgggcaacgtgcgcgaactggaaaacgccatcgagcgggcggtgatcctcagcgagagccaggaaatccacgccgacctgctgggtatcgacatcgagctggacgacctcgaggacgacttcgccgccgacctcggcctcggcccggcgggcgccgcggccagcaaccacgagcccaccgaggacctttcgctggaagactacttccagcacttcgtcctcgagcaccaggaccacatgaccgagaccgagctggcccgcaagctgggcatcagccgcaaatgcctgtgggaacgccgccagcgcctgggcattccgcggcgtaaatcaggggcctcggccgactcgtaa

SEQ ID NO: 324321 - DNA, 1404 bp, Pseudomonas aeruginosa
atgctgaaaaagctgatccagaccattcgttcccccctgcgccgtccgcgcgccgtccgtacaaccccggaagtcatcggtaacaaccagcactccctgcgccgggaccagttcagccggaacgccgtcaaggtcgtcgagatcctccagcgggccggctaccaggcctacgtggtcgggggctgcgtacgcgaccagatgctcggcatcgctcccaaggacttcgatgtcgccaccagcgccacgccggagcaggtccgcgccgaattccgcaacgcgcggatcatcggccgccgcttcaaactggtacacgtgcacttcggccgcgagatcatcgaggtcgccaccttccgcgcccatcatccggaaggccaggacgatggcgatagccgcgcgtccagcaacgaaagcggccgcatcctgcgcgacaacgtctatggcagcctggaagacgacgcccagcgccgtgacttcaccatcaatgccctgtacttcgacgtcaccagcgagcggctgctggactacgccaatggcgttcacgacatccgcaatcgcctgatccgcctgatcggcgatccggagcagcgttatctggaagacccggtgcggatgctgcgggcggtacgtttcgccgccaagctcgacttcgagatcgagaagcacagcgccgcgccgattcgccggctggccccgctgctgcgggaaatcccttcggcgcgcctgttcgacgaggtgctcaagctgttcctcgccggccgggccgagcgcactttcgaactgctggtcgagtacgaactgttcgcgccgctgttcccggccagcgccaaggcactgcaggccaaccccgactacaccggcaagctgatccgccaggccctggccaataccgatgcgcgtattcgccagggcaagccggtaaccccggccttcctcttcgccgcgctgctctggccggccctgccggcgcgcgtcgcgcagttgcaggagaaaggcatgccggccatcccggcgatgcaggaagccgcccacgaactgatcagcgaacagtgccagcggattgccattcccaagcgtttcaccctgccgatccgcgagatctgggatatgcaggaacgtctgccgcgacgccagggcaagcgcgccgacctgctcctggaaaacccgcgcttccgcgccggctacgacttcctcctgctgcgcgaaagcgccggcgaggaaaccgaagggcttggccaatggtggaccgattaccaggaagtcagcgacagcgagcggcgcaacatgatccgcgacctggtcagccaggaagacggcagcgccccgcgcaagcgtcgccgcggcggcaacagctgccgtcggcgccgcgggccgcgcaaggaaggcagcggcggaagcggcgaatga

SEQ ID NO: 324322 - DNA, 537 bp, Pseudomonas aeruginosa
atgcccagcaatgcgctctggcttcgcgccgaccaactgtccagcgtctcccccgccgtcctcgactggctgttcgacgaggggtcgctgacccggcgcctgaccgccctggccgacggcgcgttccgcgtcgaacccctgctggaaggctggcagaccctgcgcgacgacgaatgccaggggctcgacgtccctaccggcagtagcggctgggtccgcgaggtctacctgcatggccacgaccgtccctgggtgttcgcccgcagcgtggcggcgcgcagcgccctggaaggctcgggcttcgacctggcgctgctcggcacccgctcgctgggcgagttgctgttcagcgacagcgccttcgagcgcgggcccatcgaagtctgccgctatccggcggccggtctgcccgccgaggtccgcgccgagggtctctggggccgtcgctcacggttttcccgcggcgcgctcggggtgctggtggcggaggtgtacctaccgcgcctgtgggaccaggcgggaatcgccgacgtataa

SEQ ID NO: 324323 - DNA, 1734 bp, Pseudomonas aeruginosa
atggtccagagcgccccagccagcgaaatcgccgccctcatcctgcgcggtttcgacgattaccgagagcagttccgcgagatcaccgacggcgcccgtgcccgcttcgagcaggcgcagtggcaggaagcgcagcgcgcctcggcgcagcggatcaacctctacgaggaaaaggtcgccgaaacggtggccgggctgcgcgcggggctggccgacagcgagctgctggacgtggagcgctggccgatcatcaagagcgcctacatcgcgcagatcgacctgcggctggacgacgagctggccgagacctggttcaactcgatcttctgcgggctgttcagccacgacaacatcagcgacggcacgatgttcgtgcacaccacccggccctcgctgcgcgcccacgcccgcgcgccctacacccgcacctaccggccgggcggcgacctgcgccaggcgctggagaagatcttcgacgactaccgcttcgacgtgccctacgacgaccgcgagcgcgacctcgaacggatcgacgcactgctgcacagcaacctgccggactgggtgtgcaaggacccggacctggccatcgagctgatcggctcggtgttctatcgcaacaagggcgcctacctggtgggccgcctgttcaccccggacgagcagtggccgctggtgttcccgctgctgcaccgcgagggccacggcatccagttcgacacggtgatcaccgacgaggcggaagtctcgatcatcttctccttcacccgctcctacttcatggtcgacgtgccggtgccggccgagctggtggccttcctcaagcgtctgctgccgggcaagcacctggccgagctgtacacctcgatcggcttctacaagcagggcaagagcgagttctaccgcgccctgatcaaccacctggcgaccaccgacgaccgcttcgtcatggcccccggcgtgcgcggcatggtgatgagcgtgttcaccctgcccggcttcaacacggtgttcaagatcatcaaggaccgcttcaacccgtcgaagagcgtcgaccacgccacggtgatccagaagtaccagttggtgaagaaccacgaccgggtcggacgcctggccgacacccagcagttcgccgacttccgcttcccggtgagcaagttcgagccggagtgcctggccgaactgctggaagtggcgccgtcgacggtggtgatggaaggcgacgtggtgctgatccgccactgctggacggagcggcgcatgaccccactgaacatctacctggagaacgccagcgaggcgcagacccgcgaggcgctgaacgactacgggctggcgatcaagcaactggcggcggcgaacatcttccccggcgacatgctgctgaagaacttcggcgtgacccgccatggccgggtggtgttctacgactacgacgagatctgctacctcaccgaggtgaacttccgctacatccccgagccgcgcttccccgaggacgagatgtcgtccgagccctggtattcggtggggcccaatgacgtgttcccggaagaattcccgcgcttcctgttcgtcgacctcaaccagcgccggctattcgccaagctgcacggcaacctctacgacgccaaatactggcagggcctccaggagcagatccgcgagggcaaggtgatcgacgtgtttccctatcggcggcaggagacgcctgagcagttgctcgggtag

SEQ ID NO: 324324 - DNA, 1668 bp, Pseudomonas aeruginosa
atgctggccaacaaccgcatcgtcgtgccagcatatcaacgcgcttatgcttgggatacgccagttgaaggttcgacccgcgccagccagacacaggtatttctatccgacctagaagcctatcgcaacagcaaatctcgcagcccttattactttggccatttcctatttgagcagacacagggagaatatcgggtaattgacggccagcagcgcctgactacgatcacgctgttcctagctgcgttgttcgcatgcttacaagccaagcgcgccctcaccgaagatgagcaggactgctacaaagacatgatcaagcaggaaagtcagatccgctttaagacggtcgactacgacaaccgaaccttcgtcgattatgtgatcaaccagtccagaaccgtcgccccgacttcgttaaccacatctgctcagcgactcatcaatgcgttcgacttcttcaaaaagaagctgggtgctcagcccgaagcctacctgaccgacatgctgcggattgtgtcccaggcatcatgcagtacgcacccagtgcgggatgaagctgaagccatccagatgttcatcttccagaacaaccgcggcaagcgtccatccaaccttgaggtggtaaaggcgcagttcatgtatgccatccatcttcatggcgaagaccaagaaacgaaggacagcttgatcgaagagatccagaatcgcttcgaaaccatctacaaatcgatctcggcaatggaataccgcatcaatgaagacgacgtgctgcagtacaccttgcgcgttcacttcaattccctgtgggaaagcggcgcgctagatcggattgagaaaatgctcaccgcagagttgcctcttgagttcgtgaaagatttcactagctcactggccatcagtttcgagcatttatcggtattcttcggcgatgacgagcgaaacagttttccgatccactctctggtgagcttgggcggaatcgcggttgtactgccatttattctcaaggcctaccgctttggtcttcctctagcggacaagaatcagctttgtgttgcctttgaaagcctgatcatccgacatcgccttattggcacccgggcggatatcacgtcccgcatcaatgatgcttacgaggcctttactagcgacgcgccagcgatagagcctatcctggagaatatcgagtatctcaaaactgtaggcagtggatggtgggcttattggaacaatgaaaaactggcagacgctctagaatgggaagttagacactccaccgctaggcacctgctatggaaatatgaagtacacctagaaggacaaggtcagcgcggttaccagccacggcgttgtaacgatatcaagcgtccagaactggaacacatcgctcccactaccgagcccacagctagcccccatggctacggcacctacgacgaaaccttcaagagcgaatacctaaactgcctcggcaattacctactggtgtcaaaatcccacaactgtgcagtgggaaacattccattcgccgaaaagctggaaacataccagcacaatttccaacaacgggaaatagcaaaatttgtcagcgcaggtatcatttgggatcaagatgcaatccaggtccggcacgataaaatcgtcgcagcacttttggctgtgctttaa

SEQ ID NO: 324325 - DNA, 852 bp, Pseudomonas aeruginosa
atgattacttggcctcccgcgctcattcgtgaaatagctgaccgacgggcaatagtttttgtcggtgctggtatttctaaggcagcatcgccaggaatgccaacgtggccaactctattagttaaattaagtgagcagttgtccactaaggtggataaaaagcttgttaagggtttagtcgctaagaatcgattgttggatgcggctcagattgtaactgatggtgtggagcgggctgacttaaatgccgctttaaggcagacattccaggttcgtccagcacctcatcatgaggtgtataacagtcttcttcaacttgacttgaagacaattgttaccacaaactatgatgagtttcttgagaagaattttgatcattatagtggcggaaatgctgcatataatgtttgcaagcacacctcaagagatcttttggatcaagttcgctctcctcaacgtacaattgcaaaaatacatggctgtattacagagcctaatgatttagtgctggatagaatgtcttattttaaggctaggcagctaaatcatggtttctttcaagttatgtctgccttgtttacaacgcatacggttcttttcataggttactctttaggtgatcctgatcttcagattattcttgagaatacccatgcagtaacagagagtcgacacggccactacgctctgctaccaaagatggagcatagatcaatggttaaagcggtaaagcaaagctacaatataacttgcatagagtacccggctggcaatcatacgatagttccgaattgcatttctgcactgcaagatgctgtggtgaccgatcgagcaggccgagggacttcctag

SEQ ID NO: 324326 - DNA, 1026 bp, Pseudomonas aeruginosa
atgaaaataatttcgtttttcaacaataagggtggtgttggtaaaacaacgctgactggaaatattgcctcttacttcgcctttgaattgaataagcgagttctggttgtagattgtgatccgcagtgcaatattactcagtatgtgctgggagatgagagaactattgatttgtattggccgaaagatggtgcgaaagggaatgtaagagctaagactataatggatgtggttcagccgattgttgatggtgacgccacaataaattcacatgttaaacctttgctggctcgtaataataggtttggtgtagacctagtgccaggcgaccctcggttttctttgtttgaagatcaattgtcacaggcttggaatgagattcctagcgggaaagctggcggctttcgagtttctaattggcttaaatcatacctggagtctgtgtcagataaatatgatatagcatttgtggatgttagcccttccttgggggctataaatcgttcggttttgctgtcgtgcgataattttctgactcctttgggggcggacgcttttagcctattgggcgttcgaaatatatctcgatggatttcaacctggctggaatactatgaggtaggactccagcaagccgaaaggttcaatgctgggatgttggctaagtacggaatttctaaggatattcctataagggagggatacataggttatactcttcagcagtatattgcgaagtccaaagagggtgtgcggcgaccaactcgggcttatgagagaattttgaacgatgtgccagttgaagttggtcagcatctctctgcattcgccccccaaaatgccgacctcagactgggggatgtacctaatttatacagtttaataccattggctcaaactgttaattcgccaattattgctctaaaaagtaaggatgggctgattggtagccagtttagccaagctgagaactacaagtctattattggtttgctcgcatcgtcaattgcgagtcgggtgttttga

SEQ ID NO: 324327 - DNA, 966 bp, Pseudomonas aeruginosa
atgtcgaaatattacagggatgtgtttgtgagtgccaagagaaattctataaagtcaatatacctagactggaatatttttcaggatatcattcagagcagaaaaagttctcgtttagtagagaatttgagtgcagggagaaggaaaggttactcaacgccttactctcatgcgcatattagtgatctgcttaggtgctctagggatgagtacgtaaagaacgatcttgtacagttggaggtaatcacagaaaaatgctgtataggtccgaacaaagatgggtctgggttctgcatagatagaattcctccacgtttagtatatgaggcaatggcagaagatcaaaaaaacacaccatcgccagatgaatttaaattttggttccagccatataaggtcgactcaaataaaatttccgaaggaaatgtcttagttccattcctaaagcgtttcaatgatgtgatgtcccccgagttgttggaatgctttgtgagtcatcttctagaaaatgggctaaaagaccacaagctacagaaaaattttaggaactcattcgtagaaattgtcaagttgaatcagccggccgttgagcacattagagagtggccaatttataattacttgctctctacgccagaagagatcgggcagaatttcacatcaatttttcaatctttccttaatattgacggtcgatctatagatagtattagtgaggaagataaatttacgattgcgtatggtgttctcgattttttccctatattcaaagaaaaaattgaaaaaaagaacaatataaataatatgttcaccgatgcgctgcatgtctatatagcttctaagtgttcatactttatttgtggtgataaaaagtcagttgataaggcaagaatcatttatcgtgcctttgatgtaaaaactaagatctactacgtagaagattttataagtaaagtcgaactatag

SEQ ID NO: 324328 - DNA, 366 bp, Pseudomonas aeruginosa
atgccacgcctagccattccgctcagcgacctcaaatgccgcacggccaaaccgcgtgatcgtgcttataaactgttcgacggcgggggtatgtacctgtacgtcgcgcccagtggctcgaagacttggcggctgcggtatttcaaactcaacggcaaggaaggcacgctgatcattggcaagtaccccatcgtttcattggccgttgcgaggaccaagcgtgatgaggccaaggccttgttgctcgataaccttgatccaatggaagaaaagcagaaggccaagatcgctgcccagcgtgcgagccttctctttgaaaccgttgccctggagtggcacgtcgaaatgtccgtgttaacggggtag

SEQ ID NO: 324329 - DNA, 1290 bp, Pseudomonas aeruginosa
atgccagaaaattggtacaaatctcggggctatctgcactttgatcgcccgatcaaccaggctgcggcactggagatagtatcaagccctaagactgttgctaagcatgccttttacccgtttattcgctatgtcgcacaaacacagaaagtgtttttcgacaaaagcatagggaaggtagtcaaaaaagcccccaaagaacggcccatttcctacgctgcgcatgtcgacagccacatttattcctactactgcgaactgctgaaccaggcctacgaggatcatctggcgaaggtgcagtggtcccccgccattctggcgtttcggacccttggcaaaagcaatatcaattttgctcgcgaggcgtttctagatatcgcgacgcgagactcttgctgcgtcatcgccatcgacatcaaaggtttctttgacaacttagatcatgcacatctcaaaagtgcctggcggacactactaggcaccaaccagttgtccgacgaccattacgcagtgtatcggtccctcaccaagttctcgttcgtctacagggaccaagtctacgagacgctggggctctccaagaacaatccgaaaccaggccgcaagcgaatatgcgagccccacgagttccgaaccaaggtgcgtgatggcggcctgatcaaaaccaacaaggataaaaaaggtatccctcagggctcccctatcagcgccctactgtccaacgtgtacatgatgggattcgatgagcagatccacacctatgtccaaacctgcgggggtgcctattaccggtattgcgatgatgtgctgctgattgtgccgctggagaaggaagcggaggccaaagccctagtcgaacaacgggtcaatgcgattggcctggagatccaggcctccaagacggagacctgcaaatttaagcgctcggctatgggcttgagatccgaccgacctctgcaatatctgggctttatcttcgacggcgccaacatctacctgcgttcatcgtcactggctcgctaccgggatcgtgtgaagaaaggcatctggatggcggaacaatgcatggagaaggtcaacgccaagcgaatttccagaggccagttgcctcgttcgatgttcctgaagaagctgtacaagcggtactcctacctaggccgaaggaacttcatttcttatggctaccgggcagccagaatcatgaacgctccatcgatcaagaagcagctcaaaccacactggaacaggctccgcaagcgcatttcagatgcgcaaggcgaacgacattga

SEQ ID NO: 324330 - DNA, 1212 bp, Pseudomonas aeruginosa
atgccatcctcgccatcctccctcccctccgcgctggtgctgctgttcgccgtcgcctgcggtctcagcgtggccaacgtctattacgcccagccgctgctggacgtcctcggtgccgagttcgccatcggccaggccggggtcggcctgctgttcggcgcgacccaggccggttgcgccctggcgctgctgctggtggtgccgctgggcgacctgctggagcggcgccggctgatgttcgtccagctcctgctgctggtgctgtcgctgctgctggtgggcttcgccggcgataccctcggcctggcgctggggctgctcggactgggcctgctcggcaccgccatgacccagggactgctggcctacgccgcggcgctggcggcgcctggcgagcgcgggcgggtggtcggcgcggcgcagggcggcgtggtgatcggcctgctgctggcgcgcagcctggccgggctgctcgccgacctcggcggctggcgcagcgtctacctggtctcggcagcgagcatgggcgggcttggcctgctgctctggcgggtactgccggcggcgccgagcaacgaactggggctgtcctaccggcagctgctcggctcgatgttcggcctgctggcgagccagcgcgtgctgcaggtgcgcggcctgctcgggctgttgatgttcgccgccttcggggtgttctggagcagcctggtattgctgctcggcgcgccgccgtattcgctgtcgcacagcgccatcggcgccttcggcctggtcggcgcgctcggcgcgctgggcgcggcgcgggccggcagcctggccgatcgcggccacgcccaggcgctcagcggcggcgccctgctgctgttgctgctgtcctggctgccgctcgccctcggcgcgcattcgctggcggcgctgattctcggcgtgctgctgctcgatctcgccggccaggcgatccatgtgctcaaccagagcctggtcttcgccatcgacccgcgcgcccacagccgcctggtgggttgctacatgctgttctacgccgccggcagcggcctcggcgccagcgccggcaccgccatgtacgcctgggccggctgggacgcggtgagcctgctcggcgcggcgatcagcctggcggccctggcgttctggtggttcacccgtggcgttggcggcgaagcgcgtacggcctgcgccaacggcgcctga

SEQ ID NO: 324331 - DNA, 693 bp, Pseudomonas aeruginosa
atgacgctattggatatcgaaaagctgctggacatgactcaccacatgtcggtgcacattcccatcgaactgatcatttcctgggagcagagcgaagaggcctggagtgtgaaagacaactgtctcaacttcgtctatgtcaatcgtcgctataccgaactgatcaccccgcggttcggccagaagaactccctgctatcccccttcagtgccagcatcgaagagcacgacaagctggtcatccagaccggcaagcgcatcgaagccctggcgctgctcaggccggacgatcatccggcaccctgctgcctgtatttcgaacgcatgccgctgtatgaccggcgcggcaaccgcaccggggtgatcgcccatgccaagaccctgacctcggtcgccccgcgcggcttcatcgccaccgacggcatcggtaccttcaccttcacgcccccctcggagttgttcacctcgcgcgaatgggacgtgatctacctgctgctttccggcctctcggaaaaagaaatagccgaacagatcagccgctccttgagtaccgtcaagttccacaagagcaacatcttccagaaggtcggttgcagttgcatcggcgccttcaaggcactcgcccggcaaaagaagtggaacttctatatcccgccgaccttcgccagcgccaagtacatcatcaatcactag

SEQ ID NO: 324332 - DNA, 2556 bp, Pseudomonas aeruginosa
atgaccttgcctttcacccgcgccgcctggcgcccgctgtgttccgccgccgtgctcggcgccgcgttgtgggccgccggcgccagcgctgccgaacgacgcttcgacctgccggcgcagccgctggccgcctcgctgtcgcgcctggcgcagcaggcgcaggtccaggtgctgttcgacgagtcgctcctgcggggcctgcgcgctccggcgctgagcggcagctacggggtgcgcgaggcgctggagcggttgctggtcggttccgagctggagctggtggaggcgggcggcggctacgtggtgcgccggcgccaggtcgacgcctacagcgacaacgcgctgcaactggacgcgcagaccatcgtcggcaacggtcgcgaagtggacgccagcaacgtcggccgttcgaccctgacccggcgggatatcgaacgccagcaggcggacaacatccccagcctgctgcagaccctgcccggagtgaccatgggcggctcgcccaagccgggcggacagaccaccaacatctggggcctgggcgacgccgaggacgtgccctataccctggacggcgcgcagaagagcggcttcgagcgctaccagcagggcaccgtgttcatcgaaccggaaatgatcaagcgcatcgaggtggagaagggaccgcactcggtgttcaccggcaatggcggcttcggcggcaccgtgcacatggagaccaaggacgcgccggacctgctgcgcgaaggccgcgacgtcggcgccatgctcaagtacggctatcactccaacgaccagcagaagatctactccggcgctgtgttcgggcgcagcgaagaccgccgcgtcgatgccctgctctatctcaacggtcgcgacggccgcgacatgaagctggccgacaacctgccgctgtcgcccaccgactacccgatcaaccccaagcgcctgcccaacagcgcccaggacgagaagaccggcctgttcaagctcaacctgcaccccaccgaggagcacgacctgggtttcacctacctgcgctcgaaaagctcgcgctggacgccgttctccgccagcagctacccgaccccgccgagccagtggaccatcgaccgctacggctacgagctgggcctgacccgcctgctggcccaccgcgataccaccgacaccacgtggaccggcaagtacaactaccatccgctggacaacccctggatcgacctgcaactgagctattccgacgcccgcaccgagcaactcgaccgtcgcgaggacaccgccttctaccagctcgccaccggtggcaagcggatgcgtaccgagtaccaggacaaggtcctggaactgcgcaacaccagccgtttcgataccggagcgctacagcacgagctgaccctgggcgcggcgctgcacaagcacaagcgcgacatcctcatgcacatgccgggcaagacctacgagaccccgcgctacaattacggctggctgcaaccggcattcatgccggccggcaagcaggacacgcagagcttctacatccaggacgcgatcacctacggcagcctgaccgtcaccccatcgatgcgcttcgacagcgtgcgcaacgacggccaggccaacctggcgccgatctacgacaatcccaagctcggccatgactatcgcgcccagacctactccggctggtcgccgcggctgtcggtgttctggaccgcgacgccgaacctggcgttcttcgccgactacaccgagacctggcgagcgccggtgatcgacgagcagtacgaagtgcagaacagttcgaccatcggtggcagcagccgcgacctggacgccgagcgcatccatgcgatccgtggcggcagcgtgatcaacctgccggacctgctggtcgccggcgacagcctgcagatccgcaccacgttgttccagaaccgcatcaaggacgagatattccgcacccgcagcgtcggctgccgccagcagtcgatcgacaacggcagtatcggtggtagctgcggcgacatgctgccgctgagcaactaccgcaacctgccgggcctgaccatcaagggcttcgagatcgagagcttctacgacagccagcggctgttcggcagcctgtcctactcgtggatgaccggcaagcacgatggggcctacagcaatccctggggaccgaacgtgtgggcgcgcgacatcccgccgccgaagtgggtggccatgctcggcctgaaggttccggaatgggatgccaagctcggctggcagggcgagttcgtgcgcaagaccgaccgcctgcccagcgatcgctacagcggcgggatgggtaccggttccggcgatatctactgggatcacgcggccaacgacagctacgacactcatcggctgttcgccgagtgggtcccggccaagctgggcctgaaggacacccgcatcgacttcaccgtggacaacctgttcaaccgctcctatcgccagccgctgggcggcgacctggtctacagccagggacgcaacgccaagatcagcgtcacccagttcttctaa

SEQ ID NO: 324333 - DNA, 957 bp, Pseudomonas aeruginosa
atgcccggcaccccgactacccagcccctgcgccattcccatcggttcgaccagggcaacccgctggccgagcgcaacacgcgctgggcggtattgctcaccgcctgcatgatggtcgcggaaatcgccggcggctggctgttcaactccatggccctgctcgccgacggctggcacatgagctcccatgccctggccctgggtcttgcggtactcgcctacggcgccgcgcggcgctatgccaacgacccgcgcttcagcttcggtacgtggaagatcgaggtgctcggcagctacaccagcgccctgctgcttctgctggtggccgggctgatgctctaccaatcggtcgaacgcctgctcgaccccagcccgatccactaccagcaggcgatgctggtcgccgcgctcggcctgctggtcaatctcgcctgcgcctggctgctgcgcgacggccatgcccaccacgggcacggccactcgcaccaccaccaccaccacgaccatcatgcccaccggcacgatctgaatctgcgcgccgcctacctgcacgtgctggcggatgccgccacctcgctgctggcgatcgtcgcgctggccggcggcctgctgtggaacgcggcctggctggacccgctgatgggtatcgtcggcgcggtactggtcagtgtctgggcatgcggcctgatccggcagagcagccgggtattgctggatgcgcagatggacgcgccggtggctgcggaaatccgcgcggcgatcgccagcagcccgctgccggcggaactgctcgacctgcacctgtggcaggtcggccagggcaagtacgcctgcctgctgagtctgctgaccaccgaggaaggcagcgccgactatttcaagcgccgcctggccgagcatgaggaactggtgcacatcaccgtcgaggtgaacccgctgctcccgctcgccgcctga

SEQ ID NO: 324334 - DNA, 1125 bp, Pseudomonas aeruginosa; identical to SEQ ID NO: 323562

SEQ ID NO: 324335 - DNA, 510 bp, Pseudomonas aeruginosa
atggccgaactgaccctccaggagcgcctgcagccgtcgctgctcgaccgcctcaccgacgacgagccgggcaacctcaaggaagccgcggagcgccgggtgctgaccctgagccagctgaaggcctcggtgctgcgcgacctggcgtggctgttcaacaccacctcgctgttcgaccccggccccgccgcacggatgccggccggcaactcggtgctcaactacgggctgccggcgctggccgggcacaccgcgtcgagcgtcgacgtgcatgccatcgaggcgctgctcaccgagaccatcgccaccttcgagccgcgcatcatccgttcttcgttgcgggtgcgcgcgcaactgctgcccggcgagatggaccacaacgccctgagcttcgagatcgagggcgacctctgggccgaaccggcgccgctgcgcctgctgctgaccaccaacctggacctggagaccggccacgtgcgcgtcgcccagggcgagcggaggcgtacatga

SEQ ID NO: 324336 - DNA, 2709 bp, Pseudomonas aeruginosa
atgagtgagatcagtcgcgttgcgctgttcggcaagctgaacagcctggcctacaaggccatcgaggccgccacggtattctgcaagctgcgcggcaatccctatgtcgagctggtgcactggttccaccagatcctccagttgccggactcggacctgcaccagatcgtccgccagtccgggatcgacccggcgcgcctggccaaggacctgaccgaggccctcgaccgcctgccgcgcggctcgacctcgatcaccgacctgtcctcccatgtcgaggaagcggtggagcgcggctgggtctacggcagcctgatgttcggcgagagccaggtgcgcaccggctacctggtgatcggcatcctcaagacgccgagcctgcgccatgccctcaccgggctgtcggcggaattcgccaagctcaaggtcgaggcgctcaccgagcgcttcgacgagtacgtcggcgcctcgccggagaacggcctgtcggccagcgacggcttcaacgccggcgccgccccgggcgaggccagcggcgccctggcgccgagcgcgatgggcaagcaggaggcgctcaagcgctttaccgtggacctcaccgagcaggcccgtagcggcaagctcgaccccatcgtcgggcgtgacgaggagatccgccagttggtggacatcctcatgcgccgccggcagaacaacccgatcctcaccggcgaggccggcgtcggcaagaccgcggtggtggaaggcttcgccctgcgcatcgtcgccggcgacgtcccgccggcgctgaaggacgtcgaactgcgcgccctcgacgtcggcctgctgcaggccggggcgagcatgaagggcgagttcgagcagcgcctgcgccaggtgatcgaagacgtgcagagttccgagaagccgatcatcctgttcatcgacgaagcccacaccctggtcggcgccggtggcgcggccggaaccggcgacgccgccaacctgctcaagccggccctggcgcgcggcaccctgcgcaccgtggcggcgaccacctgggccgagtacaagaagcacatcgagaaggacccggcgctgacccggcgtttccaggtggtgcaggtggacgagccgtccgagcacaaggccatcctgatgatgcgcggtgtcgcgtcgaccatggagaagcaccacaaggtgcagatcctcgacgaggcgctggaggcggcggtccggctgtcgcaccgctacatcccggcgcgccagctgccggacaagtcggtgagcctgctggataccgcctgcgcgcgcaccgccatcagcctgcacgcggtgccggccgaggtcgacgatagccgccggcgcatcgaggcgctggaaaccgagctggcgatcatccgccgcgagagcgccatcggcgtcgccaccgccgaacgccagcgcaacgccgagaccctgctggccgaggagcgcgagcgcctggccgccctggagcagcgctgggccgaggaaaaacgcctggtcgacgaactgctggagacccgcgcccgtctgcgtgccgccgccgaagcggtggacgtcggcggcgtgccgctgggcgaaggcgaggcgcgtctcgacgaggaacagcgccaggcgctgcatgcgcggctggcggagctgcaggcgcaactgagcgcgttgcagggcgaagagccgctgatcctgccgaccgtggactaccaggcggtggcctcggtggtcgccgactggaccggcatcccggtcggccgcatggcgcgcaacgagatcgagaccgtgctcaacctcgaccggcacctgaagaagcgcatcatcggccaggaccacgcgctggagatgatcgccaagcgcatccagacttcccgcgccggcctcgacaacccgagcaagccgatcggcgtgttcatgctcgccggcacctccggggtgggcaagaccgagaccgcgctggccttggccgaggccatgtacggcggcgagcagaatgtcatcaccatcaacatgagcgagttccaggaagcccacaccgtctccaccctcaagggcgccccgcccggctacatcggctacggcgagggtggcgtgctgaccgaggcggtgcgtcgcaagccctacagcgtggtgctgctggatgaagtggagaaggcccacccggatgtccacgagatcttcttccaggtcttcgacaagggcgtgatggaggacggcgaaggccgggtgatcgacttcaagaacaccctgatcctgctcaccaccaacgccggcaccgagatgatcgccagcctctgcgccgatccggaactgatgcccgagccggaagccatcgccaagtcgctgcgcgaaccgctgctgaagatcttcccgccggcgctgctcggccgcctggtgaccatcccctactacccgctcagcgacgacatgctcaaggccatttcgcgcctgcaactggggcggatcaagaagcgcgtggaggcgacccacaaggtgccgttcgagttcgacgagggcgtcgtcgacctgatcgtctcgcgctgcaccgagaccgagagcggcggccggatgatcgacgcgatcctcaccaacacgctgttgccggacatgagccgcgagttcctcacccgcatgctcgaaggcaagccgttggccggggtacgtatcagtagccgcgacaaccagttccactacgacttcgccgaggccgagtga

SEQ ID NO: 324337 - DNA, 2070 bp, Pseudomonas aeruginosa
atggcacttgcgcaacagacccgcctggtccgggtcgacagtccgctcggcgcggaggtcctgcaattgcagcgaatggagggtcgcgaagagctcggccggccgttcgcctacgagctggaactgatctcggaaaaccccgacctgccactcgacgggctgctgggcaagccggccagcctggcgctggaactgcacgacggcagccggcggcatttccacggcatcgtcgccgcttgcagccagggatccggcaacggccagttcgccagctaccaggtcaccctgcgcccctggctgtggctgctgacgcgcacctccgactgccgcatcttccagaaccagaaggtcccggacatcatcaagcaggtgttccgcgacctcggcttctccgacttcgaggacgccctgagccgctcctaccgcgagtgggaatactgcgtgcagtaccgcgagaccagtttcgacttcgtcagccggctgatggagcaggaaggcatctactactggttccgccacgagcagagccgccacatcctggtgctctccgacgcctacggcgcgcaccagagcccgccgaactacgccagcgtgccctactacccgccgaccctggaacagcgcgagcgcgaccatttctacgactggcacatggcgcgcgaggtgcagtccggctcactgagcctcaacgactacgacttccagcgtcccggcgcgcgcctggaggtgcgttcgaacatcgcccgctcgcacgcggcggccgactacccgctgtacgactaccccggcgaatacgtgcagagccaggacggcgagcagtacgcgcggacccgtatcgaagccttgcaggcgcgctacgaacgggtgcgcctgcgcggccgcgcccgcggcctgggttcgggccacctgttcaagctcagcggctacccgcgcgaggaccagaaccgcgagtacctggtggtcggcgccgagtaccgggtggtccaggaactctacgagaccggcggcggcggggtcggcgcgcagttcgaaagcgagctggactgcatcgatgccggccaggcctaccgccccttgccgaccactccgctgccgatcgtccgtggcccgcagactgcggtggtggtcgggcccaagggcgaggagatctggaccgaccagtatggccgggtcaaggtgcatttccactgggaccgccacgaccagtccaacgagaacagctcctgctggatgcgcgtctcgcaggcctgggcggggaagaactggggctcgatccagatcccgcggatcggccaggaagtgatcgtcagcttcctcgaaggcgacccggaccggccgatcatcaccgggcgggtctacaacgccgagcagacggtgccctacgagctgccggcgaacgctacccagagcggcaccaagagccgttcgagcaagggcggcacgccggccaacttcaacgagatccgcatggaggacaagaagggcgccgagcagttgttcatccatgccgagaagaaccaggacatcgaggtcgagaacgacgagacccactgggtcggccacgaccggaccaagaccatcgaccacgacgagacggtgcatgtgaagcacgatcgcaccgagaccgtggacaacaacgagaccatcaccgtgcatgccaaccgcagcaagacggtcgaccgcaacgagacggtcaggatcggcatgaacaagacggaaaccatcctcatggcctcgttgcagaacgtcggcatggggcgcatggaaaacgtcgggctcggctacagcctgaacgtcggcatgatgatgaacaccgtggtcgggctgaaccagagcacccaggtgatgaagaagaagaccttgtcggtgggcgatagctacgaagtgagcgtgggcggcagcgacgatggctctaagatcaccctggacggtcagagcatcaccctcggcagccagcgcatcgagctgaccgccgaccgcgagatcctcttgcgctgcggccagagcacgatccgcctgacgccgggggagatcgagatcctctcgcccaatgtcgatatcaactgttga

SEQ ID NO: 324338 - DNA, 930 bp, Pseudomonas aeruginosa
atgcaaccgttcgacagccggcaggccgatgaagtcgccacgctcctggccctggccgagcacggttcgttcgccgccgccggccgcgccctgcaacgccatccctcggtgctctcgaagcggctcggcgcactggagcgtcgcctcggcatccgcctggtcgaacgcaccacccggcaactgcgcttcaccgatgaaggcgagcgcctggcgagccgcttccgccaggccgtcgacctgctcgacgaggccgagcacgaagccagcctgggcgccgcgcaactgcgcggacgcctgcgcatcgccctgccgtcggcgatgggccggctctggctcggtccgctgctggcggagttcgccctggcgcatccgcaggtggtgctggaaaccgactattcggagcgcttcgtcgacatcatcgcggaaggcttcgacctcgcgatccgggtcggcgaactggccgacagccgcctggtggccaggcggctgtgcgcccatcggcgcatcctcggtgccgctcccgactacctggagcggcatggggtaccgcgtatcccggccgacctggcggcacacaactgcctcggcttcagcggactgcactcgtacccggaatggaagctgacccgccaggacgaacagcagcccgtgcgggtacgcggctcgatggtcagcaacgacaacgaggccctgctctgcgccgcacgccagggcctgggtatcttcgccgccggcgagtggctgatgagccgcgacctcgaagccggcaggctggtacgggtgctgccggagtggaaactggacgccgacgccggcgtctacctggtgcgcccctcggcgcgctacgccacggcggcggccagcgcgttccgccaatgggtggaagcgcggttcgccgctggcccgccctggcagcgccagcgggcctga

SEQ ID NO: 324339 - DNA, 1683 bp, Pseudomonas aeruginosa
atgcgtctgaccctgaaatccaaagtcctcctgctggccatggtgccggtgctgctcttcgccctggtgctcagcggcggagcggtgctgatcctgaaaaaacaggctgatgccgaagtcaaggatacccgcgagcgcctgctcggcgaccgtcgtgccgaactcgagcactacgtgcagatcgccatgggcagtatccaggccgagtacgaccgctcggccaacggcgacctgaatgcccgcgccgaggccatcgcgcgcctgtcgaagatcaagtacggcaaggacggctatatcttcggctacgactcccaggtggtgcgcctgtttcgcggcgacagcccggtggacgtcggcaagagcttccgcgaccgccgcgatcccagcggcgtctacctcaaccgcgaactggtggaggccggccgcaacggcagccactacgtgacctatacctcgccgctgccgggcaacgagggcgtcatggtgcccaagctgtcctataccctgtacctgccgaagtgggacatggttatcggctcggcgatcaacctcgacggcgtcgaggcccagttggtggaaatcaagcaggacatcgacgagcgtatcggcaccctgatcgccagtatcgtggggatcgccggcgtccttctggtggtcctgctggtgatcggcctggcggtggccaacgcgatgctgcggccgttgcaccagatccgccagaacctcgatgacatcgccgccggcgaaggcgacctgacccgtcgcctaccggtgaccagccacgacgagctgggcgagctggccggttccttcaaccgcttcgtcgagaagatccacggtctggtgcggcagatcgccgggatgaccggcgacctcaagcaactggtggagcagatgtcggcccaggccgagcgttccgagcaggccatggagcgccagcgccacgagaccgaccaggtcgccaccgcgatcaacgagatgtccgccgccgcccatgaagtggcgcagagcgcccagcgcgccgccgaggccgcgcagcagaccgaccacgaaggccaggcggccaagcgcgtggtggacggcagcatcgagcgcatccacgcgctggtggacgagatccgcgacagcgggacttctctggatagcctgcagcaggacgtgcaatccatcgtcagtgtgctcggggtgatccgctccattgccgaacagaccaacctgctggcgctcaacgcggccatcgaggcggcccgtgccggcgaggccggacgtggctttgcggtggtcgccgacgaagtgcgggcgctggccagccgcacccagcagagtacccaggaaatccagggcatgatcgatcgcctgcagcagggcaccaacgccgcggtcgacgccatgcgccgttccggcgaggccggcgagggcaccagcaaccaggccaaccaggccggcgattcgctggatgccatcgcccagctgatcgccaccatcaacgcgatgaacgcgcagatcgccagcgccgccgaggaacagaccgcggtggccgaggagatcaaccgcagcgtgcaccagatcgctggcgcggtggacagcgtcgccgacgaggcccagcagggcgcgcagaccgcccgcagcctggcgcaactgggccagggcctgggccgactggtcggtcagttccgcatctga

SEQ ID NO: 324340 - DNA, 1404 bp, Pseudomonas aeruginosa
atgtccaaacattcccggcttgaaaaagccttcctgcgcagcggcatcctcgtcgaccgccagcaggacatcgtcaccctcacccgtcgtcacgacggtacttcggcccaggtcctgctgcccgccagcttcgcgctggaggaaaaggccgtgcgccagttgctcgacttcgcctcggtccaggcacccggcgacaccgggcacgtctgcaaggcctgcgccacgccggacttccatcccggcagcatcgccccggtcggctccatcgtcgccagtacggcggacttcgtcattcccgctgccatcggcaccgacatcaattgcggcatgcgcctgctgcgtaccggcctgaccctgtccagcgccgaggagcacaggcaagccctggtcgccggcctgacccacgtcctgctgcgtaacggtcgcgacgtaccattgcgggtccaggcgttcgaagcgctgttcgccgaaagccccgggcactgcctggagcgtctcagcgaagacggcctgtgggccgaggtcgaccaggcgcggctgttccgcgagttacagggctgcatcggtctggatgaattcggcgggcgtctcgagtatgcccccgaggccttgcgcgatcgccgccgcagcctgatccgcgatcccggcctgggtaccaccggttccggcaatcacttcgtcgagttgcaggtggtggaccgcctgctcgaccgccaccaggccttcgccctgggcctcagggccgacgaactggtggtgatgatccacagcggctcgcgcgatgtcggcttccacgtcggccagcgctggatggaccgtgcccgcaccgcctggccgcgcggccggcgccaccccgcgtccggcctctacgcgctgggcggcgagctggccggagaatacctccaggccatgggtggcgctgcgcgctatgcctggctgaaccgggtggtgctggcggagctggtgcgcaaggtcttgcgcgagaccttccagcgcgacgacagcgccctgctggtggacgtcccgcacaacgtggtgctccaggaacagggcctgaatctccaccgcaagggcgccacgccggcccgccagggcgatctgctgctgattcccggctcgatgggcgattactcgtacatcgccagcggcctgggccacccggactggctatggtcctgcagccatggggccggccgcagcatccgccggcaggcgctacgagcgctgaaaggcccgggcgacagcgcgctgccctggcactgcgtgaccctccgtgaggagcgccgcatcgaagaggccccgggcgcctacaagccggtggggccggtgatcgatgcccaggagcgtgccgggctgatccggccgctggcacgcttgcgtccgtggctgaccttcaaggcctga

SEQ ID NO: 324341 - DNA, 273 bp, Pseudomonas aeruginosa
atgctcagcggtaaggtcaagtggttcaacaacgccaagggctacgggttcatcctggccgagggccgagatgaggacctgttcgcccattactcggccattcagatggacggttacaagacactcaaggcgggccagccggtcaatttcgagatcatccagggaccgaagggactgcatgccatcaacatcagccccgccaccgcgacaaccgccgcaccctccgcccccgccccgcaggaagagccgcaggcgacgcccatcgaagcctga

SEQ ID NO: 324342 - DNA, 180 bp, Pseudomonas aeruginosa; identical to SEQ ID NO: 323520

SEQ ID NO: 324343 - DNA, 186 bp, Pseudomonas aeruginosa
atggccttgctggaaagagggctgaagcagcgcatcgtcggggcgttggtgctgatcgccctggcggtgatcttcctgccgatgctgttcacccgcgaagacgagtcgcgccaggtcgtggtggaagcgccgccgcgcccgcaatcgccgccaaagtcactggctgggaagcagcccgccggctga

SEQ ID NO: 324344 - DNA, 2760 bp, Pseudomonas aeruginosa
atggttcggcttcgtacactggttcgggcaatcgcggcggcctcggtcctgacttccggcatggcgcatggattgggactgggggaaatcaccctgaagtcggcgttgaaccaaccgttggatgccgagatcgagctgctcgaagttcgtgacctgggttcgggcgaggtgatcccgagcctggcgtcgccggaagagttcagcaaggcgggcgtcgatcgcctgtactacctcaccgacctgaagttcacgccggtggtgaagcccaacggcaagagcgtcattcgcgtgacctcgtcgaagccggtgcaggagccctacctgaacttcctggtccaggtgctctggccgaacggccgcctgctgcgcgagtacaccgtcctgctggatccgccgctgtactccccgcaggccgcggcaagcgctccgcaagcgccggtcagcgcgccgcgcgtgaccggcgccccgcgagccccgcaggctccggctccggtgcgtaccaccgcgccggcaggcagcgacacctatcgcaccgtttccaacgacacgctctgggagatcgcccagcgcaaccgtaccgatcgcgtttccgtaccccaggcgatgctcgcgttccaggagctgaatccgggcgccttcgtcgatggcaacatcaaccggctgaagagcggccaggtcctgcgcattcccaccgaacagcagatgctggagcgctcgccgcgcgaggcgctgtcccaggtgcaggcgcagaaccagagctggcgcggcagccgcaatccggccgcgggcagcgctggcgccaggcagttggatgcgacccagcgcaatgccgccgggtcggcgccatccaaggtcgacgccacggacaatctgcgcctggtgtctggcgagggcaaggccagcaagggtgccgacaagggcggaaagggcgacagcaaggcgatcgccgataccctggcggtgaccaaggaaagcctcgacagcactcgccgcgagaacgaagaactgcagagtcgcatgcaggatctgcagagccagttggacaagctgcagaagttgatccagctgaaggacgcccagttggccaagctgcaagggcagttgggcgccgaaggccagggcgcagcccagccgaacgcagccctgccggatgcgtcccagcccagtgcggccgcgcaggcaccggctcagcccgggactcccgctgcggcagcgccgactcctgctccggccggagacgcacccgccgctccggcgcagcctccggtggcgccgccgcccgcgccagctgccgagaagcctccggcacctgccgttccggcgcccgctccggtacaggcggcagagcagccggcaccgagcttcctcgacgaactgctggccaacccgctgtggttggcggtgatcggcggtagcgcactgctggcgttgctggtgctgctgatgatcctgtcgcggcgcaatgcgcagaaagagaaggaagaagcccaggctttcgccgcggataccggcgaggaacaggaggatgcgctggacctgggaaaggacggcttcgacgacctgaccctcgacgagcctgagccgcaggtcgcagccgtcgctccgcaggtcgagaagaccaccgcgcagacttccgatgcgctgggcgaggccgacatctatatcgcctacgggcgtttcaaccaggccgccgaactgttgcagaacgccatctacgacgagccgcagcgcaccgacctgcgcctcaagctgatggaagtctatgccgagatgggcgatcgcgaaggtttcgctcgccaggaaaacgagctgcgcgaaatcggcggcgcacagccgcaggtcgagcagctcaagtcgcgctatccggcaatggtcgcggtcgccgcggttgccggcctggccggcgccaagctggcgcaggacgagctggatagcttcagccttgacgacctgtcgctcgacgacagcggtcacgcggccaagccggatgcggcaggacaggatctcgacgacgccttcgacctgagcctggacgacctgggcggcgacgacgtgcaggccgacctcaagtccgacagcggggcgctggacgacctgaccctggacagcgatctggacctggcggcctcgaccgcggcggacaagcctgtcgacgatctcgacttcggcctggatttcgcggagttggcagagactccgagccaacccaagcatgacgacctgggcgatttctccctggatctcgatgcgccggaagacaagctttcggacgacgacttcctgctttcgctgaacgacgaagtgcccgccgcggcgcccgccgacaacgaattcaccctcgataccgaggctgccgaagagccggcgttgtccctgccggacgacttcgacctgtcgctggccgacgagccgacggagccggccgctccggagaagggcgaggacagtttcgccgcccagttggacgaggtgagtgcgcagttggacgagttggccagcaaccttgacgagccgaagagcgcgacgccgagtttctccgccgaagatgcagcggtcgcctccgccctggacggagacgccgacgatgacttcgacttcctctccggtgccgacgaagcggcgaccaagctggatctggctcgcgcctacatcgacatgggcgatagcgaaggcgcgcgcgatatcctcgacgaagtcctggccgaaggtaacgacagccagcaggcggaagcccgcgagttgctggagcgcctggcctga

SEQ ID NO: 324345 - DNA, 1023 bp, Pseudomonas aeruginosa
ttgaacgccccccaggaacttcatcgctttatcctcgagccgttcgacgcccgcagcttcgcgacactttgcgggcagttcgacgagcatctccaccagatcgagaaacgcctcgacatcgagatccgcaaccgcggcaaccagttcgaactggccggcgaaccgcgccggaccaaggttgccgaacgcctgctgcagcgtctctaccgcgaggcgcagaacggcaccgatctcactcccgacaccgtgcacctgtacctgcaggagtccggcctggaagacctcgaggaattgcagagcgcgccgcaggtcaccctgaagtcgcgcaaggcgcacatccgcccgcgcggcgccaaccagcaacgctacgtcaaggcgatcctcgaccacgacatcaacttcggcatcggcccggccggcaccggcaagacctatctcgccgtggcctgcgccgtcgacgccctggagcgcgagcagatccgccgcatcctgctggtgcgcccggcggtcgaggccggcgagaagctcggtttccttcccggcgacctgtcgcagaagatcgacccctacctgcgcccgctctacgacgcgctctacgagatgctcggcttcgaacacgtggccaagctgatcgagcgcaacgtcatcgaggtcgcgccgctggcctacatgcgcgggcgcacgctgaacaacagcttcatcatcctcgacgagagccagaacaccacagtcgagcagatgaagatgttcctcacccggatcggcttcggctccaccgcggtgatcaccggcgacgtcacccaggtcgacctgccccgcggcacccgctccggcctcaagcacgtgatcgaggtcctgcaggacgtccccggcatcagcttcacccacttcaagcccaaggatgtggtccgccacccgctggtgcagcgtatcgtcgaagcctacgagcgtcacgagagccgccagcaaggccaggtgcggccggtcgagggaacgggcaagggcggtcacgatgccgcttga

SEQ ID NO: 324346 - DNA, 432 bp, Pseudomonas aeruginosa; identical to SEQ ID NO: 321027

SEQ ID NO: 324347 - DNA, 891 bp, Pseudomonas aeruginosa
atgagccgctatgccttcgtttccgccgatgtcctggatatcgcctacctggagtggaatccgcagggggcgcgcagcgccgtcttgttgcacggttggccggacagcccgcatacctggaaagacctggcggagtccctggcggacgccggctatcgggtgctggcaccagccctccggggattcgccccgacccgcttccgcgatgcgtctactccgcgcagcgggcaactggcggctctggcttgcgatctgctggcattcgtcgacagcctggcattgcaacgtcccctgctggtcggccatgactggggggctcgcgcggtggccagtgcctgcggactgcgcgagggcgtagcctcgcacctggtgatgctctcggtggggtacgccagcaacgatccgcagcaagttctttccctgccgcaggcccgtagcttctggtaccagtggttcatggctacgccacgcggagagcgcgcgctgcgcgaggagggcgaggcattcgcccggcagatgtgggacacctggtcgccgccgggatggtatgccgagcgcgatttccaggaggccgcccaggccttctccgggccggactgggtcgccgtggtgctgcactattaccggcatcgctggggcttcgtcgcgggggagccgcgctacggggcggcggaacagcgcttgctcccggcaccgcgcctggcgctgccgaccctggtgctgcacggcggcgcggatgcctgcacccaccccgacggctcccgcggacgcgagcactacttcagcgggcgctaccagcggctggtgctggagggcgtcggccattttccgcagcgcgaggcggccacccaggtggcggacgctatcctgcggttctgcgcggatgactag

SEQ ID NO: 324348 - DNA, 642 bp, Pseudomonas aeruginosa
atgcactcgacgcccaagcgcgttctgctcgccggcgcgaccggtcttaccggcgagcacctgttggatcggatattgagcgagccgaccctggccaaggtcatcgcccctgcccgcaaggcgctggccgagcatccgcggctggacaacccggtcggcccgctggccgagctgctgccgcaactcgacggcagcatcgataccgccttctgctgcctcggcaccacgatcaaggaagccggctcggaggaggccttccgcgcggtcgatttcgacctgccgctggcggtgggcaagcgcgcgctggagatgggcgcccggcattacctggtggtcagcgccctgggcgccgacgccaagtcgtcgatcttctacaaccgggtcaagggcgaactggagcaggccctgcaggaacagggctggccacaactgaccatcgcccggccatcgctgctgttcggcccgcgcgaggaattccgcctggccgagatcctcgctgcgccgatcgcccgcatccttcccggcaagtaccacggcatcgaggcctgcgacctggcccgcgcgctctggcgcctggcgctggaggaaggcaagggcgtgcgcttcgtcgagtccgacgaactgcgcaagctggggaaatga

SEQ ID NO: 324349 - DNA, 1641 bp, Pseudomonas aeruginosa
atgaccgctgtcgacctgctgctggtcgcgaccctgctggcggccctgctcgcctggtggatacccgccctgcccggccgccgtggcctgctggcgctcgcctcgacgctggcgctcggcgccggcctgtacgctgcatgggacgaccgctggcaagccggcgtcggcgccttcgccggtttctccctgctgctcggcgcctgcctgcgccggaagcccgtgcgcggcctgccgttccggaccggttcgctatacggcctgctggtgctgctggcaatcgccgcgctgtacctgttcccggtcgcgccgctgccggcgccgagcggcccctatgcggtcggcgtgcgcgatttcgaactggatgaccccagccggcccggcctgctcggcgccccggccgggcagccgcggcgcctgctggtacgtgcctggtacccggcgcgcccgatcgccggcgccgcaccacgccactacttcgacccggacgaggcacgcagcaccgcgcggggcttcggtgaaatactcggctttccgccgttgctcgcctacctcaagcacctgcgcaccaattcctatccggacgccccgctacgcgacgactccgctcgcctgccggtggtgttctacagccacggctacagcgccttcgccggcggcaactggaccctgatggaagaactggccagccacggctacgcggtctacgccatccagcacagcggcgacgcgtcgccgacccgcctgcccgacggcacgctgctgcccatggaccccgggctggtcgaacacctgcgccgggccgcccacgacggcttgccgcaggccatgcgccagggctatgtcagcgacgatctcgaccagcgcctcgacggccagttgcacaccgccctcgacctgcccgccccggccaaccgcgccgtcaacctcagcgcgccggtatggctggccgaccgcctgttcgtccatgaccgcctgcaggccggcgaggtcccggacagggtcgccgacctggtggccgccagcgacttcgcgcacaccggcgagatgggcatgtccttcggcggctcgaccaccggcgcggtctgcatggtcgaccgacgctgcgcggcggccgtcaacctcgacggcggcgacttcgacttcgcgcccttcgacagcgatttcccggcaccgctgctgatgctgcacgccgaccttggcaacttctaccggctgttcggcatcgaaccgccggcccgcccgagaagcttcaacgacttttcctacgaacgcttcgagcacgccggccagcgccaggacattcatcgcctggtactgcgcgattcggcccatgccgggcttaccgacaatccgctgttcatccgccggccgctgcgcgacgggctgctcggctcggcaccgacggaagtcctcatccaggctcccaacgccctggtgctgggtttcttcgatcactacctgcgcggccgcgccaacgactttccgcaagcgcagatggcgcgcttccccgcctggctgacgcgctacgacaactcggcggtgcgcgactggtggctggccaagccggaagcccagcgcctggcgctgcgacaacgcatcgacgaaatgaaacggcgcaagaccgggctggatcttccctga

SEQ ID NO: 324350 - DNA, 1152 bp, Pseudomonas aeruginosa
atgaccgcgaaaaccctgcgcacctggtacctggtgcacaaatggaccagcctgatctccacgatcttcctgctgatgctttgcctcaccgggttgccgctgatcttccacgaggagatcgagcactacttcgagccgcatccgcagctcgagccgctcaccgccgagtcgccgcgcatcgactacgacgacgtgatcgcccgcgccctggccgcccggccgggcgaagtggtgcgcttcctggtattcgaaaaggacgacccgctgggcctggtgatcagcgcgccgagcctggtaccgccgccggagaacggccacatgcagccgttcgacgcgcgtaccggggaattcttcgacgcgctgccgccgccgggcggcttcatgtacctgatgctgaagctgcacaccgacctgttcctcggcctgcccggctacctgttcctcggcctgatgggcctgctgctggtggcctcgctggtgtccggggtggtggtatacacgccgttcatgcgcaagctggacttcgccacggtacgcgccgaacgcagccgtcgcctgaagtggctggacctgcacaacctgctgggcatcgtcaccctgtcctgggtactggtggtcggcgtgaccggggtgatcaacaccctggccctgccgatcctgatgctctggcaaggcgggcagttggcggaaatgaccgcgccctacaaggacgcgccgccgctacagcgcctcggctcgctcgacgcggccctggccacggcacgccgggcggcgccggacatggaggtcagcttcgtcggcttccccggcacccagttcagcagccagcatcactatgcggtgttcatgcgcggcaacacaccgctcaccgagcgcctgctgaagccggcactgatcgacgcgcagagcggcgaactcaccgacatgcgcgagatgccgctgtacgtgaagacgctcctgctgtcgcagccgctgcacttcggcgactacggtggcatgccgctgaagatcgtctgggcgctgctcgacctcgtcagcatcgtcatcctcgccagcggtctctacctctggctcggccgacgcaagacgccattggagaagcgcctggcggaactgccgggcggcagcctggcgacggagggcaaggcatga

SEQ ID NO: 324351 - DNA, 2412 bp, Pseudomonas aeruginosa
atgcccgtacgcacgcttcgcccccgttcgctgtccctggccatccacgccgccatgaccctcgccctcgccggcgcggcccccgccctgcttgccgccgaggcgcccgccgccagctcggcgcgcagctatgacatcgcccccggcccgctcggccgtaccctgtcggccttcgccagcgacaacggggtatccctggcgttcgacccggcgctcaccgagggtcgccgcagcgccgccctgcgcggccgctacgcgccggtcgaggcgctgcaccgcctgctgctgggcagcggcctggagttgcagcagcgcagcgatggcagctacaccctggtgccggcagccaccgatggcgcgctggaactgcaatcctcgctgatcaccgcccaggccgccggtgccgagaccctgcccgccgagtacgccggcggccaggtggcccgtggcgcgcgcctgggcatgctgggcaacgccgacgtgatggatgcgccattcagcatcaccagctacaccgccaggaccatcgagcagcagcaggcgcgcagcgtcgccgacctgctacaggccaacgatccgtcggtgcgggtggtcggcgggcgcggcgacctggtggacagctacacgattcgcggcttcagcgtgcagaacgccgacgtcgccttcaacggcctctatggcctgctgccgttctggcgggtaccgatcgaattcgccgagcgcgtggaagtgctcaagggaccgaacgccctgctcggcgggatttcccccggcggcagcgtcggcggcaccatcaacctggtgcccaagcgcgccgacgaccagccgctgacccgcgtcagcgtcgactggacccagcgcggccagctcggcactcacctcgacatcggccggcgcttcggcgagaacaacgccttcggcgtgcgcttcaacggcgtctaccgcaacggcgataccgccgtcgaccatcagagccgcgagtttcccatgctctccctgggcctggacttccgtggcgagcgcctgcgcctgtccagcgacctgctgtaccagaaggaaagcctggaaggcgtggtgcgcccgctgctgaccggcccgggaaccacccacatcccccacgccccggactcgaagacacgcttcggcctgcgcgattcctacctggaccaggaggattactccatggtcaaccgcggcgagtacgacctcgccgacaacctgacggcgttcgccagcatcggcggccgccagagcaactacgaaaccatcgccgccaacagcatcctcgtcggcaaccagggcgatatcgtcaacagcctggcacgccagcgcggcgaccgccgcacctattccgccgaggtcggcctgcgcggcaacttcgacaccggcccgctccgccacgactggacgctcagcgccaaccgcctgcacgaacggctgggcatggtctatgccttcaccgggatgcagccgggcaacctctaccagacctcgccgcatacgccgctgccggacttctccagcctcgacgggagcattccgaagaccaatgaaaccgacctcggcggcgtggcgctggccgacaggctgtcgttcctcgaggatcgcgtgcaggtcaccctgggcgtgcgccgccagcagatcgagtcgcgcaactacgaccagaccagcggcgcgcgcaccagccacgacaagcggcacgtgtggacgccgatggccagcgtgctggtcaagccgctgcaggacctgtcgctgtacgccaactacatccagggcctcagccagggcgaggcggcgccgatgaccgcggccaacgccggccaggtgctggcaccgtacaaggccgagcaatacgagatcggcgccaagtacgacctgggcggcttcaccaccaccctggcgctgttcgagatcaggaaaccgaacgcctataccgacgccagcaacgtcttccgcgccgacggcgagcaacgcaaccgcggcgtggagctgagcctctatggcgaaccgctggacggcgtgcgggtgatggccggcgccacctacatcaagcccgagcagaacaagaccggcgaccctgccagcgaaggcaaggacgcgcccggcgtggcccgtcgccaggccaacctgggggtcagctgggacaccccgttcgtcgacggactgaccctcgacagccgctggatctacaccggctcggcctatgtggacagcgccaacgccctctccgtgccgcactggaaccgcgtcgacctcggcgccgcctacgccttccaggtcgccggcaagccgctggtggcgcgcgccaacctggagaacgcgctgggcaaggactactggaccgcagccaacggctacctgtcgatcagctcgccgcgcaccctttccctttccctcacggcggacttctga

SEQ ID NO: 324352 - DNA, 681 bp, Pseudomonas aeruginosa
atggctttcgatgccgcccgctatgtccaccgctactacgccagcctggcgcccgccccgggcaacgaatacccgcgcctgagggcctgggagtacctctgggagtatgtctgggaccccagtcgcagctgggacgacctgaccgcccccgaacagctcgacaccaccgccctgcacctgggtttctacctggccaactggggcatgttccgtggctcctcgggactgctgcagaacagcaacctggacctgatgaaagcgctggcccggcagctcttcagcggtgccggagcggaactcttcgagctgtccctggtggatttcgccggcaacggcgcgcgcctggcgcacaaccgcaagctgctggaaacggtgctcgggtcgatggatgccctcagcagccgggtgagctggaccgacaccctgaagagcaagatcctgctcggcgtctggggcgagtttcccgccctcgaccgccactacgtggccgcctgtcgcgcgctgtatccacgccggggcctgacgagcgtcaacggcgggaccctcaccgcgctgcaccgcctgatcggcgaagaaaggctgtcgttcccgcgcctggagaccgcccgcaaggggctcctctaccccaccgggcgcctggccgacatggctttcttccagtacggcctggaaaacgcctga

SEQ ID NO: 324353 - DNA, 192 bp, Pseudomonas aeruginosa
atgcgtaacggaatcgacgctgtatccgccccgctacccaccctgttcgtatctccgccggcggtcttcaccgcctccctcgagcgacttcccctacgcgctcggcaggcccccgccgcccagcgcccgccggggtcgcccggcattcccggcagcgcccggttgcagactggcgccgccacgtcccgctga

SEQ ID NO: 324354 - DNA, 348 bp, Pseudomonas aeruginosa
atgaacccttcgctcatccgtctcgacgacgaaagtcctttcacctcgcccacgcccgtcggccagccgctgggcgaaccggtagccctgacccgtaccgcggcccaccgcccgctcgccgacggcaacggcgtgaccggcatctgggaatgcaccccggggcgcttccgccgacaggtcgagcaggccgagtacagctacatcgtcagcggtgaaggtcgcttcaccccggacgaaggccaggccgtggagtttcgcgccggcgacgcgctctatttcgccgctgccacccagggcacctgggacatccgccagaccgtgcgcaagacctacctgatcttcgactga

SEQ ID NO: 324355 - DNA, 1401 bp, Pseudomonas aeruginosa
atgaaactcacgctcacccctcccctgacccccagccactggatgcgctcgaccgacctggccgacgccgccagcgcccccctcgtcggcacccactcggcggacgtggcgatagtcggcggcggtttcgtcgggctctggaccgccatcaccctcaagcaactggagccggacgcacgggtcctgctgctggagcaggacgtctgcggcggcggcgcttccggcaggaacggtggtttcgtgatgtcctggtggccgaagatcggtaccttgctgggcttctgcagcgaggcgcaggcgcgcttccttggcgaaagcgcggagcgggcaatccaggaactcggggagttctgcgcgcggcatgacatcgatgcgcacttccagcagaagggctggctgtggaccgccaccacggcgcaccacctcgacgcctggaacgataccctcgccgcctgcgaacggctcggcgtcagacccttcgagcgcctcgacgccagcgaagtggcacgccggaccggttcgccggtgcatctcgccggggtctttgagcgcagcaatgccaccgtgcaaccagccttgctggtgcaaggcatgcgccgcgtggcgctggccctcggcgtggaaatccacgagcgttgtggcgtcagccagatcgttcccggccagccggcacagctgctgagcgccggggcccgggttcaggccaaggcggtggttctcgcgaccaacgcctggtcggccgccctgcccaggctctccaggctaatcgtgccggtgaacagttccatcgcggttaccgaggcgataccgcaacggctggagcgaatcggctggaccggcggggaagccatcaccgattcccaactgatggtggactactaccgcaccacccgcgacgggcgcatcgccttcggcaagggcaccggcgccatcagctacggctcgcgcatcggccgggtattcgacgtcgaccgggagagcctggccctgaccgaggccgacttccgccgcacctatccctcgctaggcgacatcccgctggtcgacggctggtccggccccatcgaccgtacctacgacagcctgccggtcttcggccacctgcacgagaacatccactacggcatcggctggagcggcaacggcgtgggaccgagccgcctgggcgggcggatcctcgccagcctcgccctcggccgcgacgacccgtggagccgttgtccgctggtagaacgccgctgccggagcttcccccccgagccgctgcgctacctgggtggctccctggtgcgcaacgccgtcctgcgcaaggaacgcgcggaactcgccggtaccgcgccctcggccaccgaccgctttctcgcgcgcttcgcccccgccggccttgaagacaaatcctga

SEQ ID NO: 324356 - DNA, 990 bp, Pseudomonas aeruginosa
atgacgccgttcgcctatgccaagccggccgacatcgagcaggcgctgggcctcgccggcccggagtcgcgctacatcgccggcggcaccaacctgctcgacctgatgaaggaaaacgttgccaggccccggcgcctcatcgacatcaccggcctcccgctgcgcgacatccgccggacgcccaccggcggcctgctggtcggagccctggtcagcaacgccgaactggcctggaatcccgccgtggaggcggactatcccttgctagcccaggcgatcctcgccggcgcctcgccgcagttgcgcaacatggccagcaccggcggcaacctgttgcagcgtacccgctgccagtatttctacgacaccggcacgccatgcaacaagcgcgagccgggcagtggatgccccgcgcgcagcgggctgaaccgcaaccatgcgatcctcggcgccagcgaacactgcgtggcggtacatccatccgacctgtgcgtggcgctggcggcgctggaggctcaggtactggtgcgcggccgcgctggcgagcggcgggtcgctttcgccgacttccatcgcctgccggcagacacgcccgagcgcgacaactgcctggccgtcgacgaactggtcaccgccatcgagctgccagcaccgcgcttcgcccggcattgccactacctgaaggtgcgcgaccgggcctcctacgccttcgccctggtctcggtggcggcggccctggaaccggacggcgagcgcattggcgaactgcgcctggcgctcggcggcgtggcccacaagccatggcgcgtcgcagagctggaggaacgtttcaggggccacccggcgaaccgggacagctatgtccgcttcgccgaagcgctgctgcgtgacgccaggccgctggcccacaacgccttcaagatcggattggcgcgcaacgccatcgttcgcgcactggaagaagcccactcgggagggatcggccaatga

SEQ ID NO: 324357 - DNA, 1371 bp, Pseudomonas aeruginosa
atgccaaatccagttatggatcatttcaggctgcggccgatttcagagtctgacattgaccaggttgttgaagatgccaggggaaaacgggcacatccggatgctgatcgccgagagcaaattggggctgactatgtgctgggcaactgcgttatagagttaaaggcgctggatgatgagggcttagcaaagccagagagacaagccaaacttgctgcgttgttccgcccttttaacgccgacagaccggttgtcgttctggatcgtggctctttgccgccgcctgagcagagaaattatgatcggattctagaaggtccaatcaaaacggcaatcagcaaagccaaaaaacaactcaagcagtccaggcttgaacatgaaggaacgacgacttcaattatttggtttgtcaacaacggctacaccgcgctcgatcacgatgcattgctcacgctaatagctcaccgagtgcggaatgacaccaatgagattgatgggatcattgtttcgggctgctacttccacagcgattccttcgacagctttttcctgtggccctttgaatacgtccccataaacctggataaggattttccagagttcgatgacttgcaccgtgcctggaacgatcttgccacaaggagcatgactgctctcatgcaaaaatttcccggaaagcaggagataaaggggccggtggtagatacacaattcgacattgataacatcacctacgtgaaaccggcaccgccgattggagggaaatcagatttcttccggcatggccgcccaagattgaatagcacgggaataacgacatctcctccggtgggactggtttttggcgatctgtcgcttgggcaatggacaacatttcgtgaaaacctgccaaatgcacaatggcttcggaaaaactatgaggactggaagctgaaaagagcagatgctgccaagcaagcaacaaacagacaggtatttatctcaattcctgtaacttgggatgcttggctcaagtggaatgaggagtcaggagggaatcggcgattgacaacgcaccattatgcaacccatgtctttcaagagaaaatatccgaacttctaaacgaagcaaaagatatagatggggtaggaatattgcccaacaggtacatgcttatcgttaccgaagaaattgggcaagacaaatgcaacgacatttcccacgccgccattgttatagaaaacccggacggaacccaggattttgaagagatatttttcaatcaaaggctgttccatgaatatgcaatgacactgggctgcgcacacgcgattgcccgaggcattggagtggtcagatggcgtaagaacaagacttacgcatggcgctaa

SEQ ID NO: 324358 - DNA, 1323 bp, Pseudomonas aeruginosa
atggcagttaggttggaatttgaaactacagacagtcaagagattgagttggcgaagcggtattgggccatggacgaggaaggcgcgtacctggaacgcgtagccgatctcctccctttccgagaaattacccaggccagcatggtcgctaaatttgtccggcagatctgcacggcttatgacgaaaatcagacctgtcccaagtgcgatgggcaaatccagataggtggccggaccgaggccaagaaggtaattcaacgctccaatcaaccgtgcgaggaatgtcaaaaaattcaggacgaggagaggcaaaaggaggaagctcagcaacgcgctgagttggaagctaagctcgccccttacatctcccgtgcacgggaagcgaccatttcctactctgcgctacctgacgacactgtactcatcctgcaagcaatccatgcactggtcggccctctgcttacgcaagggaccttttcgctggacgactgtgaagcgatgactcctcagggaacaggcggcctcattgatcgcctctacaagcaaaacatcctgcaagacgaccctgcagcagctaaaccggggacctactggatccaagacgagaagctctggttctccaaagcttcagctcgttactttcttcctccggatgctgacctaggaggaagtcaggcagcgctcaacatgctgtttgagcgagagttctcagattccgtagcgctgaccgaactctggctggaccatgccgtcacagacgtgatgtgctacttcgaatatcaatgcgacgtgcacaaccacatcctctgcgctgcagatgtagacaagatcaaagccaccgtgcgccatgggatgcgcaaatacagcgtcgcgcagatgtggttcatcatgtggaaggtcactcgagatgcagcagcccttgctagccgtagctactacaaccgcgagacagccgccgccactattcctaataagattcgtaagcaactggaaaacgccgatcaaggtaccgagcttcgaaacgaatggacccggccagaaccccacataacgggctcattgggaatgatgttctactcactctttgggctggacgaatacactaaagggacagatgcgcaggcgttgtttgatcgcctaggcgaaaagagtgggggcgaaataaatcttcacgcgttagccgcagccttcatgaaaacagctctggaaaacgaaagcgcgctgtttgctttggaggacttcgcggaaatggtcagagtgggacttacaaccgaggacgcattgaaagaaacaattgatcgaaatccagggctgttccagtaa

SEQ ID NO: 324359 - DNA, 240 bp, Pseudomonas aeruginosa
atgaaccatgacgacatactgaataaccgggcggagctactccaagagcaaaacggggatgacagcgggagcctgtgccatgacgaactcatctttgcgctgcaggataaacatcacgtcctctcccttggcttgagcaccgttcttcagtgcttgagaatggccgagcatgaaggggcggtccccgaacttcccgagggctggtggagccggatggctaatcgatacaggctaaattga

SEQ ID NO: 324360 - DNA, 915 bp, Pseudomonas aeruginosa
atggatgtctacaagttgaagccagaggaaaccgatgagcgaccaatcgagcgcgaacgtttcgaagaagaaacgcgacgccaggagccttggttctccacctctgaaaatggcacggagggacatttcgctgtctgtcccgcctgcgacaatccagtacaaatcataggcctttatcatttgcccgccaatgtggctcgtccctatgggcgtcattacgctcgttcggttcgagaccttgccgaagcggatgaggaggcgcgagagaactgcccttatttcaaaccaagggtacaccaaaagacagagcggaaagcctcggtaaacggcacgcctctgaaaatactaaaaatactgatcgagcagttcgacagggttatctacctgctgcggaaagaactgggcgtgaatatctctcaaaacttggctatccggatgctggaacaatacagaagggagagaggatatctttatactggggcaaccctgaccaatattccctggatatttgcctatatggctgattctcagagtctttttggacagcttttactcgatgatgaccttgtcaaggcagtctccgctgaagtgccggcagcctcagttgataagtatggccgagtctcctcgaaggtggatgagtcagggagaaaggagtatttcgatctcaatatgtgctttgtgaagcaccggtttcgtaaggacagccttgagggtgagctgaccgaggggatggaaatgctggtttccacagagcggaaaggaaaggctatcgatatatatacgaagtcgattgtatttaaccgccagtatttccaacgtttgattgctttgcccgaggatcatccacatagagacagcggtttggtcgaggcggcgcgtcgggtgctgggtgacttgctgcccgccggatga

SEQ ID NO: 324361 - DNA, 354 bp, Pseudomonas aeruginosa
atggccaagtaccgcatctctcatgatgcccaagcggacatcgtcgatatcctgcgcttcacccacaaccgcttcggcgatgccgcgcgccgacgttaccaggcactcataggggcggcgctggaagcagttgcgacagacccacaacaggtaggcagcatcagccgtgaagaactgggagcgggcctgcgcagtatccacctcgtttactgccgctcgatgcccaacgtcggtaaggttgttcggcccaggcacttcgtcttctaccgggtggcgacagaccaggtgctcgaggtggttcgcgtgcttcacgactccatggatctggatcaacacctgcctcgcaaccgatga

SEQ ID NO: 324362 - DNA, 273 bp, Pseudomonas aeruginosa
atggcaacgcgaaacgtcgtccttcccgatccgctggagcaggatatcaacgagctggtggagaccggccgctatcagaatcgcagcgaagtcatccgggcaggattgcgcctgctgctgcaacaggaagcccagaatagcgccaagctcgaagccctccgcaacgcaacatccagtgggctgatgcaactggagcgcggcgagtacgacgagatcaccagagacgacctggcccactacctcgacgagctcggcaaccaggcgagccactga

SEQ ID NO: 324363 - DNA, 1515 bp, Pseudomonas aeruginosa
atgaccttcatgaccaatgactacctggagtattacctcaccctcctcggctggatcatcaacaacgggatctggaacatgatctcggacacgggcctgtttgcggtgccgttcgcggccatcgtattgcgcgaatggctgaaagttcgcggggaaggcgccgacgagggcaacaagggcgtgctgtctctggcccgcatcgagacgcatatctacgtcggctacatcgtggtcgccctggcgggaatcccggtcgtcaacgtgagcttcgacaccatcgagttcgaccaggcccgcgcccagcagtgccagtacagcctgccagcgccggcagacaccggctggtcgaactccttcagcagcctggccggcaagagtgcgcagatgccgctctggtgggcgatgatgcacgccctgtccaagggcttcaccgccggcgcggtcgcggccattccgtgcggcacggatctgcggcagatgcgaatggaagtggacaatacgcgcgtgaacaacccgctgctggcacaagaaatcgctgatttctccagggactgctacgggccttcccgtgcgcggctgttcatgcgacaacccgatctgggctccgtcgccgaggacaacaaggcgctgcaggacctgaactggatcggctcccgattcctgctgaacaccccggggtactacgacaccgactactcgaagagtccccgtcagtcgtggccctacaacgccacccgcgacgccgggctgccccaggtgggcggtggtggtggctaccccacctgcaagcagtggtgggctgactcagggatcggtttgcgtgatcggatcaaggaccaggtggatccggacctgatgaccagcttcctcaagtgggcaaaatggctgaaccaggaggaggtaaccgaggcagtcattcgccaggtgatctccccctccagccaggtcaaaggcaacgtctataccgactatggtgggcaggtgggcggtacggtctggaacggcatcgcgagaaccgcaggaaccttcggcgttgccctgggcagcctggcctatttcccggcgatggatatggtccgccaagcactgccgatggtgatgtcgttcctcaagatggccatggtcatctgcattccgatggtcctggtcatcggcacctatcaactgaaagttgccatgacgatgacggtcgtcttctttgcgatgatgttcgtcgatttctggtttcagttagccagatatatcgatagcacgatacttgatgccttctatggttcgggatcaccgcatctttcatttgacccagtcatgggactgaacacggcgactcaagatgcaatcttgaacttcgtgatgggggcaatgtttattattctgccacttctctgggtcacagcaataggctggtctggtgtgcaggcaggacaagtcctccaaggcctttcccaaggcaccaaggacgtccagacagcaggtggagaagcggcaaataatgccaagcggcatatattctaa

SEQ ID NO: 324364 - DNA, 348 bp, Pseudomonas aeruginosa
atggcagatacgctcaccacccgaaagctcctcggccagctactggtcggagtgctgatcgtcgtcggcctggcagtggtcggtacgctgctcagcctctttgccctgaaccacttcggtggcatccagggcctggaggcctggcggcaaagcaactactggagcttgttctcctggagggcgctgctgtactgcgccctggccatcgcctggttccggctcaagcagcgcaaggagctgagcgcgcatgagcggcagcgcattcggcggatcgagatcctggtgctgttgctgatcctgctcatcgaattcagcaaagcctacttccgcacgggaggcgcagcatga

SEQ ID NO: 324365 - DNA, 1383 bp, Pseudomonas aeruginosa
atgcgaatgaacatcacctcggtcgcgctgacgtggctgctcgcagctcaacttgcccaggccgacgacccaatcaacgtgtccaagaccggcacggtgctcagcgacgaggtcctatacagcattggcggcggcagtgcggtgagcatgggcagcgccggccagatggactcgatcggcgtcggtttcggctggaacaacgacctgatgtgcggaaacatgaacctgagcaccaccctggagaaccagctcaacggtgccacacagggcttccagaacatcatgggctcagtcatccagaacgcgaccggcgcggtcatgtcgctaccggcgttgatcatccagcgcgcgaaccctcagctctacaacctgatcaccaatggcatcctgcaggcgcggatcgactacgaccgctcgaaagggacttgcagagcgatcgccgagaagatggctgacatcgctggggagcagaccggctgggggaaaatcgccgaaggccaggccctgggcgccacgctggcctctggcgggaaagacgccgtatccgccctcgaagtagtggagaagaagggcggcaacgatggcgtaacctgggtcggtggagacaaggccggcggctccggccagaagcccattcgcatcgtcaacgacgtgacccgggcgggctacaacctgttgaccagccgctcggtgaaagactcatcgagcgtgccttccgccagttgtaacaacggcctggtctgcaacacctggtcctccccccaagaagccgctgcattcgccacccgggtactgggggagcaacagcagcagacctgtgaaggctgccagaagacggtgacggctgcaggcgtcggcctgaccccgctgatccaagagacctacgacaagaagctccagtcgctgcaggagctgctatcgaaaagtaagccactgaccgccgagaacctggctgcggccggcaccgatgcgctgccaatcacccgcggcgtcatcgaggcgctgcgcgacgagcgtgaccaggacgtcctggcgcgccgcctggcgtccgatgtctccctgatggacgtgctcagcaaggccctgttgttacagcgcctgatgttcgccggcgccaaggagcccaacgtcgccgccaacggcctggccacccaagccgtcgatcagcagaccagcctcctgcagcaggagatctcgaacctcaagaccgaactggaactccgtcgcgagttggccagcaattcgcccatgcgggtcatcgagcgcgggcaacagcgcgcctcagggtccagtggcgtgttcgagtcggcgcccgatgctgatcgcctcgatcgcctgcaggccccctctgccgccggcggcaagtcgggagggagaccgtga

SEQ ID NO: 324366 - DNA, 939 bp, Pseudomonas aeruginosa
atgaccagcctcaacctccgccgcctggcagcggcggccgccaccttcagcctctcgttcacggccgcggccgcgatcaacagcgccgccatcgtctcctccaccctttcccctcagtgcctcgaatacaaggtcgtcgggatctgctactggctgctctgcggcccgcatggctgcaaggtgaagacgtcggtcaaggtccgccactacgtgcctgacgcagtcgtctccagctatgcgaataccgggagcaacccctggacggaagtgtcggcgctgggcacaccgaatcccctcgcccaggccggcaatgacgcgaccaccaaccacaaggccgagaacagcatcggccgcttcaaggaagcggatgtgatcggccatcctggcggggccacgttcagccggttcgccagcgcctctgggtacgtttgccctggcgccaccttcccgctggtgccgtacttcctcagcacactggacgccattggctggcggcatggcattcccgagcaggtgtaccccgaagcgttggtcccagggctgcgcgaggtgggtggaatcttctccggcgacatgtgggggaacctctatccgcgcagcggattcctgcaccagaccgacgactacaagacggcggccgtcatcgcccagcgcgccggcgacatcaccacgcgaatcggccagctccacgtctacctccccatgcgcgcagcacccaaggacggctactggccggcgggcgagctgaaagagggcgatgcctcgaccgggaaatggcaggagctgaccccgtccctgagcctcaactgcgcggtgtttcccaactcagggccgaagacgcaggccgtcgacggcgattacgcctgggcgctctggcgtccctactcctgctgccagcgcaaggggcagatcttcctcggcagtaccgacttccaataa

SEQ ID NO: 324367 - DNA, 624 bp, Pseudomonas aeruginosa
atgaaaaaattactttttatgtcgactgtgcttttggtggctagcaatttcgcatgtgctgatgagggctcaaatgatggaagtgagatatgtcgggcgcagggtggggttgaaataacaagtctaggggaagtctcaaagggtgtgaatgttgaagatgttgtagtttgttcgattcttccaactaatatgaagtcgagtcaaagggcgcctacactccctcctctgcaaaggatgatcatttcggcaatgccttcaccaggaacggtcactgtttctgccagcggagataggaagtttacaacatcttgccgggcaaatctttatgctccacgttatgccaatttatatccagacggtgttagcaggggaacatcagatctacgatgtgttggttacaatacacccgggaattcatctcaagggtgtaatgtgtcatgggtcggcccgaccgacattcaattgggtgttgagccatatggcggatctgttgttgtaaactacagttgcactgcctttaaaacaacgattccagtgataatgagctacagttatcgtgatggacgggcagtgtatggtgaggtccagaatgtgtcaggaataataaatgtggttttgaactaa

SEQ ID NO: 324368 - DNA, 219 bp, Pseudomonas aeruginosa
atggagcgcttgctcgagagcatctatatcaatgcccggccggcgatggagttcaagctcagcctcaccagctccggccgcaagaagattgtaaagatcgtggacggggatgaggttgagatgctgccaggtgacgtgcagagcattctggagtcccaaaaaatggatgttggcatcctctccgatttcttcgtccagacgctcctagagcgacgctag

SEQ ID NO: 324369 - DNA, 660 bp, Pseudomonas aeruginosa
gtgagactgttgaagggcggctgggcagcgaaacgatttcaaggtcccgccctgccctgggcggggctgctgctggtcttgctggctgtctccgccctaggggtcgagcttctggtgaagggtctaccagccaaccacagcctctacggcgatgcgaaggcgcgctggacgatcaatgaatacgccgacctggagtgccccttctgcaaggtctacacaccgcggctgaagcgctgggtagacagccatccggacgtgaacctggtttggcggcatcttcccctgcagatgcatggcgaggcggcccgccatcaggctcgcctggtggagtgcgcggggatccaaggcggcgccaaagccttctggagcgctatcgatgcgatcttcgctcagtcggccggcaacgggggcgggctgcctggcggcacattgcactttcctgaactggaccaggctcgactggaaaaatgtgcgaaagacatggacctggtggaccggttgattaagacggacatcgacactgcacggtcgaacggcattacagcgaccccgaccctggtcatccgggacaaccagacgggaagaagcgtgaagctggagggcatggccgacgagaccacgttgctgtcggcgatcgactggttggccagggaccactag

SEQ ID NO: 324370 - DNA, 285 bp, Pseudomonas aeruginosa
atgagagctctgaattcgctgacccagaacctgatcgacaacctgacccagatcctgcagaaccccgaagaagatgccctgcagacgctcaggatatgcgctcctgtactgatcgaggagctgcagcagattcaactgagggcggtcgatcgccgggacatagtcccgcagataaagcagctcctggatgaatggctgcaacagcatccacagcctgatacggcccaacaggcgctcatcgaggccgtggaccgtgcggaagtcctacagcggaggcaagcgtga

SEQ ID NO: 324371 - DNA, 2943 bp, Pseudomonas aeruginosa
atgggcctttttcaaacccttctgcgcggtcgcacacagcctcagtcggtaccggcagacgctcccgaagattcaggagcgctggacgtagcggccgtggaagaagcgactgagcgctatctggcgcgactggccgccatgggtatccctttacccaacaccgggagcaagaatggcgccacgcaggctgaagcgtcacgcctctacgatcacgacccatcgttcgtcgacctgctgccctgggccgagtacctgcccgacgaacaggtgatgctcctggaagatggacgttcgcgtgccgtcttcttcgagctggtgcccttgggcaccgagggtcgcgatcccaattggatgcagaacgcccgggacgcattgaaagaagccctgcagaactccttcgacgagcacgaaacctcgccctggatcgtccagttctacgcccaggacgagatcagctgggacaatttccaggagcagttgaggcagtacgtccatcctcgagcgcgaggatcagccttcagcgagatgtacctggcgctcatgaagcatcacctggagggcatttcgaagccgggcggactgttcgtcgacaccgccgtcagcaagctgccctggcgaggacaacagcggcgcgtgcggatggtcgtctaccgccggatccgcaaggcggatgcgcagattcgcggacaggacccggcggcgtacctgaagtccatctgcgagcgtatccaaggcggcctggcgaacgccggcatcgtcgcttcgcgcatgggcggacaggagatcaggaactggttgatccgctggttcaacccgcacccggatcacctcggcaagaccgatgcggatctacgtcgcttctacgaactggtatgccggccggacgaaccgatcctgcaggatgacttgccgctggccgacggcaccgacttctcccagaacctgttctatcggcagcctgtttccgatgccacccagggcgtatggctgttcgatgccatgccacaccgagtgatcgtggtcgaccagttgaacaaggcgccgctgacagggcatttcaccggcgagacgctcaagggtgatggcctgaacgccctgttcgatcgcatgcccgaggatacgctgctgtgtatcaccatggtggtgacgccgcaggacatgctggaagggcatctgcagcagctctcgaaaaaggccgttggtgacaaccaggcctcgatccacacccgcgaggacgtggccaccgttcgccgcctgatcggccgggagcacaagctctatcgcggttcgatcgctctgttcgtgcgcggccgcgaccatacccagttggaggagcgctgcatcaccctgagcaacgtgctgctcggcgccggcctggtgccggtcgaaccgcagaacgaagtgggaccgctgaacagctacctgcgctggctgccctgcaatttcgatccgaacgaaaagcgagccctggagtggtacacccagatgatgttcgcgcagcacatcgccaacctgtcgcccatctgggggcgcaccaccggtaccggacaccccggcttcacgctgttcaaccgtggcggcgcgccgttgaccttcgacccgttcaacaagctggaccggcagatgaatgcccacggcttcatcttcggcccaaccgggtccggcaagtcagcgtccctgaccaacctcatcagccagatgctcgccatgtacctgccacggatgttcgtcgcggaagcgggcaacagcttcggcctgctggccgacttcgccaagcggtttggcctctcggtccaccgtgtccgcctcgccccgggctccggcgtcagcctggcgccgttcgcggacgccatcaagctggtcgagagtcccgaccaggtgaaggtcctggatgccgaagacatcgaggcctcggactcggtccagggcagcaaggccgacctcgaggacgatcaacgagacatcctcggcgagatggagatcgtcgcgcgcctgatgatcaccggcggcgaagagaaggaagacgcgcgcctgacccgtgccgatcgcagcgccatccgccaggcgattctggcggcggccaggacctgcgccgccgcgaaccgcacggtgctcacccaggacgtgcgcgatgcgctctacgaggcctccaggagcgatggctccgcgccagaacggcgcgcgcgcctggccgaaatggcggaagccatgcagatgttctgcatgggcgccgacggcgagatgttcaatcgcaaaggcacgccctggcctgaagccgacctcaccgtggtggatttcgcgacttacgcgcgcgaaggctacgccgcccagctcgggatcgcctacatctcgctgctgaacaccgtaaacaacatcgccgaacgcgaccaattcaagggccggcccatcgtcaagatcaccgatgagggacacatcatcaccaagcacccgctgctgctgccctacgccatgaagatcaccaagatgtggcggaaactgggcgcctggttctggctcgccacccagaacatcgacgacatcccagcctccggggcgccgatgctgaacatgatcgagtggtggttgtgcctgaacatgcccccagacgaggtagagaagatctccaggttccgcgagctgtcgccggcgcagaagtcgatgatgctctcggcccgcaaggaaagcggcaaattcaccgagggcgtgctcctggccaagggcaaggagtacctcttccgtgtggttcccccgagtctctacctggccctggccatgaccgaaaacgaagaaaagaaccagcgctacaacatcatgcaagccaccggctgcgacgagctcgaggcggccttgcaggtcgcagcggatctcgacaaggcgcgcggcctgccgcccttcccaattaatttcccagaccaaccggcagtggagtgccaggacgaatga

SEQ ID NO: 324372 - DNA, 444 bp, Pseudomonas aeruginosa
atgcaacagcagacctggactaacccccttcttcgtctctgcgccggcctggcctgcgcgctaaccctggcagcgtgctccaccagcaaggaggagatgctgccccacggcgaggccaacatgctcgacgtctgggaacaaggtgcaaccagctcgataggcaacagccgtggccggctactcctcgatgccaggcaaacgctgcggcgcccgatcaatccgcagcaggttgcctccgcgaacgaccaggccgactacacccgcacggccagcaacgagatccacagccagttcaaacgactgcccaatcccgacctggtcatgtatgtgttcccgcacctagccggcagcgatcccgccccggtaccgggctataccaccgtgttccccttctaccagcgagtccagtacgccatgccgggcgagcgcacggaggactactga

SEQ ID NO: 324373 - DNA, 1506 bp, Pseudomonas aeruginosa
gtggcgctgaccggtaatcccctcctgaagctgctggtcatcccagtcgtgatcggcgccatcctgatcggcgtgagcatgatgggcaagaaggaaagcgcgcaatcacaaggcgccgcaaccccgacggtaacgtcggaagaagcggcaaccctgggcatcgacggcgacacgcccgccgacacactacgtaccatcgtggcggaaagccggcagctcaaggaccagatcagcaaggtcatcaaggagaatgactcgctcaaagccgccaatgagaacctgcagggccgcctgcgcaacatcgatcagaacatcgagcagaagctcaacaacaccgcccaggagctgcagcaacagcaggagaaccgtagccagacgatcctggaccaggtacagaaacggcttgagaacctaacccacgttcccgaggccggcgataccgacctgcccgtcgggttcggcgtgcgaccagaagatggccagcacttccagggtgcgggctcgtcttcgtcggacatcgtctggatcgagccccaggacgcccgcgcggtcgatgccaatggccagccgctggccgccggctccaccacccaaccgagcggattcagcttcccgacctccttcggcaacgcggtcgatcgcggccagaacgcgctggagcggatcgatgacgggctgcaccccgtcggccaacagcgatccgacctggaaaaccgcaagctcgtccgcaagacctacacgctgccgcagaactcgacgctcatgggctcggtggccatgtctgcgctgatcggtcgtgtgccggtcgacgggacggtcaatgatccttacccgttcaaaatcctcatcggcccggacaacctcaccgccaacggcatcgagctgccggacgtcgccggcgcggtagccagcgggaccgcctcgggcgactggacactctcctgcgtgcgtgggcagatccgcagcctcacgttcgcgttcaacgacgggaccgtgcgcaccttcccggcgccggccgaggaggtgaatgacaaccagagcaacaacaaccagaccgccagcgccgaccagaaaaccatccagggcggcctcggctggatcagcgacccctacggcatcccctgcatcgccggtgatcgccgatccaatgccaaggagtacctgggcaatcagagcctactcacggctgccggggccggcatcgccaagctcctggacgccgacgagaacaacaccagtaccgtcttcagcggcaacggcaccagcttcgggacgaccggaaccaacagcaactcggccctcaacagcatcctctccggcggcgtcagcgacatccggcagtggatgaacaagctgtacggcgaggccttcgccgccgtctacgtgcaacctggcgcacgggtcgccgtgcatctcgatcagcaactggcgatcgactacgaactcaagggccgcaaggtcgactacagctctggagccgctcatgcaacagcagacctggactaa

SEQ ID NO: 324374 - DNA, 885 bp, Pseudomonas aeruginosa
atgatccggaagtcgacaggctcgctcttgctaatgcttgccctacccacactggcccacgcggtggagattctgcgctgggagcgcattccgttggccattccattgacggtcggccaggaacgcattgtctttgtcgacagaaacgtgcgagttggcgttcctcgggatctgcagggcaagctgcgcgtccagagtaccggcggcgcactctacctgctcgccaacgagccgattcctccagcgcgcctgcgcctgcaggacgcgaccaatggcgagcagatgctcatcgatatcgccgccaccgaggcagcggccgatcaacagccgcgcgagccggtcaggatcgtcgccggcgagcccgtggctccgcactatggccagccccgggaagcccagccatcggcagcagcgaaacagaccgagcaggcagaagcaccgaaggccgtgccgcgcgaaacgcccatccccgtggttctgacgcgctatgcggcgcagatgctctatgccccgcttcgcacggtggaaccggtggatggcgtcggtcaggtgcgcgtcaagcgacagctcgacctgaccaccctgctccccagcctacccatcacggctaccgccttgggcgcctggcggctggacgactactacgtcacggcggtgaagctgcagaacgccagcgcccagcacctggccctggatcccagggacctgatgggcaatttcgtcgccgcgaccttccagcacccgtacttgggggcccggggcgacgcttccgacactactactgtgtatctggtgactcgcggccgcggccttgccgacgcgctcctgccctcctccatcagccagatcgatcccaaaggaggccgtcgtggcgctgaccggtaa

SEQ ID NO: 324375 - DNA, 660 bp, Pseudomonas aeruginosa
atgagtttcagaaaacacaccgcgcaacagcaggctcacatcaacaccttccggttcatcaccggcttcttgtgcatggtcatcgtggtgctggcctactgcgtctgggaagcccgcaaggacctctggatccacattccgcccgacttgcgttcagggagcacccggttgtggtgggacattccgccggagagtgtctatgcgttcggcctctacatcttccagcaggtacagcgttggcccaaggacggcgaggtggactacaagagcaacctgttccgctacgccgcctacctgacgccttcctgcaaagtcttcctggagaaggacttcgagtttcgtcgtaacgccggcgagctcagggggcgagagcgcaccacctcggaaatccccggtcggggcattggcgagagcgatggccgcgtgatccaacactcgatcaatgactggaccgtcaacctggacatggacagcacggagtattacgccggcgaaaagatcaagcgcgcgctggcccgctacccgttgcacgtcatccgcgccgacgtcgacccggagaccaatcccttcggcctgcagtgggactgctactccgatacgcctcaacgtatcgagcttgaggagccggccgcccccaccaagcgggagggaggtctatga

SEQ ID NO: 324376 - DNA, 387 bp, Pseudomonas aeruginosa
atgcccgaagaacatctgtttcaggatgggaccctcagcttcctgccgacccgtttgaaccggcaaccggtggtcatcggcggtctgactgcggacgaaatgtggatcacggtcctcaccagcggagcagccgggttcgttcttggcatcccggctgccttggtcgcaggtaacgcggcctgcattccactgggcgcgctgctggtaggcgccctcggcctgggtatcggcagccgcatcctgcggcggatgaagcgggggcggcccgatacctggttctaccgccaggtggagctggccctctcgctgcgctttcccgtcttcggcaaccgtcgcctggtgacgcgctccggcgcctggaccagtcgacgcacggagtccccatga

SEQ ID NO: 324377 - DNA, 357 bp, Pseudomonas aeruginosa
atgctgaaattcaccctccagaaactgtccaccctctgcctgcgcctggctgccatctctttggtactcccaggcgtcgccttggctgcactccccaagcccgaggcgcctagccgcggggaaggatcggggatcatgcaaaccatccagaacttcggctatgacggagcgatgctcctcgcgctactcatctgcgtggctgtctttctgggagtctcctggcatacctacggcacctatcacgccatccatgatgggaaaaagaagtggtcggatctcggagcgggcgtggccgtaggcatcggcctgctgatcttgatcatttatctcgtcaccaaagccaccaccatcatgtaa

SEQ ID NO: 324378 - DNA, 150 bp, Pseudomonas aeruginosa
atgaccttccttctgctgtggtccgcctgggcgatgtacagcacctggcgtggctgggccaccaacaacctcgacagcgccactgccggcgtttccgcgatacggatcgtggtcctcctcagcatcacctctttcttcctcctcagctga

SEQ ID NO: 324379 - DNA, 339 bp, Pseudomonas aeruginosa
gtgaacactccacatccatcccttcgccgaagctgcctggccgccttggcctgcagtgcgctggtcgcacagggagccttcgcagcgagcgcctccgagcaggcgaacctggaggtgatgatccggcagctcaacgccctcgaggacaccgcccgccgcagtgcccagggcgccgatgagcccggacagcgcttctacttcgactactcgcgcctggccgctgacctgcagcgcatccgccaaggcctgcaggactacatgacacccagccgcgcccagccgcgtgacccttccgacctatctggggattacaccctgcgcggagggccgatgccgtga

SEQ ID NO: 324380 - DNA, 228 bp, Pseudomonas aeruginosa
atgttcaaacacaaagaagataccttggaacccgacgaccacgccttgctcaaccctctgcgctgggccgaggtcgtgcgtctgggccaggaaggctgggagctggtgagcgttcagccactcatgcggggcgtaaccgagatcggcaatcagaacgcccagggctgggcctggggcatcgctctgcccgtcagctacctgctgtttttcaagcgcgcaacctcataa

SEQ ID NO: 324381 - DNA, 681 bp, Pseudomonas aeruginosa
atgaaactcaattcagatctttcgcagcgtgttgtcgtcgagccttcaagcttacagtgggtcgattcgccagcgaccgggattcaacgccagttactggagcgtgatggcgacgaagtggcgcgtgccacctcgatcgtgcgatacgcgccgggctccgcttttgaaaatcataagcacgacttgggcgaggagattctggtcctggacggcgaattcagcgacgaatccgggaccttcgggcctgggacttacatcaagaatccaccaggttcttcgcatgcaccgagctccgcgacgggttgcacgttgttcgtcaagctgcgccatcttgatctagccgacagccaacgcaccgtggtcgacacccgtaacggcccctggtttccaggcctcgtgccgggtctgtcggtgatgccactttctgagttcgacacacaacatacggctttggtgcgctgggccccggggacacgattcaattcgcatcgtcactacggcggtgaagaaatctatgtgttggaaggcgtctttgaggatgagttcggaagctaccctaccggcacatggatgcgcagtccgcatttgagtgctcaccgtcccttcagcaatacaggctgcaccatcctggtcaagacaggccacctgccagtcgccgaatcaaatgaggcgcttgcatga

SEQ ID NO: 324382 - DNA, 585 bp, Pseudomonas aeruginosa
atgaagcatttctccgaaatctcgccgaccgccgagcgggtggtcgatgccgctgaagggttggtacagcagcacggctacaacggcttctcatacgacgacgtggcccagttggtaggcatcaaaaaaccaagtatccaccaccactttcccaagaagggtgaactcgtggccgtggtcgcacagcgctacacgcaccggtttcgtgaggagttgctgagcatcgaagggcagcatgcgaaagcgcctgacaggctaactgcgtatgcggcacttttcgaacgcaccttcgccaaggaccggcgcctttgtgtctgcggcatgttgggtgccgagtcggactcgctgccggacgccgttgtgagcgaggtcgagcgattctttaaagtcaatctcgactggttgactcttgtcgttgccgatggtcagcgtgccgcgctgatcacctcgaattccaccccagaggctctcgcagaggcattcttgtgcgcgttggaaggctcgatgatggtgggccgtggcatgcggtcgtcacgcggaccggccgaagttggaaacacttttctttccaccgtgttgacctga

SEQ ID NO: 324383 - DNA, 777 bp, Pseudomonas aeruginosa
atgagtactgaatttaatggcaagaagttgttggtcatcggcggcactagcgggatgggactgcaaactgcccgcatggttcttgagcaaggcggaagcgtcgtcatcgtcggtcaccgtgaagacaaggccgaagaggcccgcaaggcgctgtcgtcgttgggcaccgtgaccgccctgactgccgatctctcgcgagccgaagatgtgaagcgactcctgcataccatcgatgaacaccacaaggacatcaatcttctggtcaacgcggctggggtgttcttcccgaaggcgtttcttgagcacacggaaagtgattacgaacaatatttgacgttgaataaagcgttcttcttcatcacacaaaaagtcgtggccaatctcgtggccagcgagcgtcccggcgccattgtgaacatcggctcgatgtggggcaagcaggcgattgcggctacgccgtcgtccgcgtattcgatggcaaaagcaggtttgcattcgctgacccagcaccttgcgatggagctggcatccaaacaaatcagggtcaatgccgtttctccggcggttgtcgaaacgccgatttacgagggattcatacccaaggccgaggttcatggcgccttacagggattcaacagcttccacccaatcggcagggttgggacgccacaagacgtcgccgaggtcatcctcttcctgttgtcggacaaggcagcatgggtgacgggcgcaatctgggacgttgacggcggcgtgatggccgggcgtaacacataa

SEQ ID NO: 324384 - DNA, 567 bp, Pseudomonas aeruginosa
atgaacacaaacattaaaggaactcccggcaacgggatcaacgtcggcgcattgcgtgagtttgcagatcaggtcgcagcaaagcccgccgcaggcatcgcgacgttcggcgtcgtgacaacctgggagggtggcacccggacgcgtgcgcgaaccatgccgctcgtactaggtgacacggccttggcgcgcggctttgtcatcgacgcggacgaaccggcagaattgctcggtaccgacacggccgctaatccacaagaattgatcctggctgcgttgaacgcatgcatgactgcaacctacgcggcaaatgcggcggcaatgaacatcgagttgcaatcgctgactatccgcacgaagggaagcctcgatctgagaggttttcttggaatcgatcctgggatcaatccagggtacgaccaggtcgagtatgaggtcgaaatggagtcgtcggcggattcggcggcgctgaaagcattgcacgcgcaggtgcagcgaacatcgccgaattaccacaacttcgcgagagccattgatctcaaggccaagctgaccattctccaatga

SEQ ID NO: 324385 - DNA, 1680 bp, Pseudomonas aeruginosa
atgacatcagacactccaccgattgccgcgcaaggcgtggccaccctgcccgacgaggcatgggcgcaagcccggcaccggacggaaatcatcgggccactggcagcgcttgaggtggtcgggcatgaagccgccgatgaggcagcccaagcgctgggcctgtcccggcgacaggtatatgtcctgatccgtcgcgcccggcagggtactggcctggtaacagacctgacgcccggccgatccggcggcggcaaaggcaaggggcgcttgccggaaccggtcgagcgcatcatccgcgagctgctgcaaaagcgcttcctgaccaagcagaaacgcagcctggcggcgttccaccgcgaagtcgcgcaggcgtgcaaaacccagaagctgccggtgccggcgcgcaacaccgtggcccagcggattgccggactacacccggcgaaaatagcccgcagccggggcgggcaggacgctgcccgtcccttgcaaggcgcgggtggcattccgcccgaagtcaccatgccgctggaacaggtgcagatcgaccacaccgtcatcgacctgatcgtggtcgacgagcgcgaccggcaaccgattggccgcccatatttgaccctcgccatcgacgtgttcacgcgctgcgtactcggcatggtggtcacgctggaagcgccgtccgccgtctcggtcggcctatgcctcgcgcatgccgcctgcgacaagcggccctggctggaagggctgaatgtggaaatggactggccgatgagcggcaagcccaggctgctctatctggacaacgcggccgagttcaaaagcgaagcgctgcgccgtggctgcgaacagcatggcatccggctggactatcgcccaccaggccagccgcactacggcggcatcgtggaacggatcatcggcacggcgatgcagatgatccacgacgaattaccggggacgaccttctccaatcccggccagcgcggcgagtacgattccgagaagatggccaccctgacgctgcgcgagctggagcgctggctcgcgttggcggtaggcacctatcacggctccgtgcacaacggcctgctccagccgccggccgcgcgctgggccgaggccgtggagcgcgttggcgtcccggccgtcgttacccgccccaccgcgtttttggtcgatttcctgccggtgatccgccgcaccctgacccgcaccggctttgtcatcgaccacatccactactacgccgacgccctcaagccgtggattgcccggcgcgagcgcttgcccgccttcctgatccggcgcgatccgcgcgacatcagccgcatctgggtactggaaccggaaggtcagcactatctggagatccactaccgcaccttgtcccatccggccgtcaccctctgggaacaacgccaggcgctggccaaattgcgtcagctcgggcgcgagcaggtggacgagtcggcgctgttccgcatgatcgggcagatgcgcgagatcgtgaccaccgcccagaaggccacgcgcaaggcgcggcgcgacgctgatcgccgccagcacctcaagacgtcggagccaccggccaagcccataccgccggatgtggacatggctgacccgcaggcagacaacctgccgccggccaaaccgttcgatcagatcgaggagtggtag

SEQ ID NO: 324386 - DNA, 909 bp, Pseudomonas aeruginosa; identical to SEQ ID NO: 221011

SEQ ID NO: 324387 - DNA, 1218 bp, Pseudomonas aeruginosa; identical to SEQ ID NO: 221010

SEQ ID NO: 324388 - DNA, 615 bp, Pseudomonas aeruginosa; identical to SEQ ID NO: 108024

SEQ ID NO: 324389 - DNA, 237 bp, Pseudomonas aeruginosa; identical to SEQ ID NO: 121649

SEQ ID NO: 324390 - DNA, 366 bp, Pseudomonas aeruginosa; identical to SEQ ID NO: 121650

SEQ ID NO: 324391 - DNA, 1647 bp, Pseudomonas aeruginosa; identical to SEQ ID NO: 180726

SEQ ID NO: 324392 - DNA, 246 bp, Pseudomonas aeruginosa; identical to SEQ ID NO: 108023

SEQ ID NO: 324393 - DNA, 276 bp, Pseudomonas aeruginosa; identical to SEQ ID NO: 121653

SEQ ID NO: 324394 - DNA, 351 bp, Pseudomonas aeruginosa; identical to SEQ ID NO: 121654

SEQ ID NO: 324395 - DNA, 435 bp, Pseudomonas aeruginosa; identical to SEQ ID NO: 237408

SEQ ID NO: 324396 - DNA, 609 bp, Pseudomonas aeruginosa
atgacctttctatgggttggattagggttggtagtcgccgggctgtggtggggaacggttgtctggcggcgggagcaggcagacccttggataaatccaccaactcccgaggcgcggcgtttgcttcgagccgcgagcctgcatttgcattgccacattctcggcaggcctgcggtagaccaggacgcgccgtcgttcgttggggtagatgccctccaggcactttatctacgtgacggggtgatctttttcgagaaggggatcgccaccttgccggatggaacccaagtcgagctgggggcactcactcatgaagtgctcgaagtgcttcgagaaacctacagcgccttggatgccgcttcagcagtgatcactgactatgccaccaccttcaatactcccgaagagttagagaagagcgagaatgaaatcctgcgaaagatcgctggctacgggaacatgtacccgatgcagagcgcgatcgctcgactggcattgttactcaatctcgatcccgacaagaacgatgttgggattggcggcaaagtgttgtgggagcgcatccgccgttggcgttggcccgagcgccatttctcggcggagcagtag

SEQ ID NO: 324397 - DNA, 561 bp, Pseudomonas aeruginosa
gtgcagggacatcgcattggctacgtccgggtcagcagcttcgaccagaacccggaacgccagctggaggagaccgaggtgagcaaggtgttcaccgacaaggcctcgggcaaggacactcagcgcccccagctcgaagcgctgctgagcttcgtccgcgaaggtgacaccgtggtagtgcacagcatggatcgcctggcgcgcaacctcgatgacctgcgccgccttgtgcagaagctgacccagcgcggcgtgcgtatcgaattcctgaaagagggcctagtcttcaccggcgaggactcgccgatggccaacctcatgctgtcggtgatgggtgccttcgccgagttcgagcgcgccctgatccgcgagcggcagcgtgagggtatcgccttggccaagcagcgtggcgcgtaccgaggccgcaagaaagccctgtccgatgagcaggctgctaccctgcggcagcgagcgacggccggcgagcccaaggcgcagcttgcccgcgagttcaacatcagccgggaaaccctctaccagtacctccgcacggacgactga

SEQ ID NO: 324398 - DNA, 2967 bp, Pseudomonas aeruginosa
atgccgcgtcgcttgatcctctcggccacggagcgggacaccctgcttgcgttgccagaaagccaggatgacatgatccgctactacaccttcaacgactccgacctgtcgctgatccgccagcggcgcggcgacgccaaccgcctaggcttcgcggtgcagctcagcctgctgcgctaccccggctatgcgttgggcaccgacagcgagccgcccgagccggtcatcctgtgggtggccaagcaggttcaggccgacccggcgagttgggcgaagtacggcgaacgcgacgtgacccgccgcgagcacgcccatgaactgcgcacctacctgcaactggccccgtttggcctgtccgacttccgcaacctcgtgcgcgagctgaccgagttggcccagcagaccgacaagggcttgctgctggccagccaggctctggagagcctgcggcagaagcggcgcatcctgccggcgctgagcgtaattgatcgggcctgctcggaggccattgcgcgggctaatcggcgggtctaccgcgccctggtcgaaccactcacggactcgcaccgtgccaagctggacgaactgctgaagctcaaggccggcagcagcatcacctggttgacctggctgcgccaggcaccgctgaaacccaactctcggcacatgcttaagcacatcgagcggctgaagacatttcagctggtggacttgcccgaagggctgggccggcacatccaccagaaccgcctgctcaagctggcccgcgaaggggggcagatgacgcccaaagaccttggcaagttcgagccgcagcggcgctacgcgaccctggccgccgtagtgctggagagcaccgcgactgtgattgatgagttggtcgatctgcacgaccgcatcctggtcaagctgttcagcggcgcgaagcacaagcatcagcagcagttccagaagcagggcaaggcgatcaatgacaaggtgcgcctgtactcgaagatcggccaggctctgctggaggcaaaggaaaacggcagcgatccgtacgccgccatcgaggcggtgattccctgggacgaattcaccgagagcgtcagcgaggccgagctgctggcccggccggagggcttcgaccacctacacctggtcggcgagaacttcgccaccctgcgccgttacacgccggccctgctggaggtgctggaactgcgcgctgcaccggccgcgcaaggcgtgctggcggccgtgcagaccctgcgcgagatgaacgccgacaacctgcgcaaggtgccggcggatgcccctaccgccttcatcaagccgcgctggaagccgctggtgatcaccccggaaggccacgaccgacgcttctacgaaatctgcgcgctgtccgagctgaagaacgccctgcgctccggtgacatctgggtcaagggttcacggcagttccgcgacttcgacgactacctgctgccggcagagaagttcgccgcgctcaagcgggaacaggccctgcccctggcgatcaacccgaacagcgaccagtacctggaagagcgcttacagctgctggacgagcagttggccaccgtaacccggctggccaaggacaacgagctgcccgatgccatcctcaccgagtccgggctgaagatcaccccgctggattctgcggtgcccaataccgcgcaggcgctgatcgaccagaccagtcagctgttgccgcgcatcaagatcaccgaactgctgatggatgtggacgactggacgggtttcagccgccacttcacccacctgaaggacggtgccgaggccaaagacaggacattgctgctgtcagcaatcctgggcgatgcgattaacctcgggctgaccaagatggccgagtcgagccccggcctgacctacgccaagctgtcctggctgcaagcctggcacatccgcgacgaaacctattcggcggccctggccgagctggtcaaccaccagtaccgccatgccttcgccgcccactggggcgacggcaccacctcatcctccgatggccagcgcttccgggcgggcggccggggcgaaagcaccgggcacgtcaacccgaagtacggcagcgagccggggcgactgttctacacccatatctccgaccagtacgcaccgttcagcacccgcgtggtgaatgtcggcgtgcgtgactccacctatgtgctcgacggcctgctgtaccacgagtccgacttgcggatcgaggagcactacaccgacacggccggtttcaccgatcacgtcttcgccctgatgcacctgctgggcttccgcttcgcaccgcgcatccgcgacctcggcgaaaccaagctgtatgtgccgaatagcgtccaggactacccgacattgcgcccaatggttggtggcaccctgaacatcaagcacgtccgcgcccattgggacgacatcctgcgcctcgccagctcgatcaagcagggcaccgtcactgcctcgctgatgctgcgaaagctcggcagctatccacgccagaatggccttgccgtggccctgcgcgagctgggccggatcgaacgcaccctgttcatcctcgactggctgcaaagcgtcgaactgcgccgccgcgtgcatgctggactgaacaagggtgaagcgcgcaactccctggccagggcggtgttctttaaccgcctcggcgagatcagggatcggagcttcgagcagcagcgctaccgggccagcggcctgaacctggtgacggccgccattgtgttgtggaacacggtgtacctggagcgcgccactcaggggttggtcgaggtcggcaagccggtgaacggtgagttgctgcaatacctgtcgccgctgggctgggaacacatcaacctgaccggcgattacgtctggcggcagagccgcaggctggaggacgggaagttcaggccgctacggttgcccggaaaaccttag

SEQ ID NO: 324399 - DNA, 1110 bp, Pseudomonas aeruginosa
atgaagcttatccttgatttcgacggacgccttctaaatccaagcaacatgctagaggccctatcaaaagcaggaaagaatacaaccatcagcataagcaacgcgcaagcattaaatatagacactcttctcaaggcaacaaccactgcagaaaacacaaaaaacctctcaacaactttcaacggcgcagagctgactgctaacaaccttcaggaagtcataaacttagcaggatcattaaccagagtatccacaatagccgcacaagccattaatataaacacacttctttccgcaatatctacagcaggcaactcaaagagttttagcgcagaattcaatggagcccaactcagcagcgacaacctacttagagcagtaaatgcggcaggcacaaacactagcataagcgtcaacaccgcacaagcgacaaatataaccgcccttcttcagactattcatgcagcaggtaacacaaaaacattcagcgcagagttcaatggcgctcaacttacttcaaacaacattcaacaagctttagacgccgcaggaacccgaacatccattagcgtcaacaccgctcaggcggttaatataagcaccctgctagccctcatcaactctgccaaagacacgaaaaaatttagcgccgacttcaatggtgcacaactaacagcagacaaccttcagcaagcgatcagcgctgcggccgcgggaaccagtatcagcgtcaacaccgctcaggcggcgaatatatccatccttttacaggtcatcaacatcgcgggcaacactaaaaaattcagcgccaactttaatggtgcccaactcacttcaaacaacatccagcaggcgctgcgagcggcaggatcaaacacatcaatcagtatgaactccgcacaatccgccaaccaaagcactctacttgaacttctagacatagcaagttccagcaagcaattccaagccaattacaacggcggcatgtctaatccgagcaacctacaacagatagtttctcgtgcaggcgctagtgcaaccgtgtttatttccgacgcacaaggcctaccaatcgcaaatatccttacccttatatcatctgccggatga

SEQ ID NO: 324400 - DNA, 1482 bp, Pseudomonas aeruginosa
atgcagtggactcacgaacagtcaccgatcatccagtcgaaggcatcgaagatcctggtgcgggccttcgccggcactggcaagacgaccaccctggtgggctttgccaaggcgaaccctaccctgagaatcctctatctctgctacaacagctcggtggagaaagccgcgaagggcaagtttccccgcaacgtagtctgcaagaccgcccacagcctggctcatgcggtgtacggcatccagtacgcccacaagaagacgaagaacctgcgtctgaccgatatcgcccgcggactcgatacccaagactgggagttggtacgtgacgtgctggccacgctgaacaactacatggccagcgccgacgcggaactcggccgaccgcacttcccgcgcttccgcgacaaggcgttcctcaccagtgcccaggaacgcttcctcaagcagggcctggacatggcgcgagtagtctggaggcgcatggtcgacctccaggacaccggcatgctgatgccccatgacggctacctgaagctgtatcaactgagcaagcccgatttgagccagcgcttcgactgcatgctcctggacgagggacaggacatcaacccagtgatcgcggacattgcccattggcagcgcatcagaatggctatcgtcggcgatccccatcagcagctctaccggttcaggggcgcggaagatgccctgaacagcgactggatggtcggcgccgaggagcactacctgacccagagctggcggttcggccccgcgattgcgcacgtggccaacatcatcctctcctacaagggcgagacacggaaacttcaaggactgggcccgcagacgctggtgaaaaagtccctcccggcggaccttcctcaccgcactttcattcaccgcaccgttatcggcgtcatcgaaaatgccctgcagcgtgtgcgcaataatccggcacccaagttctactgggtaggcggtatcgacagttactcgctgcgcgacctggaggacctgtacgcattcagccgaggcctgcaccaaaacgtccaaaacaagaagctgctccgtgactaccgcgactacacccagtacgtggagatcgccgagatcagccaggacggtgaaatgctgcgctcgatcaagatcatctcgacctaccctgatctaccggcgcggatcctcgagcttcgctcactgacccttgacaatgagctggacgcgacgatcaccctgaccaccgcacataaggccaaagggctggaatgggatttcgtttgcctgtacgacgacttcaacgcggatccgctggcacccgacaccgacccgggcaagcgcgacgatgagctgaacctgatctacgtcgcagtgacccgcgcgatgaagatcctcgccatcaatagcctggtgctatcgatcatgcagcggtacgtggacgacagaaagctgaaggagcagatagctagctgtgaaaaatga

SEQ ID NO: 324401 - DNA, 750 bp, Pseudomonas aeruginosa
atgatggctgaagtcactcaacgtgcagagcagcaacaagagagccagaagaccctggtcggcaccatcatcagtacgcccttccaatttctcggcgtgatgttcggttcgctggtcggcgcaatcatcgtagagtgggtttgcctgtatttcttctggcctgacgcgggctggaagcatgcccaggcaatgttcgagtacgaactcagttggctgtcgcagggtctgctgcacagcgtcatcgtgcaggagccaggtcgaaccgccacctggctggcccagttggcctatgactggttgttcgtgaagaccgggatagtcgactggatgaccaacatgaccaccatcgcgcaggccgggccacggagccctctggacgttcgctatctcaccgcccagggcgtctccacgctgcagaactacggcctggccgcgctgtacacggtgctgacatttgtcgtgcgcctggtgatcctggtcatgacgatcccgttgttcctgatggccgcgttcaccggcctggtggacggcctggtgcgccgggacctgcgcaagttcggcgccggccgggagtccagctacctctaccacaaggcgcgcggcagcatcattccgctagcggtcgtcccttggacgctctacctggcaatccccatcagcatcaaccccttgctcatcctgctgccctgcgccgcgctgctcggcgtagcggtgtgcatcacagcatccaccttcaagaaatacctctag

SEQ ID NO: 324402 - DNA, 2232 bp, Pseudomonas aeruginosa
atggctggccagtacccgctggaagcgctcttgcggcctgccgtggagctctacaccaccaccgtgtgcttcaccgcggccgcgctctgcatcgtcgcgccgtggacgttcgccctcactccgctgttcggcatcgtggccgcgctgggcttcgtctggctgggcgtcgtgcggctgaagcaggccggcgtggtgctccgctaccggcggaacattcgccgactgccgaagtacacgatgaccagcgccgaaatgccggtcagcaacgaacacttgttcatcggcaagggctttcgctggacgcagaagcatacgcagcgcctggcagatacctacctgccccagttcgcctcctacgtcgagccctcgccgctctacgagcgcgcgcgccggctggagaagcagctcgagttcgcccccttccccctgaagctggtcgccaaagccactgcctgggacgtggcctggaaccccgcacggccgctgccgcccgtgggcggtttgcctcggctccatggcatcgagccgcgcgaacaggacgtaggcctgcaactgggcgagcgcgtcggccacacactggtactcggcactacgagggtaggtaagacgcgactcgcggagctgttcatcacccaggatattcgccgcacccactgccggggccgacgccggcgggcgaagatgggtcggcggacccagacggttcaccacggctatcggcgccggcgcgcagaggagcagccggactacgaggtggtgatcgtcttcgacccgaaaggcgatgctgacctgctcaagcgtatgtacgtggagtgcgagcgtgccggccgcctggatgagttctacgtgttccatctcggtcatcctgacctgtcggcacgctacaacgccgtcggccggttcggccggatctccgaggtcgccacccgcgtcgccggccagctctccggcgaaggcaacagcgcggcgttccgtgagttcgcctggcggttcgtcaacatcatcgcccgcgcgctgcacgcgctgggtatccgcccggactaccagcagatcctccgccacgtcgtgaacatcgatgcgttgttcgtcgaatatgcccagaaatacatcagcgagcacgatcccagggcctgggacacgatcatccagatcgagggcaagctcaacgacaagaacatcccgttcaacatgaaaggacggcccctgcgggtcgtggccatcgaccagtacctgacacagaaacgcatcgccgacccggtcatggaaggcctgaagagcgcagtgcgctacgacaagacctacttcgacaagatcgtggcctcgctgctgccgctgctggagaaactcaccactgggcggatctcggagctgctttcgcccaactacgcggacctcaacgatccgcggccgatcttcgactggatgcaggtcatccgcaaacgcgccgtggtctacgtcggcctcgacgcactatcggataccgaggtcgccgccgcggtgggcaactccatgttcagcgacctggtctcggtggcgggtcacatctacaagcatggtgtcgatgacggcctgcccggctcgctcgctggcggcaaggtccgcatcaacctgcatgccgacgagttcaacgagctgattggcgacgagttcatccccatggtcaacaaagcgggcggcgccggcgtgcaggtgacggcctacacccagaccatgagcgacatcgaggccaagatcggctcccgcgcgaaggccggtcagatcatcggcaacttcaacaacctgttcatgctgcgggtgcgcgagaccgccacggccgaactcctgaccaaccagctccccaaggtccagatctacaccagcacgccggcgagcggcgccaacgacgcaatcaacaacaagaaggcagccttcacctccagctcgcacgaccaggtgcagatgaccagcgtgccgatgctcgagccggcccacatcgttggtctgcccaaaggacaggcgttcgcgctgctcgagggcggcaatctctggaagatccgaatgccgctgccggcggtcgatcccgacgaggtgatgccgaaaagcctgcaggagctggctgccggtatgcgcaagggccaggccgccaacagcgagtggtgggaggcgccgggatactccgccctgcaggatggtctgccccaggacctggtcgacgatttccgtcacctcggcgccggtgaggatgccgcatga

SEQ ID NO: 324403 - DNA, 270 bp, Pseudomonas aeruginosa
atgactactcacctgatcaccctggtcatcaagcagccgagcgacgctcaggcacgccaactcatgtaccaggagttgctcggcctgatctcacgctacggcggtgaggtgacgtccacggccctcgaggacgaatcgaccctctgtgagctgctggagcagatgctgcccgatcatgaggtagagcaagccaggaaacaggtgctcgaacttcatgccaagcgccgccgaccgggccgcctgcactcgccggcaagcctgaaggtgtaa

SEQ ID NO: 324404 - DNA, 501 bp, Pseudomonas aeruginosa
atgaagaagatccttgccacgctggcattttgcacggcgttcgcgactcaagcctgggccgccgggctgatcgttgtcgaagacctcggcggagcctcagcgctcccctactaccagggcctggatccgcagccatccgctgccacaccaggacctggcgacctgggtgtccgtggctcaggtgcgtttccagttcgctcggcacgcctttcgccaggccaggttcaggggcgcgccatcaacgccccaggcctgcaacctctgttcctcgtcggcgacgacacgctgtctcgaacctggctgaaagagcgaggcgacgagctccgaggcctccacgctgtgggcctggcagtgaacgtggccagcgaagcgcgcctgacggaaatccgtgcctgggggaaaggacttcagatattgccggcgccggcggacgacctggtcgaccggctcggactgcggcactaccccgccctcatcacatccaccgccatccagcagtag

SEQ ID NO: 324405 - DNA, 582 bp, Pseudomonas aeruginosa
atggcaacgtctgtaatccgcgccctccaactggccgccctgctggtcctggccaacatcgctcaggccgccgtggatcctccgccggcgtacaagcagatcgccctgcccaaaggggttccggccgaggtgctctattcggtcgcgctgaccgagagcaaggtcctgctgcgcggcgaatacgttccctggccctggacattgaacgtcgccgggaaatcctactactacgcgacccgcaccgccgcctgcacagcgctactcgcggcaatcaacctctacggggccaagagcgtcgattccggcctcggccaggtcaatatcggctggaacggacatcgtttctccagcccctgcgactccctggatccgtacaagaacctggacgccacctccgacatcctgatcgagcagcgggacgccctgtatgcatccgccccgggaagaccggtggactggatccaggttgccggccgctaccaccgccccgccggcggcgcgcctgccgccaaataccgtaggacggtatcccgccaccttagccaagtcctcggcgtcaacctactggtgaccaatccatga

SEQ ID NO: 324406 - DNA, 756 bp, Pseudomonas aeruginosa
atgaacagaaccgtatcgctcctgtccggcctggtgctgctgctgagctatcccgcagtcggccaggaggctgcggcaagccgagaggccagcagccagctgtccggtagccaactcgacacgctgaaacagcagacatctcagagcgacctggcccaggagtggggactgaatcaacaggaatggacccgctaccagacgctcatgcaaggcccccggggcgtgtactcacctggcattgacccgctgaccgcgctgggcatcgaggcgcgatcggcagaggaacggcggcggtatgccgatctacaggtccaggccgaacggcgccgggtcgagaaggaactcgcctaccagcgcgcatacgacgaagccttcgcccgcgcctatccaggcgagggggtcatccgcctcaccgaaagcagcacggccaacccgtcgggcgcgccgaacatgagcccagcgttgcagagcagcgggcgcctggccctgttcgtccaggacaactgcaccgcctgcatccagcgggtgcgcgacctgcagcagcagaacaaggagttcgatctctacttcgtcggtagccagaacgacgcagagcgagtgcggcactgggcaatcctcgccggcgtcgacccgaagaaggttcgcagcaagcagatcacgctcaatcatgacgagggccgctggatggccctgggactgggcggggcccttcccgccctggtccaggaggtgaacggccgatggcaacgtctgtaa

SEQ ID NO: 324407 - DNA, 699 bp, Pseudomonas aeruginosa
atgaaacgcccatcccctgcatcaatgattcttggcctctgcttgacggcaatggccggcctgctgggctaccagcaataccaactcattcagctccgatcaggcgtggacagtgccgcggaaaagacctcgctagaggcgatcctggctcgcttgaatcgagtcgacgagcgcctcgacgccgtggatgggcagcacctggtcagcaacgaggacttccgctcaggccagcaggcactgtccaaccgcattgacgccgcgcaggccttcgccaagcaggcctccgacgccgtcgagaacctggctcaaaccaccgcctcggccggcgatctcctggtgctcaaggctacagtggagacgctggacggttctgtccgcacgctgcaagagaagcaagccaaggctccgccgctgatcgtgcctccaccgaagcgcggtgccttccctgtcaagcccaagcccaagccgaaacccaagccaatcgagcctccgcccttctcaatcctcggcgtggagtatcgcgggggcgaacggtttctgtcggttgcacctccgggatccacccagctcagccagatctacctcattcgccagggcgatgccgtcgccggcacgacctggcgactgaccgaccttgacgatcgtaccgcgcacttcgacgtcgccggcgcctcgcgcagcgttcgcatccaaccatag

SEQ ID NO: 324408 - DNA, 273 bp, Pseudomonas aeruginosa
atgaatacagaccttccccagctcgaacaaaccatcatcgatatagcgcgccaggaactggccgccgtggctgctttttatcgcaagagggaggcagggattgagagcgcgcacttcgatgaggcatggagcgaatacctggctcgctaccatgcactgagtacgcttttggtgctcggccagttgcctaatagcggaatgagcgaggagggtgcccgaactctacgggagatcgaagctgagtacgttgcgcttcgagtctcggccaattga

SEQ ID NO: 324409 - DNA, 699 bp, Pseudomonas aeruginosa
atgcctgcagcccttgatctaacaggtcagcgcttcggccgtctctttgttgtacgggagaatggccgggtaaaatttggcaaggagcagcccggctggctcgtagagtgcaattgcgggcgccgtgagactcttgcccaggcgctgttgacgcaacgcgggtggcgagagtgctcatactgccagcggccggagtgcattgtttgcggggaaaaggtaccgtcgacccgcccgcggagcgtcacatgctctgacacctgccataaagccaaacgccgtggccaggacatcgaacgttaccacaggcgtgcagctgaccctcagttcaatcagcagaggtatcagcgcctggttgaacgcatggccgacgatcctgacctagccgagcgcgtcaggcaaatccgccgaggcgcaaatgcccgttggcggatgaaacctgaaaaccgcacggccatcaggcattaccaggcactgcgctatgcgatgaaccgagcagaaattctagcgcggaggcgcgcccgcctcgacctgatgacaccggaacagatggagcattggcgagagcgtatccgggcgtatgatcgagcctaccgcgcccgatggcgcgaccaccttcgctctgaccctgaacgacacagggcgtatctcgacacgatgagggagtacagacgcctggctagcaagaactcaaccgaatag

SEQ ID NO: 324410 - DNA, 324 bp, Pseudomonas aeruginosa
atgagcaatcaacaaaaaaactttggcgatgcccaggtagcgctggtcgccgcttggagaaagcatccggagctgcgggagtctttagatggcgtcgtttctgaggtgctatcgcaaatagtctttcaaacagagatgctcagcaagcaggcggaaggtttggcaagatatgtccgccgtactcactcagacgaagatgaagttgttcgcgtgctttgttacaacatcgacatccaaatcaatagaatcatctcgatatgcggcgaagtcaaccagcatggcatccgtgtatatggtgatgcaatcgatagggatgtagactga

SEQ ID NO: 324411 - DNA, 597 bp, Pseudomonas aeruginosa
atgtccaatgaactgatcaaccccctgcaacagctcatcgccaaggccagcaaaacactgcccgtcaccactggccgggtagccacacaccaagcgagactggaccgtcggcaaggcgaggtcatcatcctggccgacatctccgcatcaatgggatgtactgcctggggccagcgacgcaagatcgacgtattgcgcgaagctgtagacgcagccctggaacgccaaccggcgagattgatcgccttcagcgaccagccacgggaagtccagcacatccctgagccggagagcagtaccaacatgaccgcggccctgcgagcagccttgcaattcaatcccggtgtgactctcgtcatcagtgatggccaacctgacaacgagaaatcggctctcgaagtcgccgcccagtttcgtggcgtgattgatgtgctctacgttggtcccgagattgatcgcgctgccatgggattcatgcgtcgcctggccgcagcggctggcggagatatggtcagcaacgatatatcaagccaggccggcgcccagcgactgttgacctgcattgccggcttactcccggggccaagtcgcgcatga

SEQ ID NO: 324412 - DNA, 375 bp, Pseudomonas aeruginosa
atggcctacgaaaagacttggcaccgtgactacgcagcagaatcgctcaagcgagctgaaaccagccgctggacacaagatgccaacctagagtggactcagctcgccctggagtgtgcccaggtggtgcatctagcccgccaggtaggagaggaactgggtaacgagaaaatcattggcatcgccgataccgtgctctcgacaatcgaagcccactcgcaagcgacctaccgcaggccgtgttacaagagaattacgacggcccagacgcacctcctcgcggtcacacttctggagcggtttggttcagcgcgacgggtagcgaatgccgtatggcagttgactgacgacgaaatcgaccaggcaaaagcatga

SEQ ID NO: 324413 - DNA, 684 bp, Pseudomonas aeruginosa
atgtgcggaagagtagctcagtaccagggcgcgagagagtacgctcaattgatggccgactggccatttctggacctgaccgatggtgaaccactcgaacgctacaacgtagccccttcaacacaggtcgccatccttcgcctggtcggcgaggatctggtagcccagctcgtccgatggggttggcgaccgttctgggcccaggaccgtgccgcaccgatcaatgcccgagccgagaaagtcgcccattcgcgcttctacagcgcagtctggaagcacagggcgatcaccccgatcgacggctggttcgagtgggtggacgagggaggagcaaggaagcagccctacttcattcagcgtgccgatggtgccgccgtcctctgcgcaacgatcggccagttccctgaactggacagacagcaggaagaacgccatggcttcgttatcatcacggctgatgcccagggcggaatggtcgatgtacatgaccggcggcccgtcgttctttctccagagctagcaagggagtgggtcgatggggcaaccccgcccgaacgggcagaacagatggtgttacaggaaggtgaggctccagaagtgttcacctggtatcgcgtcgaccgcgcggtcggcaatgttcgcaaccaaggggcacacctcatagagcctcagcggaccgggtag

SEQ ID NO: 324414 - DNA, 657 bp, Pseudomonas aeruginosa
atgaacgctcagacccaaccggccgccctggccgcctcctccctgaacatcaacctgaccgacttcatcgacgagttcggcgacgagctcctggagtcgctcaatcgctccaaccccccggtctataccggctccgacaacgctcaccgccagttggtggttgcagtcaatcagggcgatggcgcggtcagccatgctcatgacacctcacgctgtagcgcaccacgccccaaaccagcaactcatccccttccaggatgtacctgggcgcgtaccgaggatctcggcgcgcagcaccacctggctcccatccttcgccaagcgtttcacggtaggctcgccgttcaccgctgcaatcacgatgtctcctggctcagcttctcgggatcgatccaccaccatgaggtcgccgtcatgaatgccagcgcgaatcatgctgtcgccgccggcgcgtaccaggtacgtgtgaggcgctcgaatctgcagaatctcatcaagcgagatctcccgctccaggtgatcctgcgccggacttgggaagccggccgacaccttgctggaatacaggcgcaaggaagccccagacccagcgactgggccgaggatagtaacgggcatgggatgaaaacctctgtatactgtctgtttatacagtag

SEQ ID NO: 324415 - DNA, 1446 bp, Pseudomonas aeruginosa
atggccctcatgttcccgcgcttggcgcgcaactttgcacgcaacggctacttccctaccgatgaggtcaccctcgaacgcgctctgcaagccctcgctcccgccccgtcgggcaggatgaggatctgtgatccctgcgccggtgagggggttgccctggctgaggcagcacacatcctcggccgcgacaaggtccaagccctcgctgtcgagtacgaccgcgagcgcgccgaccatgctcgaggcttgcttgagcgagtgctgcacagtgaccttttcgacaccatgatcagcaggcagtcgttcggactgctctggctcaacccgccttatggcgacctggtggcggaccactccggtgcgtcgcagtaccagggcagcggccgcaggcgtctggagaaagcgttctaccagcgctgcctgccgttgctgcagtacggcggcgtcatggtcctgattgttcctcactacgtcttggacgatgagctgaccggttggttgagcaaccacttcaccggcctgcgcatctacgcagccgcggatcctaccttcaaacaggtggtgatcttcggcatccgggtccgtcgacaggacctggcccgggcggacgccaatcaggtgaggtctcgcctgcaggcgatcggcgcgggccaggaaaaggccgaggaaattccagcggcttggccgtgggaaccctatgtggttctgccggccaccagcgagctggagcacttctatcgagtaaccctggagccggagcagttcgccggcgagatccagcggctgcgaggtctctggcctgacttcaacctgcacttcgcgcaagcggggctgcagccccgcccaccagtccgcgagctgtctcgctggcacctggccctggccttggccgccggcgcgatttccggcgtcgtgcgctcgaagtcgggccggatcctggtcgtgaagggtgacacctacaaggacaaggcccgcaagaccgaattcaccgaagacgaagacggcaacatcaccgaggtgaggatcctcacagaccgtttcatcccgatcatccgggcatgggaaatgacaccctcctcggtcaatcagggccgcgtgctgaccatcagctcgtcggctgcgaccacggaagaggctgaagagccccaacctgagccggcccccgaaccgctgctgttcagccctggccaagtcgtaatgaccgctgccgtgagccacctggtggaaaccggtcaactcaacccagcgcctttgctgaaccgccatctggcgggagattgggggacgctggaccaggaagactggaacaccaaccagagagccctgaagttcggcgataggctgctgtcgtcctacgacatcgatgccggcggcgaatccaggctctggatcatcaccgaggcagaccgcagctcaaccacgcttttgctccctagcgactactga

SEQ ID NO: 324416 - DNA, 606 bp, Pseudomonas aeruginosa
atgcccagtcccaccccgctctaccagatcgaagaatgcccagacctgtacgttgacgcctgcgtgtgcgacgagcagcgcaacctggtctttctttcggcctggggccgcgacaccgtgacacaagagttcctggccaggctgacgctggaccgggaagaaaatggcatcgaccatttccacattatcgtggacggccggcgcttacctgtcttcccaaaccaggatctcctggagaaacgcaccacccgccagttccgcggcacgttgttcggcagcctgctcaacctctggctgttcgatcggcgcgcctcggcgcccgaccgaggcaatcacctcgccttcgcactcctgcagcgcgatgaggatccacaccaaaggctctggccgctggtgatggagacctgtccgctccccctcctgcagcactggcgcgagccagtgatggaggtcctcacccagcaccagatgttgaccgccctgccagggacgatcggcaacgtctgcgcctggcgactcgccctgcgggtcgacgtgctcgagcccaccctcggtgagctgatccgcgaaagcattcttaccaccgatgctcaggcacaagcctga

SEQ ID NO: 324417 - DNA, 261 bp, Pseudomonas aeruginosa
atgaacccgctgttcaccaacctcacccaggaaaccctcgcttacctcgaggaccaactgtccaacaacgacgtcgccggcgacgacgagctcatcgacctgttcatcgaggagctgtcgctgaccttggagcaggcggaagcggctgtcgcgctacgcgatcagtacctctgccaggtcttcctggtcggccaagggccgctgcaccgtcctgaagccgatgggctcagcttcgaccctcacaccaagagcgttcggtga

SEQ ID NO: 324418 - DNA, 363 bp, Pseudomonas aeruginosa
atgggatggcttttctcacatcagacgaaggaagacctgctgcgtgagctgctggccccaaccagtactttcgcaggcagcaccaaggtgctggcacacgcagtctccggcaatgaactttggactgtcgtaaaacgaaccttccaccttgccggattctatttcggcaagccggccggtcactcgatcaccatgatcgagctgcacttgctggactgctcggccgggcaatggggctacaagaccattccagaaagtgccggcccgttctactacggctgtccgctggagttcctggacctggctcacgatgaggtcaaccaggagtggcgtgaacgtctgacgcacgaacaccaagcctga

SEQ ID NO: 324419 - DNA, 276 bp, Pseudomonas aeruginosa
atgaaatcgatctacaacaccccaggcttcagcgaggagttgttgctggtttgcgcctcgctgcgcgaggtcggactggacaatctggctgaccagttccgcgatgcagtgttcgaccgatccgtcgtcgaccaggccatcatcgcactgcgtgagcgggtgaagaccccttcgccggagcatgcggccgacaacgagccatggctgtactgcgactggcaggccaggcaaacagcttaccggctcctccagcgccttgagcgcgcaacacgctga

SEQ ID NO: 324420 - DNA, 633 bp, Pseudomonas aeruginosa
atgatcaacatacccggccagttggccattcgaaccatcaacggtcgcaatggcgagttcaacgtgggaaagctctcgacctcgatcggggagttcgtcatcaaggacgctctcctggaccagcacatcgaaggcaagtaccgcggtgatttcgccatcaccgagatccgtccctcctactacaccaccggcggccggctggtcgtcgagatccgcgcaaagctggacagcatgacgctggacgacgtggacaacctcagcgacgaggaggcagagcgtctctctggcaatgaggtggatccgctcgacgaagtgcccgcgatccagcagcccacagtagccccggcggtaccgccgaagtcgccccagaaaccgaagcctctgcgccccgctgcaacaggggaggacgcgcctttcggtatgtcccctccggctcctgcagagcaggccgccactccggacacagacgcagatgcagagctgttcgggacggtctggccgctaggcgaaatcgtcaagctggacaccacggtcgaccgcaagcggctacgtcaacagtgcgtgcggctcggcgcgctgggctatgagctcgacttcaaacaacaagtgtggacccgcaaggaggccgcatga

SEQ ID NO: 324421 - DNA, 351 bp, Pseudomonas aeruginosa
atgacctctctcaacaaccactccagcgcaggccacactgctgcgtacctcaaactcccgatcgttctcaccaacgcggcctggctgcgcctggtctatctcgccaaccctgccagggtcgacgagatgggcacccggctggccagtgtcgttcaaaccgcctggcaggagctttcgctccagccgaccgcgaagcacatccaattccacctgtaccacaaggaggaagaggggcaggaccgcgcgctcgcgctgctggtcctctcgatagtcgagccgtccgatgagccttcctacctgcgcatcgagctgcaggaagaaagcctcccgggcaacccggataccgagtag

SEQ ID NO: 324422 - DNA, 714 bp, Pseudomonas aeruginosa
atgactcaatataatccgtttatccacggctatactgacttcagaatcgagcgaacgctacagataacatacgaagatgattgccccccctgctatcgcgcgttgcatccatcgcagcaaatcctctccgatactcaactacagtgctttccatgcatcttcaatgacgacttcgccctagttactgaaggtcgagagatcgatactgcactttctgaccgctgtccttacaacggtctggtgcgcaatgtgctctacggcatccttgccgagcaggacggtcagcaaaagcacataggcgatctgtattccttggccgaagcccagagtgtcgttcgtcacctttcgttcggtggcggttacaaccgctgctgggagatcagaaaaacacatctacccatcagcgcgtggaatagcctctacgaaaggttctcgaccaagatgccaatccgcttgccctcggtgttggtatcgctcttctggtgtaacgagcacggtgcggtgggctttcgcttgcacaacaccccttggacggatgagtgtctggagatcctggagatgaccgcagccgctcttcgacaagaacagcttgccttcggcctcgacgaacacctggtcgatctacttcacctcgcgggacaagcagacattcggttcctggtactcgatccattcgcgcccacgcttaagggcctgccactttatgacgattga

SEQ ID NO: 324423 - DNA, 198 bp, Pseudomonas aeruginosa
atgcaatacggaaagcgggcactcgcccatcttcgtctcgaactgccgctgcaggttcttatgtccaacgccggcttttatatcggcacccttgatgaagaaggaccagcttcgcgcgagtcggttgaatactacccctcccgcgaacttgcccaacaggcattagacaacggcacgtggtcgcaacgggaatattaa

SEQ ID NO: 324424 - DNA, 159 bp, Pseudomonas aeruginosa
atgagcaatatccaaatcgtagatctgcccgccctgccggaagtagaggaggttagcctcagcgacgtcgaggacgagctgctgctcagcagtcagttctgcaacttcgcctggctgttcctagccagcaacaatgcccaggtatctgccttggcctaa

SEQ ID NO: 324425 - DNA, 489 bp, Pseudomonas aeruginosa
atgagcaacaacacccaagcccaagaagccaaatatttcgacctgcacaccaccggtatcggctacctcaatcgcatccgcgaagtaccgatccgccgaggtgaaccgttcctcgccgctactgttgctgccctccatggcgcggcagacagcgtggaatactcctacatcgattgcaaagtggtcggcgcccaagctgaaaagcttgtccgccgttgcaaggaagcagtcgaggccgagaagaaggtgctgatttctttccgtatcggcgacatctgggcggatcccttcacctacgagaaaggcgagaaaaaaggccagtccggcgcaagcctcaaaggccggctgctcttcatctcctggatcaaagtggatggcaccaccgtctacgatgcgaaggaagaagctgagaaagcccagcaaggccaaggcgaaccgcaaggtgaacccgcagcccccgctgagcacgctgaacaagccgctgcttga

SEQ ID NO: 324426 - DNA, 135 bp, Pseudomonas aeruginosa
atgagccaaacgactttcggcgtgatcatgctgaccgccttgcttgtagtgtgcttgtcgatggcggcctgggccgattggcccaacctcaagcgcaagcttacgaagtttaaccatcggcaccgcccgcactga

SEQ ID NO: 324427 - DNA, 567 bp, Pseudomonas aeruginosa
atgtccaagcaatccaccagcttcgaaatcggctttgccctcggcagtgttgtgcgtgagttccgcagagcgctcaggcgccctccggtcgtagtgcaagcacaagcgccggttgcgttgagcgtccagcgcatcgatcctgccttcctggccggcccgaccgctggcgagctagaacacatcagcgacatcccagccatcgtccggctgaagaatgtcaacctgaatgactggtatctagccaatacgcgcgaggtgcaaaagcccaagcgcgcacgcaaacccaagccggccaaggcgaccgccaaagctgaaacgccagtcaggaaggagctcaagatgggttccctcgaccatttgattgcacccaactccgaaagcgaaatggggaggccccctctccagttagagtccctgaacgatcatgagattgctcttttgccagcacctcctggtagcgcagtctcttgggaactccatcggcgtactcaggagcaataccaccaacgctggcaggactacttgtccaccatgacggatgaacaagtagctgctctcggccgctaa

SEQ ID NO: 324428 - DNA, 438 bp, Pseudomonas aeruginosa
atgccgctgctctggattgccctattgctcaccctgctcaccggaacctggctgagtgtacaaagcgaccacgcgacctcgagcgccgaactggccgaggtcgataccctggccaggagcttgctgctctaccgctccaggctggcggagtacgcacacgccaaccccggtttcagcggttcgccggcggactccgctcttggtttaccggcctggttccgcaagccagcgcggcttcagggctacatcgccgccgacaccagctacgccttcatcgcctcgccgccggcagggctggcggcagccgtggatgccggtacggaatccgacctagttggtgtcaggcgcaacggccagttagtcacgcgccgcctcggagccactgccattgcgctccctgcgcccatccccgagggcgcggtggtcgcggtcaaataa

SEQ ID NO: 324429 - DNA, 1380 bp, Pseudomonas aeruginosa
atgaataacctcaagctcagccgcggctttatctcaattgaattaatgatcgccttgatcgttatcgccatcgcgactaccggcgggatttcagtcttgatgagctatctagacggcctgaatgaacagcacgcggcccagcagcaacagcaggtggccaaggcagcggagaagtacctgaaggacaacttcagcacggttctggccagcgccggcgccacggccccggcggtgatcaccgtcccgatgttgcgcaacacccgttacctgcccgcaggcttccgcgacaccaacatctacggccagcaataccaggtactggcccgcaagccggcggccaaccagctcgaaacgctgatcgtgaccacgggtggacaggtagcttccgaactctcgatccgccggatcgcgcagctcatgggagccaccgggggctacatctcgaaaaccaacaccagtgtcgcccagggcgccgcctggcaggtggccttgagcaatttcggtagcgctcccggcgctggacacctggcgacggcgctgttcttccaggacggcgccattgccaacgagtacctctaccgcaatgccgtcccgggtcatcccgagctcaaccggatgaacacggcattgaatatgggcggcaacaatatcgccgcagccggagcggtcaccgccagcggaaacatcacgaccagcgcggacatcagcgcgcgcaacgtgacagccactggcacggtgaaagccggcactgctgacgtcgccggcgagacgtacaccggaggctggttcaggacccgcggtaactcaggttggtacaacgaacggtgggacggtggctggtatatgagtgacagcacatgggtcaggtcgtggatgaacaagaacgtttataccggcggagaattgagagggggaaagctcagctccgaaggtagaacgaccgtcggcgagtaccttcagatcaatggtttggcggcagaaaatgcaggatgcgcccccaatggcctggtaggcagagacaacagcggccccctattctgcaccgatgggctgtggaaacggcccagtggcgtgaatatcgccacccctgtggtgctggcacagtatcccgccgataaccgaccccgcacccactgccaagcggtatccagggacgcgctgatcaatggctccggccccggcgttctgcgcctggaagtcgatggcgtgatcgttggtcaagcgcgctccaccgctgggcgaaacgctgacgtagttgaagacgcctcgatctccgccatggtgaaagccggacaccggttctgcctttacagcaccgttgtgctcgcaggattcggcaactccgccggcatgcgtgtgacggccacctacctcaactag

SEQ ID NO: 324430 - DNA, 957 bp, Pseudomonas aeruginosa
gtgagtgtgaacccgatcatccaggctcagttcgtcgacctttacctcggtgaaggcttcgccgacgtgaagggcctcgccggcgccgacgcgcgccgggtcgaggtgcccggcgagtgggttccccacgctcaggagctccttcagctctgcaggaagacgatggaggagctgcaggatcccgagttcgccatcgtcgtcgacggtgtgctactacgcgtcacccaactggaagatgctttcaacggcgggagtgtcttcgtgctgcgccggtcgacagcccaagttcgaagcttcgaggatatcggctatccgagcgaggtggtcgctacgctcctgaacccgcaactgcagggcttgatcctgttctgtggcgatatggcgaccggcaagaccagctccgccgcctcgctgattctcgctcgactgcagaccctgggtggggttggcttcacagtcgaggatccacaagaaaccaacctcagcgggcaacatggactcggccgctgtatccaggttaggacctcgcgacgcttgggaggctacagcgaagccctgttgcgcacgctgcgtaccggagccgacctgatattgatcggcgagatccgcgacgaagacaccgcctaccaggcctgcaaagcttcgctgaacggcaacctagtcatatcgaccatccacgccaagaactgcccgcaagccatcgaacggcttatcaccctggccaaacccctcgcgtccaatgcctacgacgtcgtggctgaaggcattcaggccgtgatctgccaggaactggtaagcgatggcgcagctcgacgactgcatgcggaaccgttgctattcaccggggtggactccgtcgccatgcgcgataagatccgccggcagcagattcatctacttgaggacgatgtgaatcgccaggctcgcaaaagcctgtgggagcctatctatgaataa

SEQ ID NO: 324431 - DNA, 531 bp, Pseudomonas aeruginosa
atgagcactacgcaacgcacttcccgtccgacgcagggcggtttcgtttccatcgagatgatcatcgtgctgatcatcatcgccatcggagtcggcctggggctggccgcagcggcagggatgttcagttcgtccaacgccaacgaggaacagcgcaacatcagcgtcattgcggccaacgcacgcgccctgaagacctcttcgggctacggctccagcggtaccaacctgatcccgagcctgatcgcaatcaacggcgtgccgaagaacatgagtgtctcctccggcgtcgtctacaacgtctacggcggatcggtcactgtctcgtccaccggcatgggcttctcgatcaccaccagcaagttgccccaggacgcctgtatcacgctggccaccaagatcgcgaagaacacattcgagcagaccaagatcaacagcggatccgcgatcactggtgaagtgaccaccgcagcggcgacccaggcctgcagcagcgacagcaacagcattacctggacctacagttcgtga

SEQ ID NO: 324432 - DNA, 1080 bp, Pseudomonas aeruginosa
atggggggcttctgggagcagttgcagttcgccttctacagcaagcagttcggccgcaaggaacgcctgcagttctacgaaagcatgtccaccctgctcgaaaacggggtcccgctgaaggacgctgtggcagaggtacacaagatcttcgctcatgagggacagcatccgtttcatccggtggccatcgccagtcgcgaagcgctgatggggctgtccaacggcaagcgtctggccaccgccatggcgctctatctacccgcccaggagcgagcgctgatcgaggccggcgagatgagcggcaacctggttcaggccatgggcgatgccatctccctggtcgaggcccaggccaggatccgcgccaccatctggcaggcgctgctctatccctcggcgctgtccgccatgatggtgttcctgctgtgcatcgtggcctatcgcatggtccccagcctggccaggctctccgacccagtcacgtggaccggcccgctcgccacgctcaacgccattgccagcttcgtcacaggacctggtatctacgttctggtcgccgtaatcaccctcacggtggtggtcatcgtcacattgccgacctaccgctggaaaggccgggtctggctggaccggatgctgccgccctggtccatctaccgcatgctccagggcaccaccttcctgctgaacatggcggtcatgctcaacgccggcatacgcccttacgacagcctggccagcatgatcaagatctccccgccctggctgaagcagcgcttggaagctgcccgctacggcgtgggcctgggccagaacctgggagtcgcccttcgcagcgccggtcacgatttccccgaccgacaggccatccagtacctgtgcatcctcgccaaccggggaggcttctccgaagcgctggtcaagttcagccgccgctggcaggagaccagcctcaagcagatcgagctggccgccgggctggtgaagaacttcgccctgatcttcatcggcgcgctgatgatcctggtcctgctcggcgcctaccaggcacagcagctcatccaatccatgaaccactga

SEQ ID NO: 324433 - DNA, 1581 bp, Pseudomonas aeruginosa
atgacgaaccttcaaattgccgcgcttgtacagccctccatggtgacccaactgctcaccgccgacggtggcgagtgggaggtctcgaagcacctgcaagagatcatggccctggccgccgacggcacgctctatctatcggagagccaccagaacgacattcacgttctgtcgttcatcgaccgtctcgatcgccgtggcttccgataccagctcaacctcaccgacctgcagaccattcaccagctctaccgcgccgtcgccatggacggcctggtcgatagcgatggccagcgcgccacccagatgcaggagcgcgtggtcaagatcattcgtaaggccacagagctgcgcgccagtgacgtgcatttcgtcgtgagtcccgccggcaccggcagcaagatccgtttccgcgtcgacggcctgctgaagaccgtcgagcagtaccgcagccaggaactgcacgaactttgcgcaaccatctaccagtccatgtgcgacgtggccgagccgcttttcaagccgcaattggaccaggacgcgcggatgagccaggccttcgtcgagaagctgaacctgttcggcgcccggatcgcgacccgcccgcgcgccggtgggttcctgatgatcctgcggctgctctacgacgataccggcctcgacagcctggagcagctcggctacctgcccgagcagaacgcgctgttcgatcgcatgatgcgcatgccttacggcatcaacatcctgtccggccccaccgggtcagggaagtcgatgaccttgaaggtcaccatggaaggactcgataagctgcatggcggatccaagcatatcctgaccatcgaggatccaccggaataccgcattcgcggcgaaggcatcaaccagaccccactggtctatgacgccactgacccagacgcagaacgccaggcctgggccgcaggcatcgccaacggcatgcgcctggatccggactacatgatgatcggcgaagtgcgcgacctcttcgccgctgtcgccgccttccgtggcgcgatgaccgggcacggcctgtggtcgaccctgcacaccaatagcgcgatcggcattgtccagcgcctgaaggacctgggcgtcgaccccggcttgctgttcgatccggccctgctgaccggcctgatcaaccagagcctgctgcctaagctctgcccccactgcaaagtgcgcttccaagaccaccaagaccagctcgcgctcgacctggtcgaacgggtccagcgcttgaccgatgtttcccaggtgtacgtcaaggggcctggctgccaggcctgccgtggctccggggtcaacggccgctcgatcgtcgccgaggtggtgctgcccaccctcgccttcatgcgtgtgttcgccaaaggcggcccagccgaggcacgcaactactgggtcaagaccatgcagggcatcaccaagcacgcccacgccatccgccgcatcaacgagggtatgttcgacccgcagatggtcgaggatttcattgggccactcgacttcgatgagcatctgctcgacgacagcttctactcgcaggaggcgtgctga

SEQ ID NO: 324434 - DNA, 534 bp, Pseudomonas aeruginosa
atgcgaactgagccgatcggcatggccgtggccgtgctcttcctcctcgcgtccggccaggcctgcgccggcaccgttggcgaactggcggagatccaggcccaggccatcctcaccgaggccaaggtgcgtctggccacggcgcagcggcaactggagggcaaaggcgaaaccggccaggtcgtcagcgcccaggggcagacgttcgccatgccggtgccggcggcggcgccgacgatcacgcagccggttccgccagtggtgcggaccatctacggcgccggcggcaagatgactgccacattcttgttcccgggcgggtacgaggtggacgccgccagcggcgcggagctgccgggcaactaccgcgtcgagtcgatttccctggaccaggtcgtactcaccgacaaggacggcaaccgcgtgcccgtgggcttctccagcgttgccccgacccaagccgcctcctcggcccaaggcgcctccgttccgccggcgctgcccggggcggtaccgcagccgttcatccagtag

SEQ ID NO: 324435 - DNA, 1326 bp, Pseudomonas aeruginosa
atggagaagcctgacatcggtagccgtggaccagacgtctcgatcctgagctaccacggcaacaagttcgtcagcggcctgttctggcggccgctatccagccagcggcagtacatgaaggaagcgcgcaagctgggcaaggaagagcatctggacatcgttgccatccgccattcgccgacagtgatccaggccggcttcgtttcgaagtcgcaaggcgcagtcaagggcatgtactccctggcctcggcgctttcaggccagttcgaaggcgacttcctggcctgctggaaggtcgacgaggaccgctacgcactggtcgccacgctcgatggtgcgatcgtccccggccaggacctggtcactaccttcgacgaagccagggaccggatcaggaagctctctacgcgcggcgtgcttcgaaacgcacaggtcttcgttcccgaaggattcgatttccccgtcaaggacttcgacatcgaggaactgctcgcgccgaagcgcctgcggcgcgactaccgcctccggcaactcaccttcggcttgtccgccagagagtggacggcagtggccctgctcggttgcttggtaggcgggtcgctaaccgcctactacctatggaatgcccaccagcaagagctcgccagacaagccgcgctcctcgaggagcagaggcgcctcgccgagctggccgagaagaacgcccaggccaagcagccgctggacctggcttcattgcagaagccttggacgctcatgcctgacctcgaggacatgctacgcgcctgtagcaaggcaacgggggtactgtcgctgtcgatccagggctggctcttcgaatccagcaagtgcgacggcagggtcctggtcgccacctaccaccgtaccggcaacagcacggcagccgacctgacagcggccagccagcacctgttcgctgaccgccccgccttcgtcatcgacaacggcaacaccgcggccctgaaggtcgacctgaaagtcgccatcggtagcgatgagccgctgcagccagccgacgacgcgctgcaggcgctcaccagccatctgtaccgtcagggtgtcgagcccaagctgtcgatcagccaggagacaactccgccccttcctggcgcggaagcggcgacggagcagcaagtggtgttgccctcctggaagaaattcaccttcagcgcccagaccaggctcccggcagacctgaccttccaggggctgcccgccgccggggtccgcatcaccaacctcgaaaccacgctcaaggacagccagttggactggactgtcacaggagaaatctatgcgaactga

SEQ ID NO: 324436 - DNA, 1710 bp, Pseudomonas aeruginosa
atgcgtgcccccctgaagaacctcttgccttgcctcctgatccccgcgctggccagttgctcggtcgcacgggtgaacgagtcggcggatcgtgtcgaagctacggcagattccgcgtcgacgatcgcagcacagatgcgcaacacccgaccggatcgccgcgatacggtggtgttctccgacaaaccctgggtcagcacgaagcccctgagcgtttcgcacaccttgtccagtgactgcatcgtgacgtggcgccctgcaggcgcagcgtcgctgcaggaggccgcccaggaagtcatcaaccaatgccacctggcggtcagtatcacgcccgacgcgctgaacccggccgcttttgccctgcaacctcagcagcgcgcgagcaacgccccgccgcccatccaaggcggccaggacatggccaccatgctgtttcctgcctccgtcgccaacggcatgtccctaggtgccggcggcagcatgggatcgagcttcgggtcctacggcccgcggtcgctgtacaacatcaaatggaacggcaaggtcagcgggttcctcgatctcatcgccgcccgcgccggcgtgtcctggcgctacaacccaaccgagaaacgggtcgagttctactacctggacactcggaccttccgcatctacgccttcgacgacgtcaacacggtggactccaccgtgcgttccggtatgacgacggccgccggcatcagcggggatggctccggatccactggacagaatggcagctccggcatcagcggcgactccggcagcaagcagaccaccagctccgagctgaagacctcgatcctcagcgacatagagaacagcatcaactcgatgctgacgccgagcatgggacgcatgtcgctgtcgcgtgccacgggcaccctgaccgtcaccgaccgaccagaggtcctcaaccgcgtccagcagttggtcaaccgggagaacgagagcatcaccaagcaggtgctgctgaacgtcaacgtgctctcggtcgccctgaccgacaaggatcaactggggatcgactggaacctggtctacaagtcgctcaacaacaagtggggcatcggcctgaagaacaccatgccaggcatcgatcaaagcgcgatctccggctccgtgagcatcctggataccgccaacagtgcctgggcaggatccaaggccatggtccaggcgctggcccagcagggtcgcgtctcgaccgtccgctccccgtccgtgaccacgctcaacctccagtcggcgccgatccagatcggccgctacgacagctacctggcctccagccagatctccaacgtcgcccaggtcggcagtaccacctcgctgatcccgggcgccgtgaccagcggctacaacatgagcctgctgccgttcgtgatggaaagcggcgagatgctgctgaagatcaacatcaacatgacctccagaccgacgttcgaaatgcagaccagcggggactccaaagcccagttcccgagctacgacatacaactgttcgaccagaaggtacgcctgcgcagcggcgagaccttggtgctctccggcttcgaccagaccaccgaggataccaacaaggtcggcaccggcgacgccggattcttcggccttggcggcgggctgacccgcaataccaaacgcgaggtcatcgtggtgctgatcacccccgtcgtgctgggctga

SEQ ID NO: 324437 - DNA, 1125 bp, Pseudomonas aeruginosa
atgaccaggcagttgaccactctcacgctgtgcctgctgctcgccagttgcacgacccacaaggctgagccggccaggcccgccttcgacagcagccgcaatccagacctgctctctccggacctgtacccgaatggcgtacaaccggagaaggagcccgtcgtgcgctacgggcgctacaccctggtcagcacccagcctgatgccggtcaacgcgacctgatggcccagatcatcgacgtaaccatcccgtcgagcatgaacccgagtgtcaaggacgccatgcagtacgtgatgagccgctcgggttactcgctgtgcccggcagaggccggtcatgtgaacatcctctacacccggccgctgccggcggctcagtacaagctcggcccgatgaccctgcgcaacaccctccaggtcctctccggccctgcctggcaggtgaaggtcgacgaggtcgcgcggcaggtctgcttcgtgctgcgcccgggctatcaacttcccccggtgccaaggccgaaaccggtccagcaactgtatgcgaagcccgctgccccaactccagcggcggtaacgcaaccctcctccacggaaaaagtcagcacgctggagtcgcccgtcgtggtcgcctcggtgccaacgccggcgccgatcacaaccagccccgctccgaccaagaagcctgaatacaccactgtgctccccccagccgcaccggccaaggatggccactcctcttctcctcccgcggcttcggcaccgatcaagcttccggcctccgccgtgaagtccacgccgcccactccggccaccgtggcttccactccaccggacaaggcgctcccttcggcggagccgagtcggccgctgacacaggcctggtcggccgagacgggatcaaccctgcgcgacaccttggaagcctgggccaagcgcgcacgctggaccgtccgctgggagccgcaggatctcaactatccgatcgaagctcctctgaccttccacggctccttcgaggacgcggtatccgagctgttcccgctgtatgacgctgccgaacggcccttcctggtgaacgccagccggccgcagtccctgatcatcatcaaggagcgcaagaactga

SEQ ID NO: 324438 - DNA, 300 bp, Pseudomonas aeruginosa
atggtcgaagtcaaacaaaccgccactttcatggcatgggaaagcaagctaaaggatcggcgggcaaaggccgtgatcgccgcccgtatcttccgattggcgaatggactacccggcgatgtgtcaccagtcggccagggtgtgagcgagttgaggattcactatggcccaggctatcgggtgtacttccagcagcgcgggacggaaatcgtcatcctgctatgtggtggagacaagagcagccaggccagggatatagaaatggcgaaacgcctggcaaatgagtggaggccgcaatga

SEQ ID NO: 324439 - DNA, 291 bp, Pseudomonas aeruginosa
atgaccgagcaaatttatgattatgaccccgcgcaagcgctggacagcccggaggccatggctctgttcatcgcagacgctttggatactggagacaccgcctatatcgctaaggctatgggagtcgtggcccgcgccaaggggatgacggagttggccaaggaaacgggtttggccagggagcagctttacaaatcgtttagtgagcgcgggaaccctacattgaaaaccatgctggcagtaatgcgagctctgggagttgatctgaccgcccgcccgcatgctcagtga

SEQ ID NO: 324440 - DNA, 1977 bp, Pseudomonas aeruginosa
atgagccgtccacgcctggtcaaccgtacctccgcgactccttcgacgcttctgcagcgggctatcttcgacggctacgacttcggcttgaagatcccctacatcgcaggcagcaaccgcgcgctgctggaactgtccggcttcttcatcagcgcccgggagcatccgttgcaccgctactggcgggtccccaagggcaagttgctgcccgaactggactcgctgtacaaccgactcgccgagctcgctggaggcctccactcacagtcctggcgggacttcagcggcatggtcgaatctgcacaggcctcgcttgaccgacaggccttcacctggggtttgctgctgcgcatcgcgccgctggccgagggcggcgtcttgctgtcaggcgagttccatcccggtgtggtggcggtggctcggcggatgcgcggggtgttcctgcgcccatcgagctcctggcgcatcgacgccacacctgagctgctccgcagcaacctgatcctggagcttggcctcgccgaggaacaattcgagatactggataccgtccaggagctgctcagcgacggtagcttcgcgccggcgaccgagctgcccagcatgagcatcggcggtccacagcaggaaccggcagcgccatccctggaggacgagtcagcttgtgacatctacctcgccgcggtgccagagatcgagcgcaccgagtacagctcggctgatatcgaggcggcgcttcagggctactcgctactggcccaccagcctgccggcatcgctcacttgctgcagagaaccagcgccctgttggccgacgacatgggattgggcaagacccgccaggcggtcatcgccgcttcgatccgagcggcgggcaggccaattctggtcatcaccctggccaccctgttgatcaattggcagcgcgaaatccaggaggtctatccctcggccaccgtggccatccagcaggacaacccagaggcgcagtggatcctggtcaactacgagcagttgagccccttcgtcgccaacgcttcgcgcttcgccgtgatggtcatcgacgaggcgcagcggatgaaggaaccgacggcgcaatgcacgcggcacggtttcgacattgccgcccaagtgccgaaccgctacctgcttaccggcacgccggtgctcaaccgtgaaaccgagctgcacaccctgcttcgcctctcaggccaccccatcggacaactgccgctgaaagagttctgcgaccgcttcgccggcaacccggagttccgccagagtctgcgggcggagctgggtgactggatgctgcgcaggcgcaaggatgtgctgcccagcctcaagggcaagcagcggcagttgctgaaggtggccctctccaccgaggaacggcagcagtacgacgtgctgcgcctcgaggaccgaccgattttcgcgcgactcggcgcgctgcggcgttacctggaaacggtgaaggttcgcgtggcgatggacctgctgagcgagctcgacgccgaggacaaggtgatcctgttctgcgagttcaagccgaccgtggctgcgctgaaggaactctgcgagcaggccgggctcggctgcgtcacgctggtgggcaatgactcgcttaccaagcggcagaaggcgatcgatcgcttccagcaggattccgactgccgggtgttcatctgcaccacggcggccgccgggacgggcaacaacctcactgcggcgaactacgtgtttttcctcggtctgccctggactcccggtcagcaggaacaagccgaggaccgcgcgtaccgcaacggccagctccgcatggtcgtggtgaagatcccactggtcgaggccacgatcgacgagcaactgtggcaactgctcaacgcgaaacgccaggttgcccaggacctcatcgagcccgagcaggtcgacggaaaccgtgcgcttttggccgcaagccttgccgaacgctga

SEQ ID NO: 324441 - DNA, 1890 bp, Pseudomonas aeruginosa
ttgccaccactcgataacgcctcccctaccgagcagttgccggatccatccctagcccgttacagcgagcggcagctcgccgttgccaatacctgggcaacgcatttctccctcgcagggacagctcgaaccaagttcatccgtcactacctgcgcagcacctctacgaccaggtgctggtgcatcaccgtcgctgctgacaacggtgtgcgttacaccatcatgcgtgcagggccactgctccaggtgttcgacggtcaactgatcggtgcgtgggagtgcaggcctgcccatcgtgtcccagcaagcgcaccctccccagccggagcgttgaagctgctgcagcgcctccagaagttcgacgatgccgttcctgtactcagctcttacacccagcgggcgcatgggttggcgactcagttggcccgggaggacctcggctcattccccaagagtcagtatccatcagtcagccacaatcgctactactcgccgaggcgccagttctacctgaagcagatcggagcggtcttgcgaaccttcaggcagttcctggaccaagacctgctgttcgctatccgctcggttcggtgcctctcgccccagctctacaactggctggctcaaggcaaccaggcgcgccggctgcagatgctgaaggctcagccggtcttgacgccgctactggtggattgcgaggagggagtctggcctcacacgacgaccaacgacaacggcgagagcatctgccatttccttccttgccctttttccctgcttgtcagtgaacgaccgcaggccgccgccgtgccatgcgacttgtacctcgatatgggccgtattcttgggcaggtcgcggacgaagggatttcggtcatcaactttttcgcctggctatttcaggcgccacgggcctcgattcgatttcttagtcacgtcagtcccggccgtgcgggaggagctctcttccatcgcaaacgggaaggccgatattcgggatggcatactctccttatggcagcatcgctaggtaaccggcgtccgatcactcgcgctcaatggacagccttctatgccgcctacaatgcgatcccctggcagattcacaacgccaagcctgactacaaccggctcttcaacggctgccccttggattggcaggatccggcatggcttgcaatcactgcacgcctgagagacatcaaggagttctataccgccctcgaccaggggaactcacaggttgttcggcaggcgcgcagcgccctgaaggcgtatctgggtcattgtacctaccgacaggctggcaacctggtggacgactaccaccaggtccagagggaactgcgcgccacagtacagagcagcctgcccgatctggtcgacaccgacgagtacaccacctgggagggaatgctgcctgtcagccttatcgattgccccaatggcctgcagattgtcgagctccgctgccctgccgatctctatgccgaacatatcgcgctggcccattgcatcgatagctacgaccaggccgcctatcgaggagactgccgactgctctcagtacgtgaggctggccgtccactggcctctgccgaactggagctcaggcgtgagcatggcgagccactaggtaggccctggaatccccagcacctttctacggtgcaactgcgcaaactcgataatgaccccgtaccggcagactcccctgccggccaggcttaccgctggttcatggaacggattcgctctggagccatagcgacgaacctgaactggcccgacatgaccgtccacatgacacgcttcgccgatggtcgctggaaggcgggcctcgccgaagccacggcgaagtggctgctcactcggttggaaaaccgatga

SEQ ID NO: 324442 - DNA, 210 bp, Pseudomonas aeruginosa
atggcaactcgccaaactggtactgttaagtggtttaacgaagttaaaggtttcggtttcatcaccccggaaagcggcgcagatgtttttgttcacttccgacagatcgaagctagcggttacaagtcccttgacgaagggcagcgtgtaagcttcttcgttaccgcaggcgccaaaggcccgcaggccgaacaagtgcaagctctgtag

SEQ ID NO: 324443 - DNA, 1920 bp, Pseudomonas aeruginosa
atgcacctcgtaatcattgaagccccgggcaagctgaaaaagctgcggtcccttctcccctccattcgtcccgacgtgacctggcaggtcgaagcgactgccggtcatatcagagacctacccgttcacggccaggatccgcagatgctcaccgtcggcgtaggccaggatttcaaaccccactaccagatcctttcgggcaaggaaaagaccgtcgcacggctgaaggagctgcggcagaaagccgtggaagtctacgtcgcatccgacccggatcgggaaggcgaaagcatcggctggcacatcctccaggctgccgggatcaagaactacaagcgcgttgccttcaaggaaatcaccaagtcgtgcatcagcgccgagctcagctcaccacgccgtctggacctcccgaaggtcgcctcgcaggaatgccgtcgcgtcatcgatcgcctggtggggtatctggtcacgccagagctgcggcgtgtgatgggtaggccaaccaccgccgggcgcgtgcagtccgtcgccgtgtacctggtggtcctgcgagagcgggagattcgcgccttcacagcaatcaagcatttcggggtggaactggccttcgtttcgcccagcgacggccgtacctggaaggcggagtgggatccagtgcccacgtttgccagcaaggagttcccgtatgtccaggatcgtcaactcgcagaactggtgggggctatacgcaatgtgatcgtcgagacctgcattgatggcgaagaaaccgatacgcctccggcgccgttcatctcctcttcgctccagatggccgccgggaatgcgctgaagtggtcacccgacaagacgatgaagatcgcccagcggctgtatgaacaggggctcatcacctaccaccggacggacaaccccaatatttcgaaggactccatgtcggatatccgtgctgtcgccaaggcattggggctgaagtgtgttgagcaacagcggatgttcaaggctgaccaggacgcccaagagggccaccccgccatcacccccaccgattggacggccgctaccgctggtgaaactgctgatgagcaggccctgtaccagctcattcgagttcgtgcgcttgccagccagatcgaagctgccgtgtacgcagtgagaaccatcaccctcctgggcgtcggccccgacaagaagccgctgcgcttcggcgccaaagggaagctgttgaacgtgcctggctggagaaaactgctgcaaggcgatgacgccgaggagcagaagaacgaaacgccctcaaaccccatcccggagctggagccaggccagatcctcaaggtctacagcggcgaggtcctggagaagaaaacctcccctcccaagcgcttcaccgatgccagcctggtgggcgagatgaagcgccgcgggattggccggccatcctcctacgcctcgatcgtgaagaacatcatcgacaagggccaggtgcagatgaagggccgaagcctgatccccggcgagctgggcgaggccaccatcgcgctcctggagcacaacttcagcttcctcagcctcgactttacccgcaacctggaggtcgccctggaccggatcgctaacagcgaggacacctacatgaacgtggtccagcagttctaccagctcctgcagtcggagctgcagacgctgcgcgcgcaccccagcgcacagggcgacccgcgagcaagctctaccgccagcgctcccacggcgccggccagtgacttcctctgcggcaagtgcggtctgcccctggtccaccgcaagaaagctggcaagggcggcttcgacttctggggctgcagcggctatcgcaccaccggctgcaaagtcggctatcccaccaggaacggccaacctgacttcgacaacccgcgcgggctatag

SEQ ID NO: 324444 - DNA, 459 bp, Pseudomonas aeruginosa
atggctacccccgtcttctgggaaggcaacatcggctcggcgccggagcaccgcagcttccccaacggcaacaatcccccgcggcagttgctgcgtctcaacgtgatgttcgacaactcgattcccgatggccagggtggctacaaggatcgcggcggcttctggtgcagcgtcgagtggtggcatcaggatgcccagcgtttcgccgaactgttcgcgaaaggtatgcgcgtcaaggtcgaaggccgggcgatcatggaccgctggccggacaaagagtctggcgaagaagtacaggcgctgaaggtcgaagcctcgcgcatttccatccttccgcatcgcctggccgaggtcaccctgttgccgtcgaccaatggccaggcgacccagcatcagcagactcggcaagtctcgcagcaggactacgacagcgccttcgacgacgacatccccatgtag

SEQ ID NO: 324445 - DNA, 831 bp, Pseudomonas aeruginosa
atgagcaacatcagcagcaagaccgtttccaacaccaaagcccagccctccaccgaggtcagcgtcgagatcatcggcggcaagcccaccacgaccagcctcgacgtcgccaagcattttcggaagaggcacgacaacgtgttacgggatatcaaaaacttggaatgtcccgaggattttgcactcctcaattttgaggagtgttcccgcacgggagcgaacaacaggccagagccatacgtgcgcatgactcgcgacggcttcacccttctctgcatggggttcactggcaaggaagctatgcactggaaggtcgcttacatcaacgccttcaacaagatggaacaggcgatcatcgagcaacccgagatcctcagccacaaccacctgctccagttcgctatcaagaccctcgacctgatgcgcgaccacaccctcggcgagccggcccgacccaggacagaacaggtcgtatgcaactacctggccgtcgagtccttggacgcggcgaatcccgagcagatcaagcaggccctgaacttcctccaggggcagatcatcggtgaaggtgtggccgccaagtccttgcccagcgtggccggctcctccatcgccaaggacctgctctacggcttgctgcgctccgctcatgacgcggagctgctgttcaactccctttacgacagcggcgtcgaaaagctggccagcgaagtgttcaaggagcacatggccaacaccttggctgcaacgtctcggcaaacccgtgaactgctcgggtacgtggccagccgcgccactcgctcccccttcaaaccacgctccacccactaa

SEQ ID NO: 324446 - DNA, 549 bp, Pseudomonas aeruginosa
atgcggcagctcgataaggaccagcaaggcgctctgcaacaaagtgccttccgcccactgcaacaaactgccttccaggcgctgcaacacagtgcctcactaaaaggccttttaaagccttttaaaggtaagggggagctggcccagttggcggagcaatgcgaagtcctggagcagggattgcttgagcttgcccagggactgctggcccaggttcgtcgcccgcccttcactcttctgcccacccgactcatcgagcagcgcacatccgcacgcaccacctttcttcgctggcagcacattgcaacccggcggatgggcgtcggggtgtgggcggaaatgctgcgccaggacaagaccccggaatacctgctgcaagacctctacgagatggagctgcagcgcatcaccctcaacatgcagatcagcctgatccactccatcggcaagcaggccgccgagtgtgcggaaaagatgggccaggccgaggccgagttcatgggccgactgcagcagagtcagacccgccctggttccgtgggcatgtag

SEQ ID NO: 324447 - DNA, 729 bp, Pseudomonas aeruginosa
atggctgaaacccatcggcttcagatcggctctctccgcagcgatgtcaaactgacgcttcacacctatcacgccgcccgcatctggacaggccggcagaagtcggatgccaagcacagcatcctcggcctctccggcttctgtgcatacgtgaatcgcatgcaccgcggggcagcacaggacgatccgtactccgactggtggctggttcagatcgaagagaaagtcgagagctgccaagccgcgctcaaggccatcgaccagcgcctggatgacgtaatggccaagctgccagcgaccctcgatatctccgagaacttgtccgtcacaccggtcaaggtcccgttgttcatctccaaccctctcggcttcaaggcggtctatctcctgaccaactacgacgaactcgcccgccgaatcctgctggcccagcacgtcggactggtcggtcgccgcgacatggaggtctggctcgacgaaggtgcgtcggtgctgcgcagcctctttggtctggctcagagctaccagttcacgggcgccactcgcgacgacttcgccgcgaacaacgctcgcgccgaagccgcgcggaagatgtacgagaagttcggcgagatcccgcaggacatcctggagggtacccgacgctcgaacttcgctccgccgatcactcggggccgctctgacggtgatgccgatgatgacgctgaccgtgtcgagctcgaggactga

SEQ ID NO: 324448 - DNA, 198 bp, Pseudomonas aeruginosa
atgtgtgactcgatcttgtatgcccccatggacgagctcgaattcgagcggctgctagggctggcaaccctattcaacgacaacgatgaatggcctatcgactttacggagctgcaggaactgagcgagctgctcggcaaactcaaaagttgcgtcgacgtagcgatagacaacgcccctgaggcggccaagagctga

SEQ ID NO: 324449 - DNA, 1305 bp, Pseudomonas aeruginosa
atgaggctgtcgcgctttcccatctcgactctgctggattcggcctcgggacatctcgaggcccatttgtataagaagcggcttgctgccgagagcggcgaaccgctggctcaacagtattccggcatcattttcagcggcaacccgcatgagaccgttcctcggcgcctgctgctggataaacgcctcaccccgctggagcggaactgctggcaagtgttccgcttgctcatcaacgacgacgggctgaccgcgttcccgacatacgagcaactgcgcccttatctcggcatgcagccgggcaagatcgcctcgcgcgaaaccatagccaaggcactcacggttcttcgattgacacgctggctcagcctcggccgacgcctgcgcaacgacctcaacgggcaagtacagggcaacgtctacatcctccacgacgaaccggtatccccggcagaagccctggagctggaccccgactacatgcagttgctgagccaatccaccgaccacggcaaccgagccatacgcgaagtaggacaggtcacctggagggaattcagggacgatccggacgttggtcggcgcctgccttcccacctggagaagcttgaggggcgcttgaaccatcagcagtgggctctcgatagtcagctcgaagcggatccagcggcagagttcggcatccgaactctgcccgatttacctcattccaccccgagttcggatgccgaactcagtgaaatcagcggcaagcgatgcgctctaccgctgagttcggatgccgaacccagacagaatccgccgagtacacccttggttcggatgccgaactcatatagtacgtatacatacaaacaagattctgtatgtaaaaagccagtacaaccgcgagcacgcgaggacgcacatccgaactggcaggatctcctgaacggactggaggccgagcaacggatccaagccgtaagcgcgctccgacgggtgtccgaggagctgcgtcgtccggtcatcgagcagtggcggcaccgatgtgcgggaggaagtgtcggtaaccccttcggctacctcatgacgctcatccagcgtgcagtccagggcaagttcaacgcctcttgggctccggaagaaatagcggaacgcccctgtcgtgctccggcaccaccaagccccacaacgcctacacagcctcagattcagccaaagggagacacccggacagggagcgaggtcctcagccggctcaaggacctcattcggcccaggcacggatcgagcgtgccatccgaacggggtgacgagccatga

SEQ ID NO: 324450 - DNA, 768 bp, Pseudomonas aeruginosa
atgtcgaagtcgttgatcaatgaagcggtcctgacgcaggtgatcaaccacctgcgcaatgggcagttcaaacgctgcgccgaaatgggcctgaagccagaaattctggctcagctacaacagccgttcgtcgtgagtctcctgacgaataccccggtgtcttgggtcgaggtgagggtgaacaccgacgtcatggaaaaaatcctggccaccgcagagcgctctcagcaagaggagctgcaaattgagcgtgctctcaaactcggggctaccaccacgatgattcagagcttcttcggtctgtcgccggaagacactgcgatcaagcggctgatcatggagatacacccccgacggggccgctggcgtcagctcgacggaacactggaacaccagatctggtatcgctgggatcacttgatgcaggagaaccaggtcagcctggacgatagcttggcgcttctcgacatcgccatgatcttgaccgaggaaatcaacgcaggcaccgatcaggatagcccggagttcataagcctcgccgttgtctggtggctcattcagagctggttgaaagacggactctattcgtctgacaaatcgggtcaggcccaagcaagtcatcccaggtctccgacgactctttatctggccagcatcagctcacacctgccccactctgccccttccgcaacaacgcaggtgaacgctgagacagaaagtcaacaacaactgaacctggttcagtcggaaggcgacacagcaccatga

SEQ ID NO: 324451 - DNA, 1731 bp, Pseudomonas aeruginosa
atggccaagatcaacccgcaagatctgaaagaccggctacttgcccctggtttcaccgcgccgcccgttcttgagcagttgtcggacccgatcagcgacacccccatggtgctgacactcgaccaggtcctcccctggcacgataacccccggaccactcgaaacccgaaatacgatgagctgaaagaatcgatccggcatcgaggtctcgatacgccgccaccagtaactcgacgccctggcgaagacaaataccgcattcgcaacggcggaaacactcgcctggaaattctcaacgagctctacaaagagaccggcgacgagcgttacttccgtttcaactgcctgttcaggccctgggacaagcagcgcggcgaaatcatcgcgctgaccggtcacttggccgaaaacgatttgaagggtgacctcaagttcattgagcgagctatcggagtaaaaaaagcgaaagtcctttatgagcaggaaagcggcggtgaaaacatttcccagcgtgagctggcacgtcggctaaaagcggatggctacccagtatctcagtcccacataagcaaaatgctggataccgttgaggtcctgcttccagccattccaagcatgctgtactcgggcctgggagttgatcgtgtctctcgcattctctcactacgaaaggcttccctgggctgctggaaacgcctttactccggcgagggtatcgacttcgagatgctgttccaggacaccctggcgatcttcgacagtagccctgacgagttcattttcgagcgtttccaggacgaactcatcgaccagatgaagcgtcccttgggccttcgctatgatcaaatcctgctcgagatcaccaacggccagcaggagcagcgccgcggcactctggtcgacctgcccgcacctgccgcaccacctggaatcccagccgtagggcaggaaaatcctgctgcgtcgactactggacaagcacaatcacagagccccgctgccggcctccaaacgtccaagaccaatagcctcccgggtaatccctctaccccgccaactccgccactacctgtacaacagcagcaactgaccgacgaggagcgtgctgaactcttggcaggtcatatcgtgagcccggtatccaccaagattcagcagactcgccaacggctggccgctctcgagggtgaacatctacctgtcttcgaggaaacagctctgcaggcaatcccggtgcaagtcggcggcctgcacccgatcaccgacctctggtacatcgagcggtcgatcgacacccccgaaatcctgcgacagcacatcgctgacttggtggaagaaattgccgttatcgtcggcgcccccggaacgatcgagaggattcaaggtggtgtgggctactcgtaccgggagccagcagaagattgcgaactttctgaggcagccctgcacctgatcaccttgtttcagtctctcagtggccaggtccaggtaatcctggacaaggtcgactcgcaaacttgtcgtgatgctctgggtgaattccagttctcagctggcctcgctcagttgctgctgggccaacccaccacaggcgatcagccatccagccaggcaggccgtcttaatgacgaagccctggtgaaactgttccggatcattcgtcttgcccggcgcctggttgaccttgagctgccgccggccacctccgagcaagcagctaccgaccagtga

SEQ ID NO: 324452 - DNA, 270 bp, Pseudomonas aeruginosa
atgaagaacgttacttcgatcgaccgcaaacacgcagaagacaagtttgttgtacgcatgccgcaagggctccgcgatcaactcaagcaaaaagccgcggataaccaccgctcggccaacagcgagatcgtctaccggctggagcgcagcaacgcgctcgaagaagaactcgctcgagcgaaccgaatggtcgacgagctcttcgccaagaaccagcgtctgcaggcagagctggctgcggcgaacacgcctcaggtggcggaggcatga

SEQ ID NO: 324453 - DNA, 891 bp, Pseudomonas aeruginosa
atgaaaggggttcgtcgcccaatcctgcgctaccacggaggcaagtggaaacttgctccctggatcatccagcacctggcgccacatcacacttacgtcgagcccttcggcggcgcagcctccgtcctgctccggaaagcccgcagctacgccgagatctataacgacctcgacggggacgtggtgaacctgttccgagtcgcgcgggatcacggtgaggaactgcgccaggccctggcgcttaccccgtttgcccgggaagagttcgaagccagctacgcggaaacgtccgatccgctcgagcgcgcgcggcggatggttatccgaagcttgcaaggtttcggtaccgcagctgcgtccggcgaacgtacagggttccgctcaacctcgaccagatccggtaccggacctgcactggactggcgcaactaccccgacacgctgaccgcgataacagaacgcctgcagggcgtggtgattgagaaccgcgacgccctcgcgctgatggagtatcacgaccggccgaatacgctgcactacgtggatccgccctatgtccactcgacccgcagcacgaaggtgcgccacaacgccaccggcaagtcgtaccggtacgaactggacgacaaccagcacaaggagttggcggcattcctcaaacggctgcgcggcatggtggtgctctccggatatccctgccccctctacgacgagctctacagcacctggcacagagtcgaccgccacgcctatgcagacggctccagagagcgaatcgaatgcctctggctcaacagcgcagcgcttgaggggttggcacaactggatttcttccaggccagtaatgcgtctccatcgccctcattccagaccacggccgctcattactga

SEQ ID NO: 324454 - DNA, 885 bp, Pseudomonas aeruginosa
atgggcttgccggtccgagaagaccagctcgccgttgccatccatcaggttgatgaactcgtggatgttgtccccgagcatcgacgcgaggaaggcgtcaccgaacttttgcatcagcttctgcgcggtgacttccccgatggttggaatacgcttcagtgccttgagcacggtcgaggactggtcgctggcggacaggcctctcggacggatcaacgaccacagcggtgcacggcagtggctgcacttgcggcgggactcctcggcttccagctcgaccgggttgatcggctcgccgtcgaggtcggtgatgatgtggccgcaagccgggcacgcacccacgtcgccgtgaggcgtgcgccgccgaacgaagacaggtttccagtggaagcccatccgcatccgcacgcggcccaggacgaagaactcctggccctgggccggcacgcccaactgctcgcgcagtttcagcagcttgaccagcgtgtccgggccattgagcacccagaccttggctccagccaccgtctcctggatttcgcgccgccacttgtagaccaggtggggtggcgagagcaccagggtgcggcggtagccttcggcgttgagcacggcggcggtggcaatacccaccgtcgtcttgccgcagcccatctcgccattgacgatcgcggcgcgttcgccgcgatcgaccaacagctcggtgacggcgtggaccacatcggcttgcgccgggaacagcttgcgcttgagcgcggcgaggatcagttgcctatgcacccgcacctggccggtgtagaccggaggattggcgcggttcagcgaatcgagcaactcgtcgccgaactccgatacgaagtcctgcaggctgagcgtgaggggtga

SEQ ID NO: 324455 - DNA, 306 bp, Pseudomonas aeruginosa
atggcactcgcagtcctcaacctcgcgtcacaagcacgcttttcgcccgggcaggtggtcatgaccgccggcgtcgacgagctggtccgacagggccggctcaaccccacgccgtacctgcgccgccatcttcatggcgaatggggcgacctgagcgacagcgatcggcggcagaacgacgccgcgctgaagtccggcgaggatcgtctgttctcgtcctaccaggtcacgcgcgacctgaagctctggatcatcaccgaatgggatcgcagcgtcaccacgctgctgttgcccagcgaatactga

SEQ ID NO: 324456 - DNA, 1110 bp, Pseudomonas aeruginosa
atggcactcatgtttccgcgcctggcgcgcaatttcatccgtaacggctacttccccaccgacgagccgacgctggagcgggccttgtccgcactggcgccgtctcccggctccatgtccatcctcgatccctgcgccggcgaaggcgtggcgattgccgaagccgcccacgccctcgggcgcgagcaggtccaggccttcgtcgtcgagtacgacgccgagcgtgcccgccacgcacggcaactggtcgatcgctgcatccacggtgacctgatggacacgctgatctcgcgccagtcattcgggctgctgtggctgaacccgccgtatggcgacctgagcaaggacgtgaacggcaacatcggctatcaaggccagggccgtgcgcggctggaaaagctgttctatcagcgcgcgctgccgctgctgcagtacggtggcgtgctgatcttcatcgtgccgtcctacgtgctcgacgccgagctggtcggatggctgacgcgccacttcgccgacctgcgcatctaccgtgcggtggaaacgcagttcaagcaggtggtgatcttcggtcgcaggattcgtcagcgcgaccaggcatcggattcggtcaaggccacccgcggtctgctgctgcagattggacagggtgacgccgaagccgaggaactgccgctcgaatggccgttcctgccgtacaccgtccctgccagcccggccgagccggagcacttctatcgcgtgacgatggagcccgagcagttcgccgatgaagtcggccggctgcaaggactctggccggcgctcgatacgcacctgggggccgcgcagcagtcgctgcgtccgcccgcgcgggccttgtcgcactggcatctcgccctggccctggccgcgggcgcgatttccggcgtagtgacgtccaagaccgggcgcgtgctggtagtcaaaggtgacacccacaaggagaagacgctccagacggaatacaccgaacgcgacgacggctccgtggccgagacgcgcatcctcaccgacaagttcgtgccggtcattcgtgcatgggacttgacgctgggctcgcccacgtggggcgaagtgctgaccatccgctga

SEQ ID NO: 324457 - DNA, 651 bp, Pseudomonas aeruginosa
atgcctgcaccttcttccgcgaaaccgctgtaccgcatcgacgaatgccccgacctcatggccgacggttgcgtcggtgacgagcagggcaatctcgtctttctctcgatctgggcgcgcgacaccgccgttcaggagttcctcgcccgcctgaccctcggccgggatgaacagggactggatcagttccacgtcatcaccgagcagggcgcatccatcccggtcttcgtcggcaacgtcgagaacctggaaaagcgcatcacccgcgcctatcggcgaacgctgttcggttcgctgacgaatgtgtggctgttcgatcgtcgctgcgtgaagccagacaaggccaacgccagcgcgctggcgcttctgcccagggattccgctcaccggctcggccggctgtggacgctggtgcaggacacctgcccgctgccactgctcgaccactggcgcgacaccgtgctggagctgttgcagacacggcggatgctgaccggtcttcccttggccctcgggccgctggaaggccatcggctggccctcgatgtcccggcactgacgaaggcgctgggcgagctgatccgcaacggcaccctcggtgccacgcagtacgaactggccgcgaacgcaccgcttcggcgtgtggcgtga

SEQ ID NO: 324458 - DNA, 366 bp, Pseudomonas aeruginosa
atgggctggaccttcgttcgtcagacgcgcgatcagttgatccgcgagctgctcgctccgcaggcgtccgaacgcgcttgctgcgaagtcatcgaccacacgctggacggcgacgttctgtggaccgtggttcgcgtcaccgccaggcaggcgggcgtcatgggcctcgcggccggtgagtccgtctgctacatcggctgccatctgctggaaagctcgggcggcgattggggctacaagtccctcgatgagtccgtgcatccgtactactactcgtgcccgctgcgctatctcgacatggcgccggtgcaaagctccgagtggcgcgagcgggttcaccgcttccacgcgggacgcgctgtctag

SEQ ID NO: 324459 - DNA, 612 bp, Pseudomonas aeruginosa
atgatcaccattcccggccaactggccatcaagaccatccacggcaggaacggcgacttcaacgtcggccgcctggcgacctcgatcggcgagttcgtcgtgaagaacgccgaactcgatcagtaccgcgagggcaagtacgacggtgatttcgtcatcgtcgagattcgcccctccacgtacaacgccaacggccgcatggtcatcgagatccgcgcccatctgggcgggatgaccctgtccaacatcgacgccctgagccgcgacgaagcccgccggctgagtccgcaggaagtcgatccaatcgacgaggaagcgcaggcgcccgcgccggcaacgcccccggccaagccgaaggcgaagccgcgcagtccgcgcgatcccctggtcgataccacgccgttcggcagcgaaccggctcccgtgtccgctgcggcctcggccgaggcagacgacgcggcgctgttcggtgccttgtggcccctgggcgagaccgtaaagctcgatgcgaccgtggatcgtcgtgtgctgcgtcagcagcgcgaccgtctcgacaagctgggctacgagttcgctccgctgtcccaggactggcacctccaagctgcctga

SEQ ID NO: 324460 - DNA, 552 bp, Pseudomonas aeruginosa
atgaccacttccaccgaaaagtcctacttcgatctgcacatcaccggcctcgggtatctcaatcgcatccgcgaagtgaagcccaagaagggcgatgcgttcctggcctgcgacatcgcggctctgaacggtcccagcgacgacgtctcgtatgtgcgtttcgacacgcgcgtatcgggttcggaagcgcagcacctggtgcgccgctgcattcaggcggtcgacgccgagaagaaggtgatgatcggcttccgcttgggcgacctgtggaccgacaccttcacctactccaaggggaagcgtgccggcgagcagggtgtgagcctcaaggcccgcctgctgttcgtcagttggatcaaggtcgacggcaagctcgtctacaaggccgaacccaagccgaccgagaccgacgagcgcgacccggaagtccctgtgacgtccgacgcgcccgccgcgcagcaagcctcggcaccggagccttccaggcccgtcgccgatgctgccgacgacgctgccgatgcccccgcattggccgttgccgagtcgttctga

SEQ ID NO: 324461 - DNA, 366 bp, Pseudomonas aeruginosa; identical to SEQ ID NO: 250909

SEQ ID NO: 324462 - DNA, 798 bp, Pseudomonas aeruginosa
atggatacccaagccatccgcgcacagatgccgacgctcgttgtcggtcatgtgccttccaacgtccgttcgttcaaattcaacatcttcgacggccagcccaaggtttcgacgctgggctttcacatcgacccgaagcctttcgagggcaaggtcatcgccaccaccgacgaggccatcgtcgtcaagacgggacgagccgagttcgcggtgctcgatcgcacgctcgtgaccgaagtgcccgacgagggcgccaaggtgcaggtcgaaccctatgtcagacgccgcttcgacggtcagcgggcggacacgcccgaggagcagaccgagttcaccgccgacggccagccctacacggtgaagcggttcgtgctcgggtccgcaccggcgaagctgccgatccccgagccgcgctgccccgagctgcaggaactggtcgaccaactggagcagttgcccgctcccgacggtttccggcgcgtcacccacatgctggtggatgccggcgcgcgggacatcacctgggtcgatccgctgcccgccgacatcatccgcacgccgccggccatcggcttcaccgtcgccacgacgaagttccagggtcgcgtcaccgtgctgtatgagcgtggcctcgacctctacgcggtggagctgcaccgcgacggcgagctggtcgaacgggtcgatgaggtgttcttcgacaccctcggcgagacgctggaacggctgatcgacgacgggagttggcggcgcatccgcgtgcagtgcctgtcgtgtcgtaaggctatccggcactga

SEQ ID NO: 324463 - DNA, 717 bp, Pseudomonas aeruginosa
atgtcccattccaacaatcccttcgcccgcggctacgatggcctgtccgtgcagcggctgctggcgatttcctacgacgacgactgcccgctgagctatctgccgctgcacgtctcgcagtcgcacctgccggacagccaggtcgagcgccatgcctgcgtcttctgcgacgacttcgcgctgatcaccgagggccagaacgtgccgcccgagctggacgcgcagtgccccagccacggtatcgcccgaaacctcgtctacgccgtcatggccgaagaagccggccagccgctgcacgtcggcgatacctactccgaggaagccgcgcgcgaggtggtacgccgcctgcgcttcgagaccgggttctacagccgtgcctgggaaatcagttcggcgcacatcaccgaggaggccggtcgcttcctcgccgaactggcggacatcgccacgccgagcggttttctgttcgtggccttccgcattccctacagcccggcggtcggcgtgaagctggtcgccacgccctggacggatgcgaacctgcagcatgtcgagggcatcaccgccgaagagctgcggcaggagcaccgggccaagggcgtgccggagtccctcgtggaagtgttgcacctggctgcgctcgccgacgttcgcatgttggtgttcgatgccgacgcgccagtgctggacgggctgacgctctacgacgacgagtaa

SEQ ID NO: 324464 - DNA, 393 bp, Pseudomonas aeruginosa; identical to SEQ ID NO: 250913

SEQ ID NO: 324465 - DNA, 237 bp, Pseudomonas aeruginosa
atgtctgaaccttccgcatcttcctctgcaaccgcagtgcgcagtggtgcgctggcgctgacctggaccggcaagcgtttgccgctacaggtgctgcgcagcgcggccggccactacatcggcacacaagacgacgaaggaccggtatcgcgggagtccgtcgagtatttcccgacccacctcgcagcacagcgcgccctggatacccatgcctggacacagcgcgctcacccctga

SEQ ID NO: 324466 - DNA, 735 bp, Pseudomonas aeruginosa
atggctgccgtcgcagggaaaaccgaatcgcggacggcccgctttagggcaatggcccgcgtcacgggacaaggcaaagaccagggcgccgaaggccacacgggccttcggctgaagagaaaggaaaaccacctgtgggctgcgtcagcgcaggccgtcgtcaaagccgttcgctgcgtcagcaatcgcacccggcccgtttcgtggctggggccggaaacctctggcgtgcatccacacacaaagggagcccgatgtttcgccggcgggcaccggcacggaataccctcggcccaaggggcctcctcacggctcgcgcggcggcaaggcgtcaggaagcccctcgtgaccgaggcaaggcacaccgatcaagggaatggcggcgggcgcgattcgtggagcaatgaccttctcgccccgtcgcccgacgacgggcagacggggcgcgcacaccgttgcagaaggagacgcgcgctttggagtcccgcgcggtgcgggacgtttgcctcgccgccagtgaagtggccggcgcggcagggggaagcgaggatcaggacgccttggaggcagcgcgccgcttgcgcggtgcgctgcgccggcccgtcggggactcgatcggcaacgtgcccttgcagtccgggtagcgcgaacaggaccagaacgcgccgctcttgcccgtgcgctgctgcatcggtgcgccgcactgcgggcaggccggcgccggcggcagcttga

SEQ ID NO: 324467 - DNA, 2016 bp, Pseudomonas aeruginosa
atgcgcgtgttcctgtgcgagaagccgtcccagggcaaggacatcgcccgtgtgctgggtgccggccaccgcggcaacggctgctacagtggcgccggtgtcgtcgtgacctggtgcatcggtcatctggtggaggcggttccgcccgaaggctacggcgatcaatacaagcgctgggccatcgagcaactgcctattcttcctgagcgttggcgtgtcgagcccaaggcggcgaccgcggcgcaattcaaggtcgtgcagcagctcgtcgccaaggcgggcgagctggtgattgcgaccgacgccgaccgtgagggcgagatgatcgcccgcgagatcatcgacctgtgcggctaccgcgggccgattcagcgcctgtggctgtcggcgctcaacgatgcgtcgatccgcaaagcgctgggtgcgctcaagccgtccgccgagacgctgccgctgtatttctccgcactcgcccgatcgcgcgccgactggctgatcgggatgaacttgagccgcttgttcacactgctggggcgccaggccggctatacgggcgtgctgtcggtggggcgcgtgcagacgccgacgctgaagttggtcgtggatcgtgatcgcgagatcgcgcgattcgtctccatgccgtattgggccgtggatgtgctgctatcccatgccggccaatccttcaccgcgagctggataccgcccgaaggcagcacggatgcagcgggtcgctgccttcagcagccggtggcgcagcaggctgcggatcgcattcgcgcggcacgcgatgcgcaggtcgtgtcggtggacaccgagcgcgtgcgcgaggcaccgccgctgccattcgatctgggcaccttgcaggaagtgtgttcgcgtcagctcggcctcgatgtgcaggagacgctggacatcgcgcaggcgctgtacgagacgcacaaggcgacgacctatccgcgcagcgactcgggatatctgcccgaaagcatgctcgcggaagtgccggcggtgctcgatgcactgctcgccaccgatcccagcctgcggcccttgatcggccagctcgaccgcaaccagcgttcgcgcgcctggaacgacggcaaggtgtcggctcaccacggcatcatcccgacgctggagcccgccaacctgtcggccatgaacgagaaggaactggccgtctaccggctgatccgcgctcattacctcgcgcagttcctcccgcaccatgagttcgaccggacggtagcgcagttctcgtgcggcagtcagtcgctggcggccgtgggcaagcagatcgccgtcaccggctggcgcgaggtgctggcgacgccggggccggacgatgccgacggcgaggatgcgcagcgcagccaggtgctgccggcgctgcatgcgggcctgtcctgcccggtcggcaaggtggatctcaaggcgctgaagacgctgccgcccaagccctacacgcagggcgagctgatcaaggccatgaagaccgtcgccaagttcgtgaccgacccgcggctgaaacagaagctgcgagataccaccggcatcggcaccgaggcgacacgcgccaacatcatcaacggtctgatcggtcgcggctacctggtcaagaaaggccgcgccgtccgcgcttccgacgcggcattcacgctcatcgacgcggtgccctcggccatcgccgaccccggcaccacggcggtgtgggagcaggcgctggacatgatcgaggccggccagatggcgctggacaccttcatcgagaagcagtccgtgtgggtcggccagctcgtgcagcagtaccgcggcgcaacgctctcgctcaagctgccgccggcgccggcctgcccgcagtgcggcgcaccgatgcagcagcgcacgggcaagagcggcgcgttctggtcctgttcgcgctacccggactgcaagggcacgttgccgatcgagtccccgacgggccggcgcagcgcaccgcgcaagcggcgcgctgcctccaaggcgtcctga

SEQ ID NO: 324468 - DNA, 384 bp, Pseudomonas aeruginosa
atgagcacgcacttcgtcggcgagggcaacatcggttctgcgccggactaccgcgaattcccgaacggcaacgacgagccgcgccggctgcttcgcctgaacgtctacttcgacaacccgatcccgaagaaggacggcgagtacgaagatcgcggcggcttctgggcgcccgtggagctgtggcaccgcgacgccgagcactggaagacgctgtaccagaaaagtatgcgggtgctggtcgagggccgcaccgtgcgcgacgaatgggaggacgccgacgagaacgagcgcgtgacgttcaaggtcgaggcgcggcgcgtgggcatcctgccgtaccgcatcgagtcggtggcgctcagcgccaagccggccggcggacagtag

SEQ ID NO: 324469 - DNA, 549 bp, Pseudomonas aeruginosa
atgacagcatcaccccctatcagccactccacgcgcttcgtggcgctggaacaggcggacttccagcggctggaacacgcaggctacctaaaaggccttttacagccttttaagggtaaggggagtctggagacctgggccagccagtgcgcagcgctgcgcgacgacgtgattggcgtggcgcagcggcgcgtgctgccccaggcgcgcgcctaccccttcagcctgctccacgtgcaactggcccagcaggccactggcgcagggacgaccttcctgcgctggcgcaacctcgaccgttcctccatgggcgtggcgttgtgggaggccctgctggccaaccccgcgacgccggcctcgctgatcgacgagctgtacgcgatggaactgcagcgcatcgtgctgaacatgcagatcagcctgacccacagcatcgctcgccaagccctggaatgtgccagcaaggccgcgcaggccgaagcggcttacctgcggcgcgtccacgggcataccgcgtccgttccacccaccaccaaggagtcaccatga

SEQ ID NO: 324470 - DNA, 789 bp, Pseudomonas aeruginosa
atggccaacgaacgcacagaacccctgcaactgaatctcggatcgctgcgcagcgcgatgtcgctgacgctgcacacgcaccacgcttcgcgcatctggcacggccgcgcgccgaccgaggggcgccccggcatcatcggtctcaacggcttcatcggcgccatgaacaagatgaagcgcggcgccgagcaggacgacccgtactcggactggtggatgttgcggatcgaggacaagctcgccgacaccaagacccgcttgcagaccctgcgcgaacaggtggatcaggccctggccgacgtgccagcggcgctgtccctgggcgagaacatgaatgtgcagccggtgaagctgccgctgttcgtgaatgcacaactcggcttcatggcggtgtacctgctggccgactacgacgacctggcacgcaagctcatcctggcccaccacacggcgctgatcgaccgcagcaccttggagcgctggctcaatgagggcgcgcacgcgctgcgcagcctgttctcgctggcccagcagtaccgctactcgggcacgacgcgcgacgacttcgcggcgaagaacgcggcggcgcgagcggcgctggagaagttcggcgagttgccgcaggacgtgctggaaggcacgcgccgctcgcgcttcgcgccacccatcgcgcggcggtcgaacaagcccggcacgccgcctgctgcgcctgccatcgtgcccgatgcgcaggctcccacgggtggcgcagccgatggtgccgcgggcgatgagggtgttggcgcatga

SEQ ID NO: 324471 - DNA, 753 bp, Pseudomonas aeruginosa
atgaaagccatcgtggcccaccacgagatttcaggcccggcgcattcgctggaggcccttcgcgcagcgcggattgaagatgccgcgaccaagaccctgggcacgttgatcggacaactgtttggttcgtatgtcgtcaccgatggaaatggcggcaaggaacgcgacgacgatcttcccggtgacgtgatttcctttcgcacgcgcgtgcaactgagcctgtctgcgcaggactacgccaagacccaggccgacctcaaagacctggtatcgctgcgcaacaccctggtgcaccacttcatcgaccagcacgatctatggaccgtggacgggtgccgcgctgcacaggacgaactcggttccgcctacacgcgcatcgatcaacacttcgagcagttgcgcggctgggccgagcacatggatcaggcgcggcgcctggcagcggaattcgtccagtcggatgtgttccacgacctggtggtcaatggcatcgcgccggacggcacggtggactggccggccgccggcatcgttcgtgcgctgcacgaggccgccgcgcagttggctgtcgagggctggacacccatcgccgccgctggccgctggatcgcggaccggcatcccgagcagcttccagccaagtacggctgcagcagttggcggcaggtggtgcacgagtgccgcctgttcgagcttcgctaccgtgaggtggaggggcaacgggccgcctggtacagacctcgcgaggcatag

SEQ ID NO: 324472 - DNA, 1194 bp, Pseudomonas aeruginosa
atgacgacgggcgacgctccacggcgtgatggcccggttgcgctgtcggcgttgttcgacgaggcgctgcggcaccttgagccgaaggagccggcgcagggcacggcgccggccgccgacggtttcctctacagcggcaaccgccatgagagcgtgccgcgccgactgttcctcgaccgacgcctgacgccgctggagcgcaacgcctggcaggtgttccgcctgcagctcaacgacgacggcgtgaccgcctttcccacctacgaccaattgcgcccctacctggcctcgatgccctgcgcggcgcaggcatcgcacgagaccgtggcgcgcgccctgacgctgctgcggctgacgcgctggctgagcctggtgcgacgacggcgcgacccgaagaccggccgtatccaaggcaacctctacgtgctgcacgacgaaccgctgtcgcccttcgaggcgatgcagctcgatgccgactacctcggcctggtcagccaggcgctgacccatgccgccaaggcggtgcagatcgtgggcatgaacacgctcaaggagattgccgaagacccgctgctcagcggccgcacgctgccgacccgcctgcaggtgctggcgcagcgcatggcgctgcatggctggacgacgccaggttatccacaggcgggtgcggaccacgaatccgaagaaggccaggaagcccttctttggaatgctgcgcgcccgtcttcggaatccgaagcagggccgaaacccgcgccggacagctctcttcggattccgaaggaggaccgtacagtacgtaatgatcgtataaatgaagtacgtacagtaccgcgcgcgagggccttgcagaacctgcgactgcccgagcgtttcctgcgcttgaaggatgagcagcaggccggcgcgctggtggccctgcagcaggtggacgaagcgcagcgccaggcggtgctcgacgagtgggcggcgcgctgtggcggcagcacggtgcgcaatcccgccggctacctgtttggcatcatccagaaggcgatccgcggggagttcaaggcctgggctggagaaagtgcatcgacgccgccagcgcccccgtcacctgcgccctcgtcaccgccggcatcccgtgcggctgaccccgaggtcgcacgagcctacgtggctcagctccgagaagccttgcgtgatcgctga

SEQ ID NO: 324473 - DNA, 561 bp, Pseudomonas aeruginosa
atgtcggcaccgcacccgctcaaccaggccgtgatcgcccaggccctgcatgacctgcgcaacggccagttgcgccgctgcaaggccatgggcttcggtgaggaggagctggatgcgctgaagcacccagaactcgtgagtatgctggtgaatgccacggtgtcgtggtgttcggtgtcggtgaaccgggaagtgttgaagcggctgctgagccaggtgcacgacgtggagcgggagatcgccacggtggaccgcatgctgcgcctgggggcgagcacggagatggtcagcaagttctacggcctcacgcatcaggaagtggcgctgcgccgcgacatcctcgggctgcccaagcgtaagggtcggcatccggtgctcgacgaggcgcaggacgtggccctgtgggaacgctggaaggccggcatcacggagcggcacatcgcactgaacgacgacatggcgatgctggcgctgaccatggacctggccgaggccatgaccctgcccatgtcggtgatctggtcggcgatacggaactgggtcgaccaggggctggtgtag

SEQ ID NO: 324474 - DNA, 1644 bp, Pseudomonas aeruginosa
gtggctgagctgacgccgcaggacatggctgccaagctgctggccaccggcttcgagcgcagcggcccttcggccgcgaccttgagcgaccccatcgccgacacgccgatggtggtgacgctggaccagttgcggccctacgaccacgacccacgcgtgacgcgcaacccggcctatgcggagatcaaggcgtccatccgcgaacgtgggctggacgcgccccccgcgatcacgcgcaggccgggcgaggcgcactacatcattcgcaacggcggcaacacgcggctggcgatcctgcgcgagttgtggagcgagaccaaggaggaacgcttcttccgcattgcgtgcctgttccgcccgtggccggcgcgcggtgaaatcgtggcgctgaccgggcatctggccgagaacgagctgcgcggcggcctgaccttcatcgagcgggccttgggcatcgagaaggcgcgcgagttctacgagcaggaaagcggccaggcgctgtcgcaaagcgaactcgcgcggcgactgacggccgacggctatccggtgccgcagtcacacatcagccgcatgaacgatgcggtgcactatctgctgccggcgatcccgacgctgttgtacggcggattgggccggcatcaggtggaccggctcgcagtgctgcgcaaggcgtgcgagcgcacctgggagcggcgtgcgctgggccggccgctgaccgtggacttcgcttcgctgtttcaggatgtgctgtcgcagttcgacacgcagccggagggcttctcgccccagcgcgtgcaggacgaactggtgggtcagatggccgagctgctggaagcggactacgacacgctggcattggaggtcgatgacagcgaaagccgtcagcgagtattgaccagcgagccggccgcgccgaacccggcaacgcctgtcgcacctgcggcgccagccatcacgccgcaactgtcgcccgcggcgccaacgccacgggacacctcgcccgtcgcgccaccggcagagacaccctcggcaccacctgccgctgcaccaaacgcccgggacgggcagcgcgacgagcgcctgcaggggcacatcgtgacgccggccccaaccaccgagcgcctgcagtccatccagaggatggtcgcggatcagctcggcgacaagctacccgacttcgaggccgacgcgctgcgtgcgatcccggtgcaggttggcgggctctttcccatctcggatgtctggtacatcgagccgggcctggacgtgccggatcgcctgcgcgtgcatatcgcgcagttcgctcgcgagatcgcgggggaagcggcggtgggcgaccacatcgaagccagcgatggcggcatcggcttcgtctgcgtgacgccggccgtgggccaggcgaaggcgctcccggcgttcgcgcgtgcgatgctgaccctgctgcacgcgctgagcaccgcgccggcacccgcgaccgggctggacagcgcgcggctggccgatgaccttgggccgctgctgcatggtcaccgcggcttggtcacgcgcctgagcgatgccgggctggtaaagctgttccgtctgctgcgcctggcgcgccggctgctggatctggaagccggcgtagcgagccaggattcctga

SEQ ID NO: 324475 - DNA, 237 bp, Pseudomonas aeruginosa
atggcgagcgcgcatgaactggcgcgcggccgcgaacggctgcgcgcgctgatcgagttcgcgctggacgaaggctggcgcgtggttcgcacgtccggcgggcacctgaaattcacgaagcaaggctgcgcgtcgatctacaccagctcgacggcgagcgaccaccgtgccgaccgcaatgcccgcgcacagcttcgccgcgccgaccggcaagcgcaggagaatggccgtggctga

SEQ ID NO: 324476 - DNA, 867 bp, Pseudomonas aeruginosa
atgcaggtggtgtccatcatttcgaccaagggcggcgtgggcaagaccacgacggcggccaacctgggcggcttcatcgccgatgccgggctgcgcgtgctgctgctggacctggacgtgcagcccacgctgtcgagctacttcacgctggacgttcgcgcgcccggcggcatctaccagatgctggccttcaacgagcggcgcatcgagcaactggtgtcgcgtaccgtgatcgcgggcctggacctggtgctctccaacgacgaccgcggcgaactgaacacgctgctgctgcacgctccggatgggcgcctgcgactgcgccatctgcttcccgtcttccgcacgcactacgacttgctgctgatcgacacccagggcgcgcgcagcgtgctgctggagatggcggtgctggcgtccgacctggcgctgtcgccggtgacgccggaaatcctcgcggcgcgcgagctgcggcgcggcacgctgcaactgatcgaggacatcgcgccgtatcggcacctgggcatcgagccgccgccgctgcgtctgctcatcaaccgtgtgcatcctgtgtcgtcgaatgcgcggctggtccagcaggcgctgcgacaggtgtttcaggaacaggccggcgtgcaggtgctgggcaccgacgtaccggccatcgaagcctatccgcgcgctgcgacacgaggattgccggtgcaccgggtggagtgccggcagccggctgggcgcacggcgcccgcggcgttggagaccatgcgcacgctggccggcgagctgttccccgtgtggcgggagcgcttcgcgctggtcaccggtcgggccgatgcgggaggggccggccatggcgagcgcgcatga

SEQ ID NO: 324477 - DNA, 219 bp, Pseudomonas aeruginosa
atgtcttcgcagaccaccgcgccggcagtgccgcccgagcaccgcatcctgcgccgcgccgaggtcgaagccaagaccggcttcaagcgcgcgcacatctacagcctcatgaaggaaggcaagttccccaaggcgctgcgcctgggcgtgcgcgcggtgggctgggactcggtggagatcgaacagtggatcgccgatcgcctcaaagaacgcgcctga

SEQ ID NO: 324478 - DNA, 759 bp, Pseudomonas aeruginosa
atgccgaaatcgagcagccacgcctttggcgcaaagacgtactaccgaccgatcgaggcggccgtccgctggtgcggtctcctgcgcttcgagcagcgtattctggaagcgctggagcagcgtgccatgccggagcccggcgaattcccgcgctggccgctgctgcgcctgtatgccgagcgcatcttcgacgcgctgacgcatggcgaattgcccggtggcaaggccggcatcgtgctggactcgcagcggccggcgctcgacgaccccgagttgaccgtgcgccacgtggacttgaaagcgtggatgtcgcagttctaccccggcgatcggccggggtttttgtttgacggcatcgaacgcgcggtgcatccggcggtgagcgtggacacgctcaacattctgctggccgatcgcgaagcagcgaagtcgcaacttgccgaacttgccctggtgcatgaaacgctgcgcaccgcgcacgaagcactggcgaaggaacatgccacgcgcgcggccaacgacgaacaggcgcgcgagcctggcctgcgcagcgagacgacttacctcaacatcatcggcggactgctgacgctgctgctgggcaattcgccgtcaggcgcggcctattcgtcgttccgcagcatggatgccgtggtcagcgcgctgatcgcacaccatgagggacggccgggtctcagcgagcggacgctgtggagcaagctcgcgcaggcgcggcgccacctggaggcgtcgcgctga

SEQ ID NO: 324479 - DNA, 909 bp, Pseudomonas aeruginosa
atgaacttacgccatcttcgctgcttcatcgccgtagccgaggaactacacttcggccgggctgctcgacggctgcacatcgaacagtctccactgtcgcgcacgatccgccagatggaggcggatttaggggtgccgctgctcaaccgcttgccacgcagtgttcgtctcacaccggcgggacaggtcttcctcgaagaagcccggcgcgtactgctggccttcgagcaagcgcagaccaaggcacgcgccgcagcgaaccagcggaacacgctgcgcatcgcactatctggtgacatggggcaggcccgcttgtcggcgttgcttgcgctttgccgcgaggaggcaccacaggtcggcattcggatatttgaaacgccactggcgcagttggtgactggactgcgcaacgacttgtatgacgcaggttttgcattggctggtgaaatggacgccggcatcgtcgccatgccggtgtggcgagacccgctggtggtggctttgcccgccaggcatccgctgctggctttcaaggaagtgccgctggaggaagtggcgagctatccgctggtgctgtgcgatccccaggtctgcgaaggttgcagccggcagcgcgaacggctgctccgcacggtggatgcgcagccgacggtagccgagtacgtcaagacccattccctgatgctggccctcgtggccgccggctacggcgtgggcttttcgagcgcggcgcatctggcgggttgccatcaggccgatgtcgtcgtgcggccgctggccgacgagaccgcttcgctgacgacctatctactgcgacccgaaggcgaaatcatggagccgctgcggcagttcatcgaccgcgtggagcgtgtcggacgcccgcaaggcaccgatcaacgcccgatgtga

SEQ ID NO: 324480 - DNA, 153 bp, Pseudomonas aeruginosa
atgtcagcgcctacggcgaagctctcgttcgagatcgcccagctgcgacgcctgaagttcggcaagaagagcgagcagctcgatgccgaacaacgcgcgctgttcgacgaggctctggacgccgaccttgccgcggctgaggcgcagctctag

SEQ ID NO: 324481 - DNA, 177 bp, Pseudomonas aeruginosa
atgcctaagcgcaccgccttgccggcggacctgccgcgcgtggactgccaccacgagcccgagaacacccgctgcgcgtgcggctgtgcgctcaagcgcatcagcgagaagctggactacacgccgggcgtgttcacggtcgagtgccacatccgcggcaagtggacctgcgcatag

SEQ ID NO: 324482 - DNA, 378 bp, Pseudomonas aeruginosa; identical to SEQ ID NO: 250933

SEQ ID NO: 324483 - DNA, 570 bp, Pseudomonas aeruginosa
atggacattgatttcaagaaattggctccctggaactggttcaagaaggagcaggaagaacaacagagcactgcctcgctgccggtgcagcgcaatgacctgccggtggcgggtgggcccgtcagtcccatcctgcaattgcatcgcgagatcgaccgcctgttcgacgacgcgtttcgaggcttcggtctcccgacgctggccatgccacgctggccgtcggactggccgggcatgctgaagccggcgctggacatccaggagaccgacaagcagtacaagatcgccctggaagtacccggcgtcgaggaaaaagacatccagatcacgctcgacaacgacgtgctgatggtgcgcggtgaaaagcgtcaggagcaggaaacgaaagacggcggtttccaccgggtggagcgctgctacggcagctttcagcgcgctctgaacctgccgaccgatgccaaccaagacacgatcaaggccgctttcaagaacggcgtactcacgatcacgatggaaaagcgcgaggccagtgctcccaagcagggccgctcgatcccgatcaacggctga

SEQ ID NO: 324484 - DNA, 2850 bp, Pseudomonas aeruginosa
atggccagaaaacaatgccaagtctgcggccagtccgccacggtgcgggtggaagccaatctcaatggtcgccacagcaccatgctgttgtgtgacgatcactatcgccaactggcgcgccagcaaaagcgcaccgtctcgccgctggaggctctgtttggctcgcgcagcggtttgttcgaagacttcctcggcagcgacttcttccgcatcggtgacgatgcaccgtccgtggcggctgatgccgacgaagtggtcgatgcgtctttcggcgaatccgctcccgcaacggcgggcacggcgcgccgccgcggcagtgggctggccagccgtatcagcgaacagtccgaggccctattgcaggaggccgcccgacacgctgcagagttcgggcgcgccgaagtcgataccgaacacctgctgctggcgctatccgacagcgacgtggtcaagaccatcctggggcagttcaagatcaaggtcgatgacctcaagcgccagatcgaatccgaagccaagcgcggcgataagccgttcgagggcgagatcggcgtgtcgccccgggtcaaggacgcgctcagccgtgctttcgtggcctccaacgaactcggccactcttatgtcgggccggagcatttcctgatcgggctcgccgaggaaggcgaaggtttggcggccaacctgctgcgccgttacggcctcacgccgcaagcgctgcgccagcaggtaagcaaggtggtcggcaaaggggccgaggatggccgcgccgagacgccgaccaacacgccggaactcgacaagtattcgcgcgacctcaccaagatggcgcgcgagggcaagctcgatccggtcatcggccgcgcgcaggagatcgagacgaccatcgaagtgctggcccggcgcaagaagaacaacccggtgctgatcggcgagcccggcgtcggcaagaccgccatcgtcgaagggctggcgcagcgcatggtcgccggcgaagtgcccgagacgctgcgcgacaagcgcctggtggaactcaacatcaatgccatggtggccggcgccaagtaccgcggcgagttcgaggagcgcgtgcagaaggtgctcaaggaagtgaccgagcaccagggcgagctgattctcttcatcgacgaagtgcacaccatcgtcggtgcaggccagggtggcggcgaaggcgggctggacgtggccaacgtgttcaagccgatgatggcgcgcggcgaactgaacctgatcggcgccaccacgctcaacgagtatcagaagtacatcgagaaggacgccgcgctggagcgtcgcttccagccggtgatggtgcccgagccgacggtagcgcagaccatgatgatcctgcgcggcctgcgcgacaccttcgaggcgcaccacaaggtcagcatcaccgaggatgcgatcatcgccgccgccgagttgtcggaccgctacatcaccgcgcgctttttgcctgacaaggccatcgacctgctcgaccaggcggccgcacgcgtgaagctgtcggccacggcccgcccggtggcggtgcaagagctggagtccgaactgcaccagctgcggcgtgagcaagactatgtggcttcgcgcaagcagtacgacaaggccgccgagctgggcaagcgcatcgaggccaaggagactgaactcaagaagctcgtcgaggaatgggaacgcgagcgcgcctcgggcagcgccgaagtcaaggccgagcatgtcgcgcagatcgtctcgcgcctgaccggcattccggtcaacgagctgacggtggaagaacgcgagaagctgctgcatctggagcagcggctgcacgagcgcctggtgggccaggacgaagcagtacgtgccgtggccgatgccgtgcggctgtcgcgcgcgggcctgcgcgaaggcggcaagccagtggccaccttcctgttcctcgggccgacgggtgtgggcaagaccgaactcgccaaggcactggccgagtccatctatggcgatgagggcgcgctgctgcgcatcgacatgtccgagtacggtgaacgccataccgtggcacgcctggtgggcgcgcctccgggttatgtgggctatgacgagggcggccagctcaccgagaaggtgcgtcgcaaaccctacagcgtgttgttgctcgatgagatcgaaaaagcgcaccccgacgtctacaacatcctgctgcaggtattcgacgacgggcggctcaccgacggcaagggccgggtggtggatttcaccaataccatcatcatcgccacctcgaacttgggctcggacatcatccagcgtcggctgaaggcccgtggcgccgccggcgaggaatacgagaagaccaagtccgaggtgatggacgtgctgcgcggacacttccgccccgagttcctcaaccgcatcgacgagatcatcgtcttccatgcgctgggcaaggaggagatccgccatatcgtcggcctgcagctcgatcgtgtggcccgcaacgccgccagccagggcgtgacgttgaccttcgaccagaccttgatcgaccacttcgcggaggaaggctacaaacccgagttcggcgcgcgcgagctcaagcggctgatccgcagcgagctggaaaccgcgctggcacgcgagatgctcggtggtggcatcggcaaggccgatcacgccagcgcccgctgggatgacaaggccgaacgggtggtcttcgagcgccaggagccagccgcgcagccggccgagcctgaaaagcccgatgcagcgaacgtggccgaggcaccgccgaacggcgagagcaagcctgcgcgcaagaagaagtcagcgggcggcggatcttga

SEQ ID NO: 324485 - DNA, 1431 bp, Pseudomonas aeruginosa
gtgtccgaccccaatgggctgacatgggcagccaccctcgtgtcgctggcggtcgctgttcccacagcggggcacgcggtcatctacaagcgtgaccctcgatcggccacgctgtgggtactgctgatcgccttgttgccgctgggcggttcgctgctgtatgggctgttcggcatcaaccgttaccagcggcgggcgcggcggctcttcccgggggcagatcctgctgctcggcaggacctctcgcccacgatgcccgaggctgtatcgccgccgcttgccggtctggcccacctggtgggacgcgccaccggccagtcgctgaccagcggcaaccgcatcgagccgctcatcgatggcgagcaggcctacccggccatgctcgctgccatcgaatcggcgcggcacagcgtcgcgctggcttcgtacatcttcgacggccaaggcatcggggcgcagttcgtcgatgcgctgcgccgggctcatgcgcgcggcgtgcaagtgcgggtgctgatcgacgacgtgtatgcccgctggacgccccgcagcgcctaccgcgccttgcagcgcgccggcgttccggtggcgacgttcaacccgacattgattcccgcgcgcctgcatgccgcgcatctgcgcaatcaccgcaagctgctggtgatcgatggcgagacgggtttcaccggcggcatgaacatcttcggttcgtattggcggcccgatgcgccgggccaggcctgtcacgatttgcactttcgtctgcgcgggccggtggtagagcatctgatgcggagcttcaccgatgattggtgcgataccacgggcgagcggctcagcaagggttactggggcgaaccgcccgtaatggctgatgagcaaggaacctcttgggcgcgcggcatcgaggccggtcccgacgaggccctggaccggatgcgctggaccttcatgggcgctttgagcgcggcgaagcattcggtgcgcatctggacaccttacttcgtccccgatcagccgatgatcgcggcgctgagtacggccgcgttgcgcggcgtgcgtatcgacgtgctgacgcccgcaaacggcgaccatcccacggtgcaatgggccgcgcgcgcccactactggcaggtgctggagcacggtgtgcgcatcttcgaacggcctggcccgttcgaccacagcaagctgatgctggtagacggagcgtggtgctgcctgggttcggccaattgggatgcgcgcagtttgcgcctcaacttcgagttcaatgtggaggtgtacgacaccgcgttgtctaggcggctgtcatccctttttgatgccgctcgtgatgcgtcgggcgagatatcggcgaaggcgttgcgcgcccgcccgctggccatccgcttgcgcgacggggtggcccgtctgttcacccccgttctctag

SEQ ID NO: 324486 - DNA, 1830 bp, Pseudomonas aeruginosa
atggaaaagaaagatcaatggaacattggctactggatcgtcgccggtctgttgctgctgacgctgcagaactactggcaggcggccaagaccgtcgagcccgtgccctacagcgaattcgagaaggcgttggccgaggggcgcgtcgccgatgtgctggtggcggaccgcacggtgaccgggcgcctgaaatcgccggacagccggggcaagaccaccatcgtggccacccgggtcgaacccgacctggccgagcggctgtccaagtacgacgtgccctatgcgcgggtggtggaaagcacctggctacgtgatgtgctctcctggattctgccggcggtggccttcttcggcgtctggttcttcctgttccgccgcttcgccgagaagcagggcatgggtggcttcctgagcatcggcaagagccgtgccaaggtattcatggagaagaacactggcgtcacctttgccgatgtcgcgggtgtcgatgaggccaaggccgagctggtcgaaatcgtcgacttcctcaagaacccgcaggattacggccgcctcggcgcgcgcatcccgaaaggtgtgttgctggttggcccgcccggcacgggcaagaccctgctggccaaggccgtggcgggcgaggccggggtaccgttcttttccatctcaggctcggagttcgtcgagatgttcgtcggcgtgggtgcagcgcgcgtgcgcgacctgttcgagcaggcccgcgggcaggcgccggccatcatcttcatcgacgagctcgatgcgctgggccgcgcgcgcggcgtcggcggccccatcggcggccacgacgagcgcgagcagaccctcaaccagctgctcacggagatggacggcttcgacagctcggtcgggctgatcatcctcgccgccaccaaccgccccgaaatcctcgaccaggcgctgctgcgcgccggtcgcttcgaccgtcaggtgctggtggaccggcccgacaagaagggacggctggacatcctgaaagtccacgtcaagaaggtgacgctggctcaggatatcgatctcgaacaggtggctgcgctgaccacgggcttttcgggtgcagacctcgcgaacctggtcaacgaggccgcgctggccgcgacccggcgcaaagcgtccgccgtggagttgcaggatttcaccgccgccatcgagcgcatcgtggcgggcctggagaagaagaaccgagtactcaatcccaaggagcgggaaaccgtggcctatcacgagatgggccatgcgctggtggcgctggcgctgcccggcaccgaccccgtgcacaagatctcgatcatcccgcgcggcatcggcgcgctgggctacaccttgcagcgccccaccgaagaccgcttcctgatgacgcgtaccgatctcgagcacaagatcgccgtactgctgggcgggcgtgccgccgaaaagctggtgttcggcgagttgtctaccggggcggcggacgatctggcgcgagccaccgacatcgcccgcgacatgatcacccgctttggcatggacgaaggactgggctacatcgccttcgaggcgcagcggccacgctttctcgatacaccggaactggcccaaggcggctgccgggtggccgaatcgacccaggcgcgcatcgatcaggccatccgtgacatcgtgatgggtgtgttcgagcgcgcctaccggatcctcgacaccaaccgcgcggtgctggagcgttgtgcgcgcgaactgctggcgcgggaaacgctcgacgagaacgacatccttcaattgacccaaggacttgttcttgatggaaacgaaaagtag

SEQ ID NO: 324487 - DNA, 459 bp, Pseudomonas aeruginosa
atgtctgcattgactccgtgggaccccttccgggaactggatgaattgcaaaaccgcctggcgacgatgttgggacgggcaccccagcgacagggcgcccgtaccggcaacgaagccatgaccacggcggactgggtaccaatggtggacatcagcgaggatgagaacgcattcctcctcaagctggatctgccggaggtccccaaggatgccgtgcgcgtcagcgcggaaaacggcgtgctcaccatcagcggcgagcgcaaactggaaaaagagcagcagggcaagaagttccaccgcatcgaacgtgcgtatggccgctttgtgcgcagctttgtcttgcctgacaacgttgatccgaccaaggtgacggcttcgatgaaagacggcgcgctggaagtgcggcttgtcaaggccgagcaagccaaaccgaaacagattgaaatctcagtcaactaa

SEQ ID NO: 324488 - DNA, 915 bp, Pseudomonas aeruginosa
atgaatatcaaacagccacaatacaccttctccgcacttgccctggcggtcgtcgtcggactgagcggaccggctctggcccaatcggcggcaggttctagcccaggtgctgcagcaccctctgccgcatccaaggcggcacagccacaggtagatgacaaggccgcccgggaagccgataaaaagcgtgccgagctcactcaagacgccatcacggcgctcaccaagacccaggaggctttgaccctccttgatgcaaagaagaccaaggaggcgcttgctgcgctggaactggccagcggaaagctggaactggtattggcacgcgacgccaaacttgctttggcgccggtcgatgtacgcgtcatcacccacgatatccacgccaacgtggaatcggtaaagaaagcggtcaagttgtctcgggagttgttgggtgatggcgaggtgcaaaaggcccggcccatcgttgccaatctggccagcgaaatcgtaatccaaaccgacaaccttccgatggcaacgtacccggcagcgatcaagtcggccgcacggctcatcgacagcggcaagatcgacaacgccaaagcggaactcgcccgagcactgaacacgctggtggtgacctcggtcgcctttcctctgcccgtgctacgggccgaagccgcgatggcaaaagctgaaaagctggccgagaccgacaggcgcgatgccaagcagaacgaggagctcagcaccttgctgtcgtccgtgcgcacggagatcgagatggcgcagatcctgggttatggcaagaaggcggacttcaaacccatcttcgatcaggtgaagtccattgagcaaaagtcggctggtggcaaaagcggcaagggatggttcgacgagttgaagacgcgcatccaaaagctgttttga

SEQ ID NO: 324489 - DNA, 888 bp, Pseudomonas aeruginosa
atgaatgagcaaacaccgaatcccaatgcgacgaacgaaggaataaacgaacaggccgcggtaagcagccttcctgtcagtccagagtccaagcctgaagtcgtcacggaggtacagcctgaggttcagaaagaaacggactcgcaggcggcagacaaacgtaaacaagtcctcgatgaggccgtctcggccttggcgctgaccaaatcagcgctggccgcacttgacggcaaggacgctgcacgcgcattggcaacgctggccgaagtgacgggaaagctggagctgatcgttgcgcgcgaacccacgctcgccctggcccccgttgatgtgcgcaccatcgtgcacgacttgttcgccaacacggaaaccattgaggcgatgaccgacgaggcgctggatgccctcaaacatggcgaggtgcaacaggcacgtcacgtgctggctttgctggccagtgaaatcgtgatcgcggtcaccaacatccctctggcgtcctatcccgcagccgtgaagtcagtcgtgccgctgatcgatcagggcaagattgaagaagccaaagccgcgctgcaggcagcgctcagcacgctggtcgagacgcgcagcgtgcatccgctgcccgccctgcgcgccaggctgctcctgaagcgcgccgagaccttggtagaagatggtcagcggagcgaagcgtccaatgagcgcctggagacattattgaacgaagcgcggcagcagttggaaatggcagaactgctgggttatggaaagaagaaggactttgagcccctgtatgctgaactcaagaaagtcaagcaaaagacggctgggggaggcggcggaaaaggctggctcgatgaaatcaaggcaaagctgtccaagttgttctga

SEQ ID NO: 324490 - DNA, 612 bp, Pseudomonas aeruginosa
atgaacacagacaccatcgccgattccagtgcggatgaccccaccaaagcactgtgttcgctgagccaaaattggtggctttttgcgttgcgcggtgtcttggcattgattttcgcagccctcgcgttctggatgccacaatcggctctgttggccatgaccatcatgttcggcgcattttccttggtcaatggcgcgttcaacttgtttgcagcggtgcgccatatccagaaaaaagagcgctggggctggctgctgttcagcggcattgtcggcatacttacgggcgtcgtcgtcctggttgctccttgggtcgccacgatagtcttggcttcttttttatgggctagcgtgggcttctgggcgattttcaccggtgtgctggagatatccgccgccgttcggctgcgtcaagaaatcaagggtgaaatttggcttgccttcagtggactgctctcgattgtccttggcgctatcgtcttgtggatatttttttcccgtccggtcgagtcattcctggccgcaggctggctgttgggcttctatgcggcagtctatggtgtcacgcttttgttcttgagttggcgtcttcgcaaaacgcgccagggataa

SEQ ID NO: 324491 - DNA, 1146 bp, Pseudomonas aeruginosa
atgcagatgcaatatagctatcgagctatcgacaaagagtttcatgaaccttggcagagagctttgggaaatgtgatcgagcacgccctcaagccattgctcgacaaacacactaaagattcagcgcaacttcaaatcgtccttgatcgcgacaagatcaagcggcaatttctggccagtggctatatgcacctgcccggcaaaaagattgtcagcgttactgcatcacatgacgagctgacgcccctcgcgcagatgctcgcacagtcgttgttccgtcaggccaagaagcattttgaccgactgcatgctcaggatcaaatcaagcgcaaagcacgacgcgagcgcttgcgcgagctcaaggtgcggattgccgcaaaacccgcatcagccgcccatgaggccgaggcgacccgaatgcctctactgtcgaaacttgaggctgtcgcaaggcgtgagctggcttatctgcgggccgtcggcgatttaccgcgcgattatccgacgctgcgcgacgtggtggatgaagcgattgtccgagctgaggtggaatggcaatccgtgccgggggaaaaagaggcttacaccggtcttttgaagcatctgttcgccgtcctggataacgaagtggcaagcagccggcaatttggcgaattcgtttctctggacgcgccggtcgaaccggatgcccaagacgtcgccgaggccatggtggaagaggaagtcttcgaattttatcagcccgatgacacactcaggctggccgatatcatcgctgacagtcagcatcccgatgccgcaacgatcgcggaacaggaggagctagttgatcggtcgagcgagttcgcttttgcattcgacctgctgaaggacatgccgcgtttgtggcggcgcatttttctgcttatccgtgtggacgggctggatgccagcagcgtctctgaaatcctgctgattcctagtaaggaagatactgtccaaaggtggctcatgcaggccgaagcgttcatcgctgctcatttggaagaggccggagtaagcaaagacgggaacgattggctccaaggcgttgattggtcggcattgtctgtgacccgaagcgcggcagcctcactgtggtccaaggaggcgaaccatgaagaatga

SEQ ID NO: 324492 - DNA, 441 bp, Pseudomonas aeruginosa
atgaagaatgatcttcacctcgtctgtccgcattgccagtccatcaaccgcgtaccgactgcgaagctatcggaacatcccaactgcggccgctgccagcagcccttgttcacgggcgaacccatcgagttgaccacggcgacgttctcgcgccacgtggagcgcagcgacctgccactgttggtcgatttctgggcaccttggtgcgggccgtgcaagatgatggccccgcagttccagcaagcggcgcgccagctcgaacccagggtcaggctggccaaggtcaataccgaggcagaaccccacctggccgcgcagttcggcatccgcagcattccgacgctcgccctgttccagggtgggcgggagatcgggcgtcaggccggcgccttgggcgcgcaggacatcgtgcgctgggcatctgcacaggtggggcgctga

SEQ ID NO: 324493 - DNA, 1716 bp, Pseudomonas aeruginosa
atgcaggacttgctcggcgccaccctgatcctgctggcggcatgcagcctcgcggcggtggcgacggcggcgttcagagtacccgccttgctgggttacctcgccgtcggcgccttgctgggcccgtcggtcagcggtgtagtcgcgccgggagaagcgcttgattttctgtccgagctgggcgtggccctgctgctgttcatggttgggctggagttctccctcgggcacttctggctttcccgtaaaaccgtattggcggccggcagcttgcagatgatcgctgtcgccacgccactgaccttgatgttgatgtggctgggacagccagttcagagcgctgcgttgctcagcactgcggcggccatgtcgtccacggcgctggtcagccgacagctggccgaccaaggcgagctcaccacccgccacggccgcagcgccatcgccgtgctggtctttcaggacctggccagcgtgcccctgctggccctgctggcgatctgggcgcgcggcgagtcgccgaagatcgagagcgtgctgctcgaagtgttgggcgtgctgatgttgttcgcggcagcggccctcgcctcccgtcgtctgttgcatggcctgctgggctgggtggcgcggcagggccacgaagaatccttcgtgctggtttccttgtgcgtggtggtggctgccgccgctgctgcacacgcggtcggcgtatccgccgccctgggtgcgtttttggccgggatggtgctgggcgagagcgacttccggcaccacatggaaagccacctcaggccgtttcgcgatgtgttgtcgggcgtgttcttcgtgaccatcggcctgcaactggacgcagcacagattctttcggcaccgctggcggtactggcgtggctggtggtgctggtaccggtcaagatcctgctcaatacgctggccttgcgggcgacgcgcctgtccgccctcgatgcctggcgcacgggcatagcgttggggcacggcggcgagttcgccctgctgttgttgggcacggtcttgcagcagcatctgatccccgcgaccgtcgtccaacccatgctggtcgcgctggtgctcagcatggccctggcaccgctactgatccgccatcacgatgtacttgcccggttcttgagccgcaccggcggcgtcattcagccaccccaggctgaagaagtcgagatcgccgcgcagacgacgcgatatcgagaccatgtcatcatttgcggcgcgggcgagcttggcctgacagtcagcgagattcttcgccacgccggcgtggcgcatctgctgctggaggcggacgcgcagaaggtcgaggccgcgcgtgccgccggcgcgccggtgttccatgccgatgccagtcggcccgataccttgctggctgccggcttgacgcatgcgcacttggtggtgctgacgttcgcccatgcccagcaagcgttgcgcatcgcccaggcgattgccgagcaccgtccggcgctgaccttgtgggtgtcatgcagaagtacgaccgcggccgatgcatttcgcgccatgcccaacgtgcgcgtgtatcagcaatcctttgccgcagctattgggctggcggaacaggtgatgtcgacgcttggcatgtcgaccgagctgattgaaggacacatcagcgcaatgcgccgccgtctcgacagcagccgttttccagggagttcatcgtcatga

SEQ ID NO: 324494 - DNA, 432 bp, Pseudomonas aeruginosa
atgaaatcaacacgccttaacccatttcaggtcttacgtgaccaattggccatcatgagtttttacgagcgcttcgagcaggtcgtcgcgctcgtgctgtcggcggtgatcgccgtcatcatcgtggtgtcgctgttccagctcatctccatcgtcttcacgctgctggttctagatgccttcaatcccctggaccacgaggtattccagagcgtgttcggcatgatcatgacgctcttgatcgcgatggagttcaagcattccatcgtgcgcgtggcgctgcgtcgggacagcatcatccaggtcaagacggtggtcctgatcgcgctgatcgcactctcccgcaagttcgtgatcctcgactccgacgcgagccccgcaaagatggccgcgctggcaagcgccacgctggctctaggtgcgacctactag

SEQ ID NO: 324495 - DNA, 966 bp, Pseudomonas aeruginosa
atgacccgtcatcatcccagtgatccgcgcacggcgctcttgcaacaccgctggctcaaccgcctgcagaccgggctgttggtcctgaccctggtcgggatcgcagccgcagcagggagactgccgtttggggaaggctgcctgtggctcgcgctgtttgccattgcaggtgcgttgctgctggaaccggtagccgcgtcggcgctgagcttgcgcctgtaccgcgtacgggccttgcacccgcaagaagcccacaagatgtgggccctattgcgcgagctgcccgcccgtgccggtttgcccgccacgccggtgccgcactatgtgcccagtgccgtcgtcaacgccttcgccaccggatcgaagcaggaggcatcgatcgccctcaccgatggcctgctgcgcagcctgagcccacgcgagctggcgggtgtgctcgtgcacgaggtcgcgcacatcgctaatgaggatctgcgtgtcatggggctggcggattccgacagtcgcctcacgagcctactggcccttatgggacagatcgcgatcctgctcagcctgcccgcgcagctggttggcgcggcggaggtctattggcctggtctattgttattggccgcatcgccccagctggccctgctcgcacagctcggcttgtctcgcgtgcgtgagttcgacgctgaccgccttgcggcggaactgactggcgacccgcaggggctggcgtccgcgctggcgaaaatcgagcgggtcagccgctcctggcgtgcctggctgtggccgggatggggcaatcccgagccctcctgcttgcgcacgcatccggcaacgcaagagcgtatcgcacgcctgctgacgttggcgcctgggccagcatcagcgttgccattccacgcgccccatttcttgccggaatccgctgtgacgccgcgcccgccgcgctggcacccgagcgggctgtggcgctga

SEQ ID NO: 324496 - DNA, 1152 bp, Pseudomonas aeruginosa
atggcctaccccgacccgtacccacgccccgcaccggaccccttcatccggcgctggctcttcatcaccgcctgtattgccacgctcatgctgctgtggcagttcctgcccgccatcgaggcctggttcagtccgcgcgaggcggcagatcgcaccgtgacggcgcgtggcgatctggcggcggacgagaaagccaccatcgaactgttcgaagaatcgcgcgcttcggtggtctacatcaccaccgcgcagctggtgcgcgacgtctggactcgcaatgtcttttccatgccgcgcggcaccggttcgggctttatctgggacgatgccggccacgtcgtcaccaacttccacgtcatccagggtgcttctgaagccacggtcaaactcgccgatggccgcgactaccaggccgcgctggtggggacgagcccagcgcacgacatcgccgtgctcaagattggcgtcggtttcaagcgcccgccggccgtgccggtcggcaccagtgccgacctcaaggtgggtcagaaggtgttcgctatcggcaaccccttcggcctggactggacgctcaccaccggcatcgtctccgcgctcgaccgctcgttacccggagaagcgggcggcccggccatcgatcacctgatccagaccgacgccgccatcaaccctggcaactccggtgggccgctgctcgattcggcaggaaggctcatcggcatcaacacggcgatctatagcccctccggcgcctcggccgggattggtttcgccgtgccggtggacaccgtcatgcgcgtagtcccgcaactcatcaagaccggtaagtacatccgtccggcgctgggcattgaggtggacgaacagctcaatcagcgcctgcttgcactgaccggaagcaagggcgtgttcgtgttgcgtgttacccctggttcggcagcgcacaaggccggcctcgcgggtgtcgaagtcacgccgcaaggcatcgtgccgggcgaccgcatcatcgatgttgatggcaaggcgacggacgatgtggccaagctgctcgcgcggctagacgacaggaaggtcggcgatgtggtggtcttgtcagtggaacgggccggcaaatcgcgcgaggtgcgtgtggagctgcaacccgggaattga

SEQ ID NO: 324497 - DNA, 909 bp, Pseudomonas aeruginosa
ttggaactcagactactgcgctatttcgttgcggtcgcggaagaactgcatttcgcgcgagcggccgagcgccttggcgtagaacaatcgcctgtgtcgcgcgcaatgcgcaatctcgaagccacgctcggcgtgcagttgttcgaccgcagcgcgcaccagacgcgactgacctgggccggtcaagtgttcctcggtgagtgccggcgtgtgcttgccaccgtggagcaggcggtgagtgccgcaaaggcggcggcgcagggctatcagggttatctgcgcatcgccatctgcgacagcttggcgcagccccacattgccaccttgctggcgcgcagccgcgaggaagagcccgaactggagattcgcgtcttcgagctgcctttcgcgcagcagctcaagggcctgcacaacgatctgctggacatcggctttgcgctgtcggacgcggtgagcgaaggccttgtcgccgagcccgtgtggaccgatcctctgtcggtgatcgtgcccgtgcgccaccccttgttggcgcacgcggaagtgccattggatgaagccttgaagtttccgttggtactgtgccatccggacgcgggatcgggctgccaccaccagatccaggcggtgcttcaaggtgcgtccaagccgctcaagctggtagatcaggtgacgagcctaggcgtgatgctgactctggtcggtgccggttatggcctaggtttcgccattgcctcgcaggtgcagaccctgaaccgccccgacataaccgttcgccccttggccggcacgccgcccatgctgtccacctacctgctgcgccgcagcgccgaaccctctgagcccatgaagcggtttctgcagcgcgcccgcgaggagttcctgccaaagggagatgaaccggcctcgtga

SEQ ID NO: 324498 - DNA, 726 bp, Pseudomonas aeruginosa
atgccgttaagcgctgaggagcaggcaatttgcgatggcgccatcgcgttcgccagagcgaacaagaagtccattgcaaagcggctaacaaacccccagatatatgctcgagaggagaaccccgtgtcagttttcatggccgggtcccctggggcaggcaagacagaagcctcgatcgagctcctgtctcagttcgacgagaacgggtcaaaggttctacggatcgatccggacgaattgcggtctgagttcgaagggtacacgggagggaattcctggctgttccaacctgccgtctctattttggtagagaagattcatgatttggccctggatcagcgacagtcatttctcttggatggcacgctagcgaactacgagatagcagagcggaacatcgagcgatccttgcgcaagggcaggactgtgctaatcctgtacgtgtaccagcggcctgaccttgcatggaattttgtccaagctcgagagcgagtagagggaagaaaaatcccgatcgaagagtttgtgagacagtatttcgcggcgagagacgtcgtgaatcggctcaagcaacacttcggagggtcgatagaggtggatctgctgctgaaaaacaacgacggatcccaccgtgtttacgaggcgaacatagaccggattgacagccatgtccccgaaacctatgatcgcgcgtcccttgagcagatgcttttacagcgaggctaa

SEQ ID NO: 324499 - DNA, 159 bp, Pseudomonas aeruginosa
atgagcatttttacagtgaaaaagccgggcacaaccacgaaattctctgaattcgttcgtaacgcgtcttccgaagagaagaagcgtgtatacaaagtcgtgatgaagaaatccaccgagcgccaatgcaaggtgctagcagcagctgctgcaggctga

SEQ ID NO: 324500 - DNA, 1056 bp, Pseudomonas aeruginosa
atgagcaaacgtcgcagccaccgccgccagcagccggttacagtccagtccgcccaggaaggcgagttcatcccgcgccagggcggccgtgccgaggccttcaccttcggtgacccgatgccggtgctcgacggccggggcatcctcgactatctcgagtgctggtcgaacgggcggtggtacgagccgccgctgtccatggaggggctggccaaggcggtggggtcgagcgtttacctgcagtcgggcctgaagttcaagcgcaacatgctggccaagaccttcatcccgcaccgcctgctcagccgggcgacgttcgagcagttctccctggattggctgacattcggctcggcctaccttgagcagcctcgttctcgcctgggtacgcggatgccgctgcaggcgccgctggccaagtacatgcgccgcggcaccgatctggagacgttctaccaggtgcgcagttggaaggatgagcacgaattcgagaagggcagcgtgatccaactgcgcgaggccgacatcaatcaggaaatctacggagtgccggagtggttctgcgccctgcagagcgccctgctgaacgagtcggccacgctgttccggcgtaagtactacaacaacgggagccacgccggcttcatcctctacatgaccgacgccgcacagaacgaggaagacatcgacgcgctgcgcacggcgctgaagaccgcgaaggggcctggcaatttccgcaacctgttcgtttacgcgccgaacgggaagaaggaggggatccaactgattccagtcagcgaggtggcggccaaggacgagttcggctcgatcaagaacatcagccgcgacgaccagctcgccggcctgcgggtctatccgcaactgatgggggtggtgccgcagaacgccggtgggttcggatccatcagcgacgcggcagcggtctgggccagcctggaactcgagccaatgcaggcgcgcctgcagcaggtcaatgagctgatcggggaagaggttgtgaggttcactgccttgggcctgccttcactccgttga

SEQ ID NO: 324501 - DNA, 1782 bp, Pseudomonas aeruginosa
gtgggcggcagcatctgcgccatgaacgctgccgtcgaaattcccatccgtgacaaccgtcgccaggccaaattcctgtactggatgggttggcgtgtctgcgacatcgccgatcacctgggcgagaaggacaagacccttcactcatggaaggaccgcgacggatgggaccgggccgacagcgtagaacggatcggaggcgccctggaagcccggttggttcagttgatcctgaaggacggcaagaccggcggtgactacaaggaaatcgacctgctgcatcggcagcttgagcgccaggcgcggatccagcgctaccagggcggtggtaccgaaaccgacctgaaccccgagcttgccaagcgtaacgaaggtcccaagcgcaagccgaagcgtaacgacatcagcgaggaactgaccgagaaactggtcgaggccttcctcgacggttgcttcgactaccagaaagactggtaccgcgcgggtaatcagcgaacccgcgtgattctcaagtcgcgacagatcggcgccacgttctacttcgcccgcgaggcgctgatcgacgcgctggaaacggggcgcaaccagatattcctgtcggccagcaaggcccaggcacacatcttcaaggcgtatatccaggccttcgcgcgcgatgcggtaggtgtcgaactgaagggcgacccgatcatcctgccgaacggcgcggaactgcacttcctcggtaccaacgcgcggactgcccagggctaccacggtaacttctacttcgacgagttcttctggacgttcaagttcaaggagctgaacaaggtcgccagcggtatggcgatgcagaagcgctaccggcggacctatttctcgacgcccagctcgatggcgcatgaggcctacacattctggactggcgagcgcttcaacaagggcaagccggccgccgatcgcatcaagatcgacgtaggtcatgacgccctgcagcaaggacgactgtgcgaggaccgcatctggcgccagatcgtcaccatcctcgatgccgaggcccgtggctgcgacctgttcgacatcgacgagctgcgtctcgagtacgacgccgaggctttccagaacctgctgatgtgccagttcgtcgacgacggcgcgagcattttcccgctgaccatgctgcagccatgcatggtcgatagctgggacctgtggtcggaggactacaagccgttcgcgctgcggccgttcggtgatcgccaggtgtggctgggctatgaccccgccgagacgggcgacaccgcgggtctggtggtggtggcgccgccggcggtaccgggcggcaagttccgcgtgctggagcgccatcagttccgcggcaaggacttcgccgagcaggccgagttcatccgtaaggtgacccagcgctactgggtcacatacatcggcgtcgacaccaccggcatggggtctggcgtcgcgcagctggtgcgccagttcttcccgggggtgcgcaccttcagctactcgcccgaggtgaagacgcagttggtcatgaaggcctggtcggtgatcaagaacggccgcctcgaattcgacgccggctggaccgacctggcccaggcgctgatggctatccgcaagaccatcacggccggtgggcgccagttcacctacaccgccggccgcaacgacaacaccggccacgccgatctggcctgggcgctattccacgcattgcagaacgaaccgctcgaggggcagacccccgcgaataccgggcgcatggagattttctga

SEQ ID NO: 324502 - DNA, 822 bp, Pseudomonas aeruginosa
atgaagaaattccgcagcaaatggttccgcatcgccgtcgaaggggcgaccacggacggccgcaacatcgagcgcgactggatcgagcagatggccgcgcagtacgacccgaacacctacggcgcgcggatcaactgcgagcacatcaagtgggcctggccggctggtgagttcggcgcctatggcgacgtgctggcgtgcaaggcggaagagatcgacatcaacgggcagaagaagctcgccctcttcgcccaactggagcccaaccaggcgctgctggaactgaacaagcagcggcagaaggtctacacctcggtcgagatcgatcccaagttcgccgacacaggcaaggcttacttggtcggcctggccatcaccgactcacccgccagcctgggcaccgaggcgctgtccttcagcgccaagaacgggaccctcgccagccgcaagaccaaccccgacaccctgttcagcgctgccgaagagggcaccctcgagtttgaggaatacgaggacaaaccctcggtcggcgctgcgctgttcaccaaggtcaaggaactgctcaagggcaaggaagcccgcacccaagccgagttcggccaggtcggcgaggccgtcgaagcgatcgccgaacacagccgcgacctgggcgagcaactcggcgagcagaagacgcagacccagcaactggccagccagctggacaaggtcaccaaggaactggcggacctcaagagcaccctcgatagcacccgggaccacagccaacagcagcggcccccggtcaccggtggcggcagtgtcgccctgaccgactgctaa

SEQ ID NO: 324503 - DNA, 1017 bp, Pseudomonas aeruginosa
atgcgcaacgaaacccgcaaacagttcgacgcctacctggcgcagctcgccaagctcaacggcgtgaactccgccgtccagaccttcgccgtcgagccgagtgtccagcagaagctggagcaacgtattcaggagtccagcgagttcctgaagcagatcaatgtctacggcgtcgacgagctgcagggcgagaagatcggcatcggcgtcagcggcaccatcgccagccgtaccgataccactggcgacggtgtacgcaagccgcgcgacgtgtccgcgctcgacaaccagcgttacgagtgcaagcacaccgacttcgacaccgcaatcacctacgccatgctcgacgcctgggccaagttcccggagttccaggccctgctgcgcgacgcgatcctcaagcgccaggccctcgaccgcctgatgatcggcttcaacggtaccagcgccgcggctaccaccaaccgcgccgccaaccccctgctgcaggacgtgaacattggctggttccagcagtaccgcaacaacgctccggcacgggtactgaaggaagggaaggccgccggcaaggtggtagtcggcaacggcgccgacgccgactacaagaacctcgacgccctggtgttcgacgtggtcagcagcctgatcgatccctggcaccgccgcgacccgggcctggtggtgatcctcggccgcgagctggtccacgacaagtacttcccgatggtgaacaaggaccagccggcaaccgagaagatcgccaccgatctcatcctgtcgcagaagcgcatgggcggcctgccgccggtggaagtgccctacgtgcccgagaagggcctcatggtcaccaccctgaagaacctgtcgctctactggcagatcggcggtcgccgccgctacctgaaggaggtaccggagaagaaccgcatcgagaactacgagtccagcaacgacgcctacgtcgtcgaggactacggcctcggctgcgtggtcgagaacatcgaagtcgcggagtag

SEQ ID NO: 324504 - DNA, 702 bp, Pseudomonas aeruginosa
atggccttcagtcccgccaaggcgcacttcctacgcgtgaccgccgctcaagaggcggcggccactgccccgcaccagggcatggaaggcgcgaacgcctatgagctgcagctcgcccagctgtatcaggatcgcagccgcctgaagaacatccaatccggcgaaggcaaggcagcgctcaaggtcgagctgctgccggcctaccagccgtacatttccggcgtgctgcaggccggcaagggcgcccaggacgaggtggtcaccaccgtcatgctctggcgcatcgatgccggcgattacgccggtgccctggacatcgccgactacgtgctcgcacacgacctggtcatgcccgaccgcttcgcgcgtaccgccggctgcgtcatcgccgaagaaatcgccgaggccgcgctcaaggcacagaagaccggcggcagcttcgaccttgcgaccttgcatcgcaccctcctgctcaccgaccaggccgacatgcccgacgaagcccgcgcgaagctctatctcgccgccggccatgccaccctggaaggcctttctgtggagagccccggtcaacccgggcaggtgcaagccggcatcgatctgctcaagcgcgcgatccagctgcacgacaagtgcggcgggaagaaggatttggaggccgccgaacggctccagaagaaactgaccgcctctggcggttga

SEQ ID NO: 324505 - DNA, 462 bp, Pseudomonas aeruginosa
atgagcggattcatcgccaacggcccagtcccgagcgggcacatcaacagcgatcccttctggcccaccatcgagctcgagcatgtgcgggcgaacctgcgcatcgactccagcgtcgatccggcgcgcctcgaagttgcggtcattgccgcggtgatcagcgtcaaccgcgagctgcgggcctggcgccttgaaaagagcgcggccggctatgccgaactcgcccaagtgccgtccgacaaggtgcgggacacctccgaactggtgcagctgtatctgcgcgcagtgcagtcggctaccgccgccgaagtggccgagcgctaccgctggtacgacaccaccaccaacggcaacgacaaggcccaggacatcgcaaccaccatcgacgactaccgccgcgaccagcgctgggcgatccgtgactttctcaagcgtccccgcacaacggtggagctgatctga

SEQ ID NO: 324506 - DNA, 213 bp, Pseudomonas aeruginosa
atggccgccgtcgcgatcgcccaccagaacgacaccgtcgaggcgctgtgctggcggcactacggccgcaccgccggcgtgaccgaggcggtcctcgaggcgaaccacggtctggccgaccacggccccaccctcccccctggcctcaaggtcaccatgccggacattccgacagccgccccggaacggcagatggtgaacctatgggactga

SEQ ID NO: 324507 - DNA, 354 bp, Pseudomonas aeruginosa
atggctgacctcaccaccaccgccacggccggcgccatcatgggcctcggcctgggcgtaacccttccggttgacggcggcatgctgttcggcgccctgctcggcgcctggctggccaccggcacgaagcaggacctgaaggcctggtcgcgcctgctgtcgctgatcctgccgacctgcgtcggctacctgttcgccgatgtcgccctcgcccgcgtgccctggctgaccaacctggccttctctgctttcgtctgcgccctggtggtcattcccctcagcctcaaggcggtcgcctgggtcgacaaggtcgacttcgacgacctctggcgccgcattcgaggaggtcgctga

SEQ ID NO: 324508 - DNA, 273 bp, Pseudomonas aeruginosa
atgctcatgactgccgttccgttgatcgccgccctggcctacatcgctgccgcgctgcgtctggtctgctaccagcgctgcggcgcccgcttccgccgcagcgtctcgttgctcgccagcctgctcggcgcatccatggccatctgcggcctggaaatcctgctctaccgcccaccggtcagtatctggcacgccatcgtcgccgccctgctgtgcctgctgatcttccgttcccgcggcaacgtcgccgccctgctgaggccatccgcatga

SEQ ID NO: 324509 - DNA, 807 bp, Pseudomonas aeruginosa
atgacccttcgatatggtgatcgttctcaagaggtccgccagcttcagcgtcgactgaacacctgggccggcgccaacctctacgaggacggccacttcggcgccgccaccgaggacgcggtgcgcgccttccagcgctcgcatggactggtcgccgatggcatcgccggcccgaagacactgtccgccctcggcggcgctgactgttcgcacctgctgcaaaacgccgacctcgtcgccgccggagctcgcctcggcctgccgctggcgacgatctatgcagtcaaccaggtcgagtcgaacggccaggggttcctggacaacggcaagccggcaatcctgttcgaacgccacatcatgtaccgccgtctcgccgcccacgatcaggtcaccgccgaccaactggccgcacagttccccgcgctggtgaacccccgcccgggcggctatgccggtggaaccgccgagcaccagcgcctggcgaacgctcgccagatcgacgataccgccgcactggagtcggccagttggggcgccttccagatcatgggtttccactggcaacgcctgggctacgtcagcgtgcaggccttcgccgagtccatggggcgcagcgagtcggcccagttcgaagcgttcgtccgcttcatcgacaccgacccggcgctacacaaggcgctgaaggctcgcaaatggaccgacttcgcccgcctctacaacggccccgactacaagcggaacctctacgacgtgaagcttgagcatgcctataaacagcacaccgaagcgcacaaggagacgacatga

SEQ ID NO: 324510 - DNA, 243 bp, Pseudomonas aeruginosa
atgagaaccggcgcgcagtctggggagcacttcccctacaaggagcttttggagcgcatgaccaagctttctccgactggttgtgtggccgtggtactaccgcgcgacacaccgatggaggactgccaaaagatggccgacgcgctcaagcatgtgatggctgttcctccgctggtcatctgcggtgacgtgcagtccctggatgaagcggccatgaacgccgccggctggtaccgaaaatga

SEQ ID NO: 324511 - DNA, 462 bp, Pseudomonas aeruginosa
atgacgactctccgccaggccctatacggcgccgccctgctcagcgccctcggcctgctcctgtgggtgcagcagcagcgcatcgacctggcgcaggcccgcctggcccaggccgagttggcgaggaaagccagcgacgcccaactttcccgccaggccgacaccatcacggccctcgaggccgccctttcccgcgagcgtcaggcccaggccgatctggaccaacagcggcagcagctgcgccaggcgctggccatccgcgaacgcttgatcgaggacctgaaacgtgacgatgaaccctatcgccagtgggctgaccagcctctgcctgatgttgctcgccggctgcaacagcgccccgctatcaccggagcggccgcttaccatcagtggctgtcccgccgtgacgccctgcagcctggagtcagcggcaccgaaggacaacggcggcctacagactga

SEQ ID NO: 324512 - DNA, 537 bp, Pseudomonas aeruginosa
atgaacaagcccgatagcctgaaggcacatctgctcgccgccgtgccggaactcaggaacaacggcgaccgcctggtgatattcatcgacaatggcagggtccgcagcacctcggccgagagcctgtccttcgaatacgcctatgaccttcaagtgatcctcaccgacttcgccgggcaccccgacagcgtgtttctgccgctgctcggctggctgctggtgaaccagtcggatctgctggccaacctcaccaaggtgcaggacggcatcaccttcgaggccgacatgctcgaccgcagcaaggtcgacctcggtatcgttctgccgctgaccgagcgtgtcgtcgtcaagcgccgcgaggatggccgctacgacgtgagtcacccggaagagccccagctcaccgaggccatcgaggtcgatgggccgatgcagatgctcgccaacggcgagctgctggccgagtggacgccgccgacgcctaccgaggccgtcatgctcgagacgccgcagatcaggcgcccggccaatggctga

SEQ ID NO: 324513 - DNA, 459 bp, Pseudomonas aeruginosa
atggctgacagcctcgaggctctggaagactgggcagggccgattctccgcgccctcgagccaggccctcgtgctgccctcgcgcgttcgctcgcccgcgatctacggcgcagccaacagaagcgcgtgatggcacagcgcaaccccgacggcaacgcctacgagccacgcaagaagcgcgaactgcgcggcaagcagggccgtattcggcgcaagatcaagatgttccagaagctgcgcacggtgcgctatctgcgcgccaagggcgacgcccaggcgatcacagtttccttcgccggccgggtcacgcggatcgcgcgagtccaccagtacgggttgaaggatcgcgccgagcgtggcgccccagaggtccgttatgcacagcggcgtctactcggtttcaccgaagccgaccttgagatgatccgtgaggggctgctcgctcacattccagcctga

SEQ ID NO: 324514 - DNA, 573 bp, Pseudomonas aeruginosa
atgaacgacttcgccgccctctcccgcatgatcgagaacctgatccgcctcggcaccatcgccgcggtggaccatgccgcgcagcgcgtccgtgtgttgaccggtgacctgctgaccggctggctgccctgggcatcgccgcgggccggcgccgaccgcgaatggaacgcccccaccctggacgagcaggtactgctcttcagcccatccgggcagaccgccaatggcgtggtcctgaccggcttgttcagtgacctgatcccgcccaacggcgaccgcgacgccctgcatcgcaccacctaccgtgacggcgcggtgatcgagtacgacagcgccgcccaccacctccgcgcagttcttcccgccggcggtaccaccgagctcatcagcgacggcggcatccgtatcgtcggcgacatcacccaccaaggcgactacatccagaccggcaaccagaccgttaccggcaaggtcaccgtgagcgtcgacgtgatcgccaagggcatcagcctggtcggtcatacccacggcggcgtcatgccgggcggcgctacgacggggaaaccgcaatga

SEQ ID NO: 324515 - DNA, 345 bp, Pseudomonas aeruginosa
atgaacgcccataccggtggtgccatcgaccgcgcggcccacatccgccagtcgatcgccgacatcctcaccactcgcatcggtacccgcgtcatgcgacgcgaatacggcagccagttgccggagctgatcgatgctccgttcaacgacaccacccgcctgcaggtctatgccgccaccgccatggccctcatgcgctgggagccgcgcatccgcctgagccgtgtccagatcaccggccagaacctggccggccaggtgctcatggagattgacgccaccctggtggacagcaacgagccacacaacctgagcatccccctgcagatgggcgccagcgcatga

SEQ ID NO: 324516 - DNA, 915 bp, Pseudomonas aeruginosa
atgacaacgaacttcgtcgccatcgacctcagccagctgccaccaccacacgcggtggagcagctggactacgagcagatactcgccgagcgcaaggcctacgccatcagcctctggccggaggatcagcaggcggaaatcgccgcccgcctcgccctggagtccgaaccgctgaccaagctgctcgaggaaaacgcataccgcgaaatgctctggcgccagcgggtcaacgaggcggctctcgccaacatgctggccagcgcccagggcgctgacctcgaccagctcgccgcgaactacaacgtcaagcgcctggtcatccagcccggagatccgtcgaaggtgccgcccgtgcaggaactgttggagtccgacgacagcctgcgcgagcgggcgcagatggcctgggaaggcctcagcaccgcgggaccgcgtaacagctacatcttccacgcccgcgccgccgacggccgcgtcggcgatgcctcggccgtcagcccatcacccgccgttgtcgtggtgacggtacaggcagcccagggcaacggcagcgccccggcggacctgctggacatcgtcgacgcatacctcaacgacgccgaccgccggcccgtcgcggaccgcctgacagtccagtccgcccaggtgctcgagtaccgtgtcgacgcgacgctctacctggccaccatcggcccggaatccgagccgatactcgatgccgcccgggcccgcttgacggcatacgtccatcagcgtcgacgcctgggcatggaggtgtccgagtcggcggtgcatgcggccctccacgtggagggcgtgcgcaaggtcacgctcagcaactggtcggacatcgccgctacaccggcccaggcgccctactgcaccggaattacgctgacgctgggggatgagtga

SEQ ID NO: 324517 - DNA, 537 bp, Pseudomonas aeruginosa
atgcccagcttgctcccacgcaacgccaccgagttggagcgcctagccgccgaagccctggcgcagatcgagcgggtaccgatcccattgcgccaactgtggaaccccagcacctgcccggtcgctcttctgccgtacctggcctgggcgttctccgtcgatcgctgggacagcacttggccggagcgtgtgaagcgccaggtcattcgggatgcctatctcgtccactcccacaagggaaccttgagcgccctgcgccgcgtggtcgaacccgtcggctcgctgaccgacatcctcgagtggtggcaacagacccccaccggcgtccccggcaccttcgaaatcaccgtcgacgtcagcgacaacggtctcgacgaggagaccgtgctcgagctcgagcgcctgctcaacgacgtgcgcccagtcagccgacacctgacccgcctggacctgcgcatcacgccggacatcctggcccgccacggcctggcgacgatcgacggcgacaccctggaaatcagcccctggaagcagtga

SEQ ID NO: 324518 - DNA, 2391 bp, Pseudomonas aeruginosa
atgacgactcccaagtacggcggcctgctcaccgacatcggcgcggcagcgctgatcgcggcgagcgaagccgggaagaagtggcagcccacccatatgctcatcggtgacgccggcggcgcgcccggcgagacggctgaccccatcccctcggccgctcagaccaagctgatccgccagcgctaccgcgctcaactgaaccgtctgttcgtctccgagcaaagcgcaaacgtgctggtcgccgagctggtactgccgatggccatcggcggattctggatacgggagatcggcctcgaggacgccgacgggaagttcgtggcggtcgccaactgcccgcccagcttcaaggccagcgtcgagagcgggagcgcgcgcacccagaccatccgcgtgcagatcatcctatccggcatggagcacgtcgaactgatcatcgacgacggcatcgtctacgccacccaggactgggtgacggcgaaggttgccgcggacttcaagggacgcaaggtgctggccggcaacggcctggtcggcggtggcgatttgtctgcggatcgcaccatcgccttgccagcctccggcgtgggtgccggcacctaccgtgcggtcaccgtcaacgccaatggcatcgtcaccgccggcagcaacccgaccacgctgggcggctacggcatcactgacgcactgcatgccagcgaggcggtcactaccccgacggcgaacaagctgctcaggctgaacgcggccgggctactaccggcctcgattacgggcaacgcagccactgccagccggcttgcagcgcccatcacgctcagcgcgagcggcgatgcaacgtggtcagctcggttcgatggagctacaaacgtcaacggagtcctgacgctggccaactccggcgtcaccgccgggacctacgcgaaagtcacggtgaacgccaaaggactggttaccggagccactgggcttgtagcgagtgatattccggcccttgatgccggaaaaatcacctctggcatcttacctgctgccagaggcggtaccggcaatggtattggtcaggctgcaacggctgtcaaactcgccgcccctcgtacgatctacctcggtggggacgccagcggctcgacaacgttcgacggtagctcaaacgctggaataacggtcacgctggcgaactcgggcgtaagtgccggctcctaccccaaagtcaccgttaacgccaaggggctggttacggggggcggtggcctgacggcagcggacattcctgcgttggatgcgtcgaagattgctaccggccgactcgatcttgaacgcttgccgttggtctctcagggactggctacggctgtgcataccagcgttgatcccaactcggtagtcattccgctggtactgaccaaccacgcgaatggcccagtggctggccgctactactacatccagacgatgttctacccgagcgtcgaaggcaacgcgacgcagatcgcaaccggctatgccggcgtggctgacatgtacgttcgttatgcctacggctcccccgcaacgaccgatccttcgaagcgagagtggtcagcctgggtccgctgcgatctgggaggggcgttcgctcatgcgccggatggcgtactgggtggcggagtcaacttggattcaatgattgcgtcgggctggtggcatcaaccgttcagcgccaacgcacagaacggcgcgaactatccggtgggcgaggccggcatattgacggtgcatgctccaacctcctcgatgatctatcagacctatcgtggctatgccgctggcggtctgtactggcgctgcagatacaacggcacctggggaggatggttccgggcatgggactccggcaacttcaacccatcaaactacttggcgaagtcggaatactcctgggcgtccttgcctgggaagcccgcgacgtttccacccacggcacacatccacgacgccagccagattacgtctggcatcctgccgctggctcgaggcggccttggggcgaacaatgccacgacggctcgcagcaacattggagcaggtgctattgccaccgcgagtagagggggcaatggatggttcaaggacaatgacacaggacttatcttccagtggctccacttgcctgtgggtgatcaccccggtggcttcctggacaaagtcgtgacgtttcctacgcctttccccaacgcgtgtctgcacgttattccaacagtaagagagttgggacggccagccacttcggcctcaacggttacggttgcggagaaggctatgtctacgacgagcgtcaccatcgtgacgaccgagtacatcagcaccgtgcagaacttcggcatcaacgttttcgccatcgggtactga

SEQ ID NO: 324519 - DNA, 462 bp, Pseudomonas aeruginosa
atgaccgactacatgttttcaccgagcattgtggcgttctaccccgtttccatgcgcgaagcatacgaggtcagcggcagttggccggaagacggaattcttgtcagcgaagaggttcactccaggatcatggacgaacagagtgctggcaggattatctgtgcgggtcccgatgggcagccgatgacgaaggagccaccaccgcccaccgttgaggagcaagccacaagagagcgagtctggcgaaatcagcagttgaaagacacggataccctgatcatgcgccatcgcgacgaactcgagtttggtacaacgacgctcagcgcggagcagtaccaagcgctgcaggtataccgccgccagctacgcgactggccggagctcggcgcgtttccgctcgctgagcacaggccgaccgcaccggactggctttatcaccagatcgaagacggcgtcttgtag

SEQ ID NO: 324520 - DNA, 1176 bp, Pseudomonas aeruginosa
atggccgctgaccaataccatcacggtgtccgggtccaagagatcaacgacgggacccgccccattcgcaccatcgccaccgcgatcatcggcctggtagccaccgccgaagacgccgacgccaccgcctttccactcgatacaccggtactcatcaccaacgtgcaggccgccatcggaaaagcaggcaccagcggtacgctacccgcaagcctgcaggcaatcgccgaccaggccaacgccgccacggtggtggtacgggtgaagccgggcgaggatgaagccgcgaccaatagcgccgtcatcggcggcgtcagtgccgatggcaagtacaccggcatgaaggccttgcttgccgccaaggcccgcttgggcgtggtaccgcgcatcctcggcgcaccgggcctggatacacagccggtcgctaccgcactcatcgccatcgcacagcagttgcgcggcttcgcctacgtctccgccaacggctgcaagaccaaggaagaggccaccgcctaccgcgagaacttcgccgcgcgcgaagccatggtgatctggccggacttcctgacttggagcaccgtggtcaaccagaccgtacctgcgccagctgttgcccaggccctgggcttgcgcgcccgaatcgatcaggaggtcggttggcacaagactctgtcgaacgtcgccgtcaacggcgtgaccggcatcagcgccgacgtgttctgggacctgcagagccccagcaccgacgccaactacctcaacgagaacgaggtcaccaccctggtgcaggaagggggattccgcttctggggttcgcgcacctgcagcgatgatccgctgttcgccttcgagaactacacccgcaccgcccaggtgctggccgacaccatcgccgaagcgcacatgtgggcggtcgacaagcccatgcacccgtcgctagtgcgcgacatcctcgagggcgtgaacgccaagttccgcgaactcaaggggcttggtttgatcatcgatgcccaggcctggtacgaccccagcatgaacgacaaggacacgctcaaggccggcaagctgcgcatcgcctacgactacaccccggtgccgccgctcgaggacctgaccttcttccagaagatcaccgacagctacctcgtcgacttcgccagccgggtcaatgcctga

SEQ ID NO: 324521 - DNA, 516 bp, Pseudomonas aeruginosa
atggccatgccgcgcaagctcaagaacatgaacctcttcaacgacggcggtagctaccagggcctcgtgaagtcctgcaccctgcccccgctggcccgcaagatggaggccttccgcgggggcggcatgaacggcccggtcaaggccgacctcggccacgacgacgacggcatccagttcgagtggaccgtcgggggcctggagctgaccgtcctcaagcagtacggcgcagtcagcgccagcggcgtgatgctgcgtttcgccggcgcctaccagcaggacgataccggcgcggtcacgtccgtcgaaatcgtcgtccgcggccggcacgagaccatcgaaatgggtgacgcccagccaggcgaagacaccgagcacaagatcaccaccacctgcagctactacaagctcgtcgtcaacggcgaggaagtcatcgagatcgacctgctgaacttcgtcgagaaggtcaacggcaaggacctgctcgaggcacagcgcaaggccatcggcctgtaa

SEQ ID NO: 324522 - DNA, 330 bp, Pseudomonas aeruginosa
atgaaaaccgaacagactcccgctgacctgcagaacgctcccgacaacgtcgtcaccctcgaccagccgatcaagcgcggcgcccagtccatcgaatcgctcaccctgcgcaagccctcatctggcgaactccgcggcctgcacctgctcgacctgctgcagttcgacgtgactgcgaccatgaaaatcctgccgcgcatcagccagccgaccatcaccgagcccgaggccgccggcatggacccggctgacctgctcgcctgcggccaggtgatcgccggttttttgctgcagaagcgggcgaaggcggcagcctccctgatcgcgtag

SEQ ID NO: 324523 - DNA, 2760 bp, Pseudomonas aeruginosa
atggcgaatgacctgcagctgcgcgtgctgctcagcgcgatcgacagagccaccgctcccctgcgtcgcatcatgcaaggcagcgacgcgacggcccgggcgctcaaggcaactcgcgagcgcctgaagcagctcaacgctcagcagagcgacgtgcgcgcattccgcacccagcgcggcgccctggagcaggtcagcaccgcgctggccgcgcaacagacccgagtgaaagcgctggcccagcagatggccgccgccggcaaccccacccgtgcgctcacccgcgattacaaccgggcaatccgtgaagccggcttcctcaagcagcagcacctgcagcagagccaagccctgcagcaactgcgcacgcgcctcagcaacgccggcatcagcacccgcaacctcggccagcatgagcgcgacctgcgcgcgcagatccaggcggccaatggcgccatcaacagccaggcgcagcgcttacgcaacctcagccagcagcaggagcgcctgacccacgcccgcaacacctacagccgcggcatccagagcgctgccgcgctggccggcaccggcatggcggcgcgcgcgacgggcatgtacaccggcgacaagctgcggcagatgctcggcgtgggctacgagttcgacgcaacgatgtcggccacccaggcggtgacccgcatcgagcgcaaggacgatccgcagatgcaggcgctgcggcaacaggcccgcaccctgccactctccagcaagttcaccgacaaggaagtcgccgaaggtcagtacttcctgggtcgcaccggctacaacgcgaagcagatcctcggcgcaatgcccggcatgctcaacctggccgccgcgggcgatatggaccttggtgccagcgccgacatcgcctcgaacatccagacggccatgggtattccagccgagaagatggaccaggtggccgacgtgctgactgcggcattcacccggaacaacgtcgacatccgcatgctcggcgactcgctgaagtattccgccggcgtcggtcgtgagtatggccagagcttggaaaccgtgactgccgcgacggctctgctcggcaacgcaggcgtacaaggaagccaggccggcacctcaatgcgctcggtgctcactcgtctcggtctttccaaggccgtggcccaactgggcgtgaagacccaggacgctaacggcaacatgcgcgacatgctggacatcctcaaggacatcaacgacaaaacgaagaagatgggaaacatccagcgtggcgccatctacaaggacatcgccgggcagtatgccgttaccgccttcggcacactgatgcgagcggtggaaagcggccagttccaatcgatgcgtggcagcctggataactccgagggcgaggctgctcgggtcgcgtccacccagttggacaacctcaagggcgacatgaccatgctgcatgccgccctggaaaacatttcggtcgagctgttcgacaagaacagcccatggctgcgcgagctcgccgccgacctcagtcacctgctgcacaacgtcggcgaattcctgaaggccaacccgcaagtcagcaagggcatcgtcatcaccgtcgccgcgttctcagcgctgatggccaccgtcggcagcctggccatcaccctcgccggcatcctcggcccgatgatcgcggtccgcttcatgctcagcaccatcggcattcgcctgcccggtctgatcggcttgctgaaactgctgttcgcaccgatccgcatgctggccggtctgttgatcggcccactggtgaccgccctgcgcgtcgtgagcatcgcgctgtggggcctggcggccaacccggtggtcctggcaattgccgccgtcgtcgcggtgctggccggcgccgcgtacctgatctatcgcaactgggacgccgtcaaggcgtacctactggggctgtgggaagagatcaaggcaggtttcgacggcggcatcgggggcattctttcaaccctgatgaatttcagccccctcggtctgatctaccgtgcgttctccggcgtcctgggctacctgggcatcgatctaccggcacgcttcaccgatttcggcaacatgatcgtccagggcctggtgaacggcctgctcgccggcatcggccagatcaagcgcgcggtccagcgcgtcggcggcgccgcgatcgactggttcaaggacaagctcggcatccattcaccgtcgcgggtgttcgccgatctgggcgggttcaccatggctggcctggctcagggcctcgacgccggccaggccggcccgctgggcgtaattgcgcgtatcggccagggcctggtcaacgcagggcgccaggctgtcgccggcctggacagtgatctgacccgaagcgcccgcccgacgatcaccccgccggcagtggtgaccgaactggtcgcggcccagcgccaacgctcgccgacgttcgaccagccgctgctggccatgctgggcgacctgggcaagagcgccggcgccatcggtgccctggtgctcggcgccagcgccccagcgcaggccatcacaatcgacaaccgtcccccggtcagctcggcgcaagcggcagtcagcatcggcggcgacacctactacatcaccatccaggccggcccgggcagcgacgccgcagacctgaaacgcacgctcagccaactgctggacgagcgcgaacgcaacaaggcggcgcgcctgcgcgcccgcctgcaggaccgggagtaa

SEQ ID NO: 324524 - DNA, 441 bp, Pseudomonas aeruginosa
atgatgctgtccctcgggatgttcgtcttcagcctgcacacgctggcctaccaagagttccagcggcagaccgagtggcgacacgccagcagcagccgcatcggtgcccagccggcgcgccagttcgtcggtcgcggcgacgacacgatcaccctgcccggcgtgctgctgccggagctggccggcagcgcgttgagcctggacgtgctgcggcagatggctgacaccgggtcggcctggcccatggtcgagggcaccggacgcatctacggcctgtgggtgatcgagcgtgtcaccgagacgcggacactcttctttgccgacggcaccccgcggcggatcgagttctccctcgagctcaagcgcatcgacgacggccgcaccgatctgctcggctcggtcctcggtaccgccggcaacctgctgagacgcatcctgtga

SEQ ID NO: 324525 - DNA, 1275 bp, Pseudomonas aeruginosa
gtgatcgatgccgccctcgcccgcgtgacgggctacctgaccagcgccgtcgaccagctgcagcgcgacgccggctacccggtgccggtgttccggctcacggtcgacggcaacgacatcgcccagctcatcagcccacgactgatcgccctggacctgaccgacaatcgcggcatcgaggccgatcagttgagcgtgacactcagcgatcatgacgggctgctcgcgatccccccgcgcggcgccgtgctgcacctctggctgggctggagtgacagcggactggtcgacaagggcacctacaccgtcgacgaaaccgagcacagcggcgcgccggacgtgctcagcatccgcgcccgctcggcagacctgcgcaagggactgaaggtcaagcgcgagcgcagctggagcagcccgaagacgttgggcgacgtgctcaccgacattgccctcggcaacaacctgaagccggtgctcgcgccggcgctggcgggcctgccgatcctgcagctagaccaagccaacgagtccgacgccaacctgctgacacgcctgggcgaggacttcgatgcggtggccaccgtgaaagccggctgcctgctctgcctgccggccggcggcggcaagactgccagcggcctggcgctgccgcacatcaccctcacccgccaggatggcgaccagcaccgctacctgcaggccgaccgcgacagctacgacggcgtgcgcgcgtacttctacgacgtgaacagcgcgaagaagcaagaggccatcgccggcgccaagggcgacaacctgaaggacctgcgccacacctacagcgaccgccagagcgccctgcgcgccgcccgcgccgagtggaaccgcctgcagcgtggcagcgccacgctcagctacgtgctcgccaagggccggccggacctgatcccggaactgacctacaccctgcagggcgtgaagacggagatagacgcgatcatctggtacggcggcaatgtgcagcacagcctcagcgccgatggcggctacatcaccagcctggagctggaaagcaagttgcccgaggacctggtcagcgacctggccgacgacaccggcggcgactacaccggcatcatcgcttactaccgcgacgggaagagcgggacggagaagaacgtcactgcgggagaccagagcaagccacgccgcctgcgctacttgtacagcaccaaggccagtgcgaagcgggctgtcgatcgggaatggggaagaatgcagaaaataaataggtga

SEQ ID NO: 324526 - DNA, 1002 bp, Pseudomonas aeruginosa
atggaagtgcatagaacagcgacgttttacgatttgaagctaacagcgaaaggatacagtcgatcagaagagtatgctgccgattttgaagctgctccgaaaactcttttggaattgtatagctttatcaaacaggtatttgatggtggtgatcagataatacagaaggggcgtaccgaaaaatcggtaaagcactaccttgctgatatggagttgcgtgatactaagttagttttgttggttaatagaagtgatcctacagcgcctgatgctgtttctacggacccagaaaataaaagtcgtgtagttcataaaaagccacccaaccatgggggagacttttctgctcatgttgttatagagttgaaaccggttaagggcgataattactatctttgtgttattgaaacggtctatggctccggtctgcatgcaagtgccgtagcaggatacattaggcatgttattcggtattgtaaaaaacagttcccggaggagttcaagatcgcccacataggtggggttaaggataaatctggggctcaggttatggttagtcatttgcactatgtcgagctacaaggacatccctctgaagagtttgagaaagatcttgagggtggaaccctcggtgatattgaacttttggatttctctgaaaagggtgctgagtgggacgagcaaggtgaaattctagaaaatagtcggatcgtcaaactatcgcctcagaaaaaaattataggtgatctgaagaaggttatcggacaagttcggaatagggccttgaagaaagatgatgcttcttattttcaaatgaggattagatttaaaaatgagaaagaggagccgagagaggctactatttcgactgatactggctatctgatagatgagaagaaatatgtaaagaaacatgtaattagagcggaaatcgtaaatactgctagcttggaagtcattagcaatgttattgttaaggaagtcatcagtttgatggagtaa

SEQ ID NO: 324527 - DNA, 207 bp, Pseudomonas aeruginosa
atgctcagaggcgcatctgtgaaagtggctcatgatggggcagagaacccccgcgagcaggccctgctggcactctggcgcgaactggacgagggcgagcagcgagaaatacagcttgctgctgaggaaaagaaacgtctgaaaattctggagcagcgcctcgcggagctggaggccgttgtcgctgatgccaaaaggctggcatag

SEQ ID NO: 324528 - DNA, 231 bp, Pseudomonas aeruginosa
atgacccctaatcagatccgtgcacgtctcgtcgaaaagggcagcagctaccgaaagttcgcgctggctcgcggctacgagccgcgcaatgtcacccaagtggtggctcgctgggcaggagcggaacgtttgcccaacggtcgcctcgcctacgcgattctgaaggacctatctgaagagataggtgccgatgtcgtccccggcattcgccaacccacaaccgaacagtaa

SEQ ID NO: 324529 - DNA, 534 bp, Pseudomonas aeruginosa
atgaccgccgccctggggagacaccagaagatgaaacgcccgctcctagaaacgcggcgccaggtggtcagcgcgatcatcggcgcctaccccggcggacgcgaatgcgccgccgcccgcctgggcctcgacctgaagaagttcgacaaccacgcctacgagaacgccggcagcaagccgctcagcgacgaccagttgcgcttgctcgagcaggaaaccggcaccagccacttccccgagtatgtcgcccacctgtacggcggcatgttcgtgcagatgcccgagccaacccaactcgacaatctcgacctgtacgccaggggcgtcgccaccgccatcaggcgcggtgaggtcgaccgcatcatcgccgaggcgctacgcgatggagagatcgacgaggccgagctcgccgaaatcatcgtcgcccaccgcaaacacctcgcggcacggcacgccgaagtgggcgccgtgatcaccctgcatcggaaagccccgcacggccagcgcgtaagcggctcgggagagcacgaatga

SEQ ID NO: 324530 - DNA, 279 bp, Pseudomonas aeruginosa
atgagcacctacaagctggtttgcccgcactgtgcgtcgaggatgcgcatccgcaccagcgatgggaagcacatcttcctgcgggtcgcctatctgcaatgcaccaacgaggcctgcggttggtcggtgcgcgctgagttcgaaatgacccacgaaatgagcccgtccggcatgcctaatccgtcggtatacctgccgccggcacccacggcgctgcgccgcgaggccatgcgtcaacagggcgacaaccagctcgaccttctggaggccaccgcatga

SEQ ID NO: 324531 - DNA, 360 bp, Pseudomonas aeruginosa
atgaacgtcaccccgttcacccagcagcaagccgacgactaccgcaccttcatgcaacaggccgcgcgccgcttcatagagaagcacgccgccgagcatctggacgacgacggtctgttcgagcgcaccgtcagctacctagtcaactccctcgacgttccggccttcatggcggggcgcctggcgttgctggccatgagcgagcgcctgcccaaggggttggcctgggtcgccttcgacatggccgctgggcctgaccagagcgtgcgcatggtcctggaccgtcgtaccggccagatgaccccgctgccctctcgcttcttgcctcaccgattcctggccgctccggccacccactga

SEQ ID NO: 324532 - DNA, 234 bp, Pseudomonas aeruginosa
atgccagacgccgtttcgatccagttcgacatgcccaagccggtagcagaagccctgctcaccagccttcgcaccgaactccgccgcggcctggtccagcactggtacgacgaccgctaccgcacggtgccggaaggcctgcgcagcagccggattctcgacgactacccggccctcgccggccagaaacgcaccataggcgcgctccgcgccgcactcgccgccaacctgtaa

SEQ ID NO: 324533 - DNA, 2724 bp, Pseudomonas aeruginosa
atgacgatgcacgaaaaactacgggcaaaggtcctgccaaagctggaagccgactacggcctcaagcacatgaaagggaccaacttcatgcgcaagggcaaatgcccggcgcacaggtgcggccagagaacgctgtacaccttcttcgactcgccctggatgctgatctgcggccgcccggaggcctgtgaccatcgcgtgcacatcaaggacgtctacccggagttgttcaacgactggagcgaccaggcgccggctacccccgacaaccctaccgccactgcccgcgcctacctggagttcgcccggggctttcgcctggaactcatcgatggatggttcacccaggagaactactgggacaacaggctcaagatcggcagcgccaccgttcgcttcgccctggaaaagggcggctactgggaacggctgatcgaccggcccgagcgcttcggcaagcagaaggcccgcttcaagcagggtgagagctataagggtgtctggtggtgcccgccgacgctcgacccgaccgaggtcgacgaactgtggatcgtcgaggggatattcgacgccatcgccctgatgcacaacggccgcgcggccgtatcgatgatgtccagcgcgcccttccccgccgaatccctcaaggcgttgaagaagcgctgccaggacgaagacaagcgcatgccgcgcctgatctgggcgctggacaacgagccagtcgccaaggccaacgcccggcgctgggcgaaggaagcacgcgaactgggcttcaagtgcgatgccgcggtcatccctcagcgcggcgccaagaaaatcgactggaacgacctgcaccagcgctgggcgttcatcgagggtgacgacgcacgcaccaagcgcgtcgagatggacctcgaggaggcccgctacgaaggctccctgctgctggccgagacggccgaggaaaaggggctgctcatgtattcctggaacgagcgcaaggagtttcacttctcgttccgctcgcgcctctactggttcaagctcgacatcgaggcctacgaccgcgccatcaaggagctggagagttcggagaacgcggaagaccagttgctcaacgacaagcagcgccgcgagagggcgctacgccgggccggttccgtggttcgcatcggcaactgctacttccaggcgctctatttcatgcgcaacgagcagaccgacgaggcctggtactacttccgcgtggagcgcccggacgcgccgaccgtcaaggcgaccttcacctcagcccagatttccgcctcggccgagttccgcaagcgcctgctgaacgtctgcaacggcgccatgttcaccggcaccccgcagcagctggagcgcatgctcgagccccagctcgatcgcctcaagtccgtgcacaccatcgactggatcggctacacccgcgagcacggcgtctacgtcttcaatgacctggcgatcgctggcggcaaggtccacaagctgaacgaggaagacttcttcgacatcgaccgcctgagcatcaagagccagagccagtcgccggtgctgcacatcaacccggacctcgccgcctacaacgaaggctggttcgagatgttctggaagtgcttcggcgtgcgcggggtggtcgtgctggcctggtggctcggtgcgctctacgccgagcagatccgccagattcacaagtcctatctgttcctggaactgatcggcgaggccggctccggcaagaccacgctggtggagctctgctggaagctgaccggccgcaccgagtacgaaggcttcgacccgtccaaggccacccccgccagccgcgcgcgcaacttcgcccaggtcggcaacctgccggtcgtgctgatcgagtccgagcgcgagcagaaggaaggcgcgccggtgaagcacttcgactgggacgagctcaagaccgcctacaacggccgcagcgtccgctccaccggcgtgaagaacaacggcaacgacacccgcgaaccaccgttccgcggcgccctgctgatcgcgcagaacaacgccgtcaatgcctccgagccgatcctgcagcgcctggggcacgtcaacctgacccgcgagcaccagaccccggagaccaagcttctggccgagttgctcgagcgcatgccggtggagcagctcagcggcttcctggtgaaggccctgcagcccgaggccaagatcatggcgctgctggacgagcgcacctccggctacgagcaggaactgctggccattccgggcatccgcaccgtgcggatcgccaagaaccacgcccaactgcgcagcctggtggactgcctgcagctggtggtaccgctggacggcgaacgcgcccagttggttcacgccgaggtcagccgcatggccctggagcgtcaacaggcgatcaacgcggaccatccggtggtgcgtgagttctgggacctcttcgagttcctcaacgggccgctgaacgaactgcccggcaacctcaaccactcccgcaagaaggagttcgtggccgtgaacctcaacgagttcatcgaggtggcggcgaacaagcggcagcaggtccccaacctgggcgagctcaagcggctgctcaagaccagcaagtccccgaagttcatcgaatccaacaaggccatcaactcgggtcgccaggtcgacgcgttcgacaagccgaagaccgtccgttgctggctgttccaactcgtctga

SEQ ID NO: 324534 - DNA, 141 bp, Pseudomonas aeruginosa
atgcagaacgatgaaaccccgctctacgaacacagccgcggcgaatggattgccacgctgacgctcaccggcctgaccctggtcgtcctggtcatcgccggctactacaccccggccgtgctggccgccgtcatccactga

SEQ ID NO: 324535 - DNA, 732 bp, Pseudomonas aeruginosa
atgcaaaagcacttcacgatcacccaggcgatgcgcgaagaagtcgccgaccggctcaccctgcaggccgttgcgcagcacggaccgcgcattgcggcggacctccaggcgctcaatgaccagttctggtcgaagcacaacgcggcggtcgaggctctaccgggcctggacaaaaagcactgggcagacctcatcgttgccggcgcactggcctccgtcatcaagtgcgacgtctactacatgaaacctcgggacggcatggagccgacccgctgtggcctgcacctgatctatcacgagtacaagggtgaccggcgcaacgccctggtgcaacggatcatcgactcgccggcctatgcgggcgtgaaacctttcgtcgagcgcaacgctcaccacgaccgccattggtccctacgactgacgaatccaaacggctccgttccgcgcttgagagggatggacgtcctcaccgacccagcccacgaaacgctggccctgctctgcagcgaagacctgcaaggcgtgatgaaaggcgccgaggcattccgcgcgcaggccctggacgtgctgctcgcctgccgcacctcccgccaggtcgaagacctcttccccgaggccgccaagctgctcccgcagcctgtgaagaccgagcgagcgctcgcccccaccgaactggccgcgaacgtccgcgggatgctcaacgccggcgtgccgccggtcgtggcggcgtga

SEQ ID NO: 324536 - DNA, 342 bp, Pseudomonas aeruginosa
atgaatggataccaacgctggcaggcagaccttgcccgtatagccgcagaggaagccgagagaccggccattcgtgccgccggcatggaagcactgcagcgccttctgccagtggcgcagcgcgacaccggacagagccgcatcgtcgggcgcttcctgctgagcctctacaacggcaacgccttccccttctgcctcaccgatctgcgcggcctggatacccagctctgggaagactgccttgcgctgctgcggcttgaccgccggccggaggtggaaattcaccagtacgtccaggacggcgagcacatctggtccgccctcaaacatgcctgggcctga

SEQ ID NO: 324537 - DNA, 441 bp, Pseudomonas aeruginosa
atgcaagtacaaacccccgaagtcggcgccgagaaggctagcacaccacgctatgacaccatcgtcatccgcggcgccaccggcaaagacgtcccgagggaagtagacggcggagaggtggtcagctgggcacgcggccatgaactggcagccggcgacgccctgctggagttcgtcaactacgtggccgatggtgattgcggcatcaccccggagctgagcaccaaggcgcgtaaggcgctggatctgatggagcgtcgcagcaggttgggctgggaggcggacgaacagccagaggattggccggcgtcggttaaccgtgcagcacaaacggcccgcgaagtgttcaacggctcccacgaagacgccatccaggcgattgagtacatgcatgccctgctgctgcaggctgcccctgtcgtgcaaggcggtgacgtatga

SEQ ID NO: 324538 - DNA, 177 bp, Pseudomonas aeruginosa
atgaagccctgcacccttggcaagcgccacagctggacattcgtccgcaacgtcgtcaccagccacctgagcggccgtttcggccgcatcaccaagcgcgggttctaccgctgcgaatgcggcgccgagaagtacggcaacgccggcgacctgtccgggggtagcacccatgcttaa

SEQ ID NO: 324539 - DNA, 1911 bp, Pseudomonas aeruginosa
atgcttaagcgcaccctctaccacttccacttctgctgcggcctgggcggcggcgccaagggcttcaatagggcacgcccgcgcgtgggcaacgtcgaagctcagtgggaatgccttggtggcatcgacgtggacccggccggcctccgcgacttcgagcgcctggccggcgtcccgggcaccctgctggacctcttcacccgcgaccagtacgtgcggttccacggcaaggagccccccgcaggctggcgggaggcaaccccggaggacatccgccgcgccgcccagggcaagcgcccggacgcggtgttcatctccagcccctgcaagggggcctccggcctgctgtccgagaagttgagcctcaccccaaaataccaggcactcaacgaattgactctgcgctgcatctggctgatgggcgaggcatgggctgatgacccggtgccgctgatcgtcttcgagaacgtcccgcgcctggccagccgcggccggcacctgctggaccagatcaacagcctgctcggcggcttcggctacgccgtggcggaaaccactcacgactgcggcgaactcggcggcctggcgcagtcccggaagcgcttcctgcttgtcgcccgccacgtcgagaaagtgccgcccttcctgtacgaaccagagaagaagtcgctccgcgccgtcggcgacatcctcggccgcatgccgcttcccggcgacatcgaggccgccggcccaatgcaccgcgtaccgtccctgcagtggaagacctgggtgcgcctcgccctggtgcgcgccggcagcgactggcgcagcctgaatgacctggccgtcgaggacggctacctgcgcgatctgatcatcgtgccggagtaccaccggggcgtcctgggcgtgaatcactggggcgattcgtgcggcgttgtcgccggcgcgagccgcccgatgaacgggcggttctcagtcgcggatcctcgcgcgccggcaaacgccctgcagtaccagcagtacggcgtgcgccgctggactgacacctcgggcgccatcatcggcgtcaagtcgcccggccagggcacgtactccgtcgccgatccccgcggccagagcttcggcaagtaccccgtcaccgactgggacggtccgtccggcaccgtgatcgcggccagtactaccggccagggcgcattcgccgtggccgacccgcgcccaggcggcgtccggcacaacaacgtgtttcgcgtcgtcagcatggggagccacgccggaaccgtcaccggcgggcactcacccagctccggcggccaggctgttgccgatcccaggtaccacaactggcacccaggggcgagcagccgcaaattgcacgtcggcgagtggggaagcgctaccggcacggtcaccggctcccagcaggtggccagcggcgcgctgtcgatcgctgatccgcgcgtgctcgatcgcaccaagggcgacgcctacctgaccggcggccattacggtgtcgtcgggttcgaccagtccgcgggcgcggtatcggccagtgctcggcacgacaatggcaggtggagcgtcgccgacccgcgcatgccggcggcgaacgaccggctgacctgcatcatccagtcgctggacggcacttggcaccggcccttcaccaccctggaactcgccgcactgcagagcttggtcgaccccgaagagcagttggtcctcgacggcctgagcgacagcgactggcgcgagcgcatcggcaacgccgtaccgccggccgcggccgaggccatcgccggcgtgatgggcaccaccctgctgctggccgagcagggcgaaaccttcatgctcagcaatacgccgatctgggtgcgcccggttgcggtggcgctgagcgtcgcgcaacaggaggtgcagcaatga

SEQ ID NO: 324540 - DNA, 1233 bp, Pseudomonas aeruginosa
atgaaagccctttccccgcgccagagtgacatcttcgccgccggcgcccagcgcctgcagatgaccgagagcatcgaactgaccatccagagcatgcaggcctacggcgccgaccatgagcactgggctgtggcctggtccggcggcaaggacagcaccaccacgctaacgctgctgatctggctgatcgacaccggccgggtcaaggcaccgaagacgctgaccgtgttctacgcagacacccgccaggaactgccaccgctggccatcgcggcacaccagatcatggacgagttgcgggaccgcggcatccacgtcgaggtggtatgcgcaccgctcgacaagcgcttcatggtctacatcctgggccgcggcgtgcctccgccgaacaacaacaccctgcgctggtgcacccgtcagatcaagatcgatccgatgcagtccgccctcgagcagcgcctggccgcgctcgacgggaatgtgctgatgatcactggcgtgcgccagggcgaaagctccatccgcgacaagcggatcgagatgtcctgcggtacggacggtgccgagtgcggacagggctggtaccagaaggtcctgcccgaggcaaagggcctgaaaggccggctcgccaccctcgccccgctcctgcactggcgcgtctgccacgtctgggagtggctgaagcactgggctccactcgctgagttcggcgactggtccaccgcgatgatcgccgacgcctacggcggcgatgaggccgaagagatcaacgcccgaaccggctgcacgggttgcccgctggccagcgaggagaaggcgctggaaaccgtgctgaccatgccgcactgggcatacctggcgccgctgcgcggcctgaaagagctatggcgagagcttcgcgagccccagcaccgcctgcgcaaggccggcatcgagcggctgaaggacggcagcattgccgcgaacccccagcgcatgggaccgatcctgctggagtcccgcttgatgggcctggagcgagtactggccatccaggccgagtgcaacgccgcagccgaccgcctcggtcgccctcgcatcgacctgatcaacgccgaggaagagtcccgcatccgcgaactgatcgccgccggcacctggccggatggctgggacggcgaggagccgatcgccaccacccctctcgacaaaattttcgccgacggcgcggtacagccgctgctgttctgctga

SEQ ID NO: 324541 - DNA, 177 bp, Pseudomonas aeruginosa
atgcacgacttactcaagatgctggacaacccgcgcagcttactgaacttctcgctggcagttctggttgtcctggcggtgttcttcatgttgaagagcggcgcgcaagctgcttcgcaaccagcctcctccctttccacgtccacggaagcacagtcaagggggaagcaaccgtga

SEQ ID NO: 324542 - DNA, 369 bp, Pseudomonas aeruginosa
gtgaaagcactgagtattcgccaaccatgggcctggctggtcgccaatggccacaaggacatcgagaaccgcgactgggcgaccaacttccgtggccgctttctgatccacgcagccaagagcatgacacgcgacgagtacgaggaggcccgcgacttcgccgcgtacaacggcgtgaccatcccagcgccgcacgaactggagcgcggcgggatagtcggcgaggccagcatcatcggctgcgtcgatcgctgcaactcattgtggttcttcggccgatacgggttcgaactggctgacgccaagccactgccgttccagcccatgaagggccagttggggttcttcgaagttgaggtagcgcaatga

SEQ ID NO: 324543 - DNA, 204 bp, Pseudomonas aeruginosa
atgactgatcgggccaaccgccagcacctgctggtatgcgaagcccggtactggctccggcgtggtgtcaccacgccggagaaagtcgccgagctgagagaaacccttaagcggcgaggggaaagcgccgtcgagcagttgatagcggaaatgcgccaacagtggcaggcacggacagagtggataggtggtgaagatggctga

SEQ ID NO: 324544 - DNA, 1203 bp, Pseudomonas aeruginosa
gtgctcaccgagagacagatccgcgcactcaagccagccgagaaggaatacaccgtcagcgacgggcgcagcgcgcggggcgagggtgtcttgatgcttcgggtgcggcccaatggtacgaaggagttctacttccagcgccggaagaacgggcggaagctgaagaccaagctgggcacctggccgacgatggcgctcacggaagcgcgggaccggagccgcgaggagaaggagatacaggttgaggctggcaccttcaaggagttaatggccgcctatgtcgccaagctgaagcaggaaggggcggcgagtgccgagcacgtcgagtggtccttcaaacactacgtttccgagccgttcccaaccctggtggagcgcccggcggtgttgatcgggccggccgatatccgtgacatcctggccaagatgattgccggcggcgtcacgacaatgacgaaccgggtgcgctctcgccttcattcggcgttccagagtgccctgcagcaggactacaacccccgcacctatctggagcaggaaaatcgcttcggcctgaccagcaatccggtggctagcatccctgtacaggaagactgggagcagcccggggatcgggcactcacggagaaggagttgcaagcgctctggcatctgctgccggagaagctgtccctcacgacttccgagttgctcaagttcttgatcgccagcggtggtcaacgaccggagcaactgctccggtctgatcggacgatgtatcagcgggaccatgtgatgatccgcaacgggaagggcggtgaaggtgagcgggcgatgcatgtggtgccctacaacaagctgatgcgggcgagcctgaaggaaatggactgcatcagcgagaagagcgcgtatccgttccagggcaaggaggaggggaaatcactgaacccccagtctctgtccagggcggtgacgaagctatacggccggcatcacaagtcgttcaacggcccgttcacacttcgggacatccgtcggacctgcaagacgctgatggcgaaagccgggctcaccaaggagctgcgggacaggatccagggccacgccttcaacgatgtgtcatccaagcactacgaccgctacgactacttccaagagaagaagcgcgggctcgatcgctgggccgcctggctcgaaaagaacgtcatcgacaccaagaagtag

SEQ ID NO: 324545 - DNA, 348 bp, Pseudomonas aeruginosa
atgtccccggtcgtcattcgttttactgataccgcagagcaaagcatcgaagaccaagtccaccacttggctccattccaaggtgaacaggctgcattccagtcagtactgagccttttggatgagattgaagagaagatttcacttgcacctaaaggttacccagtcagccagcaggcgagtcttctgggggtgctgagctatcgcgagcttaataccggcccctatcgtgttttttacgaattccacgaagagcaaggcgaggcggcagtgatcttggttctgcgacagaagcagagcgttgagcagcaattgatccgctactgcttggtggggccaatcgagtga

SEQ ID NO: 324546 - DNA, 984 bp, Pseudomonas aeruginosa
atgtcgatcaccaagctccccgatggccgttggttcgtcgatgtagaacctatcaagggcaagcgctttcgcaagcggttcaagaccaagatggaggcgcagcaattcgaggccaccgcgcgtcagaagtgtgcggaaaacccctgctggacgctcaggccgaaggaccgtcggcgtctctcggagttggtcgaactctggtatgaactgcacggccagaccctgagcaacgggcatcgttgcgtggcgattctgcggttggtggcaaaggacctgggcgacccggtcgctgtctccctggagcccgcgaaagtggctcggttgcgtagccggcagatagccaatggcatgtcgggcaagaccgcgaataaccgtcttggctacctcaagtccatgtacaacgaattgtgtcaactcggcgtcattgactatgagaatccggtagggcgcatgcggccgctcaagcttcaggaaagaccgctgtcgtacctgaccaagcatcaggtgtccgaactgcttacggccctggatgcgcgcaccacgtcgccacatccgaagatggtcgctcgtatctgcctcgcgacaggggctcgatggggtgaggctcaggcgctgacgccggaacgtctgaaaggtaatgcggtgatctttgccaacaccaagtccaagcgtgtgcgctcggtgccgatctcggaagaattgggcgccgaccttcgcctgcattggcagacccacgggccgttcacgaactgccttggcgtgttccgcctggtgctgctgtcgacctcgatcaagctgccgaaggggcaggccagccacgtactgcgccacacgttcgccagtcacttcatcatgaacggcgggcacatcgtgaccctacaacacatcctggggcacgcctcgttgtcgatgacgatgcgatatgcgcacctctcccaagaccacctatctgaagctgttcgattcaacccgctcataggttga

SEQ ID NO: 324547 - DNA, 663 bp, Pseudomonas aeruginosa; identical to SEQ ID NO: 322266

SEQ ID NO: 324548 - DNA, 1578 bp, Pseudomonas aeruginosa
atgcagatcggcaggccgcggcgggacagtctctttcatttcggtatcgtgatcgccgcgctcgcggccgtcccgttgctcatggcgccgctggtgtaccagcaggccaggatgcgtgccgaaggcgaggccgcggtaacctctgtcgccattcttcgccagttggacaccctgctcggcgttgtctcggacagcctggacaagagccaggaggcggtgggcaagccgtgccgggaggtcctgggccgattgacccggatgaccatgctgagcccgtatttccgctcgctggtcctagtggaacgcgagaacgtctattgctcctccctgcggggcgagttgcacgatctgccgttgcaggtggccttcaaggctttgggcagcctgccggccgggcagcgcatcacccccagcaacgcgacgccgcaggtaccggagcgggcttcggtcatcatgtcgcgtggcgatgaaaacggatccggcgtgctggcgataatcgacggtcagtacctgctggatatccaacaggctgcttcctacgacgaacggttccaggtgcagatggtcctgagacagtcgcagcgacagctacccggcggcgcgcccgccaccggcgatggcgtcgccgtagcggcttcggcaaggtttccggtcgaggtgcgggtggcggtcgctcccgcgctggccagcgcctatcgtgccgatgcctggcggcattacgcccccttcatcctcctggccgcgttgctggcgggatatctggcgcacctgttctgccgtcgccggctgtcgctggtcggcgacatgtatcgggccatgcgcgcccgtgagttccacatggtctaccagccgatcatccacctcgataccggagagtgccggggcgtcgaggcgttggtgcgctggcagcggccggacaggagtcaggtgcggccggacatcttcatccccctggccgaagacaacggcatgatcggcgatctgacccggcacatcttcggcctggtcgccgccgacctggcgcaactgggcctgggggcgggcgatcatctcggtgtcaatgtcagtggctcgcacttggcgagccatgggttcgtcgacgacgtgcggcgtttgctcggcgccatcggcagcgaaggcccgcaactggtcctggaagtcaccgagcgcgaggcgctgccgcacgatgcgcagttgcagcacaacatccagcaactgcgcgagcttggcgtgcaatgggcgctggacgatttcggcacggggcaaagctcgttgtcccacctgcagaagctgcatgcggactttctcaagatcgatcgctcgttcgtcagcagcgtcggcagcggatcggtgaatgccgtggtgctggagacgatcatcgcgctggcgcagcgcctggacctggccatgaccgccgaaggcatcgagacccgggagcaggaacagtacttgtgcgggcacagcatccagtgggggcagggctacctgttttccccgccgctgaaggcggccgagctctgggcgtggcgcaacagccggcgcggcgcagagcgcgaggcgcgcgtagcggcgaactag

SEQ ID NO: 324549 - DNA, 2448 bp, Pseudomonas aeruginosa
atgttgttgctctggttagtcgtactggtactcggtgtcgcttacctcgcccatcggcgtaccccacccgctcccgcgctcggcatcagcgccgcctacctgatcctgatgggcgtgttcagccacgcgcccggctggctgctgctggtcttctggctgctctggctggcggtggcgcttcccctcgccctgcccgacctgcgccggcgcgtgctcagcggtccgctgttcgcctggttccagaaagtcctgccgccgatgtccgacaccgagcgcgaggccatcgaggcgggcaccgtgtggtgggatggcgaattgttcagcggccgcccggactggcagaaactgctcgactaccccaaggcgcaactcaccgaagaagagcaggccttcgtcgacggcccgaccgaagaactctgcgccatggtcagcgactgggacatcggccagcgcatggacctgccggaagaagcctgggccttcatcaagcagcacggcttcttcggcctgatcattcccaaggagtacggcggcaagggcttctccgccttcgcccactcgcaggtagtgatgaagctcgccacccgtagcggcgacctggcctcgacggtgatggtgccgaactccctcggcccggccgagctgctgctccactacggcaccgacgagcagcgccagcgctacctgccgagcctggccaagggcgacgacatcccctgcttcgccctcaccggcccctacgcgggctccgatgccggcggcatgaccgacgtcggcatcgtctgcaagggcgaatgggaaggtcgcgaggtgctcggcctgcgcctgacctgggaaaagcgctacatcaccctcggcccggtggccaccctcctcggcctggccttcaagtgccacgacccggaccatctgctgggcgacgaggaggacctgggcatcaccctggcgctgatccccaccgacacccccggggtcgagatcggccgccgccacgtgccgctgggcgccgccttcatgaacggtccgaactccggcaaggacgtgttcgtgccgctggagtacatcatcggcgggcaggaaatgatcggcaaaggctggatgatgctgatgaactgcctgtcggtcggacgctcaatctcgctgccggcggtgggcaccagcgccggcaaggccagcagctacgtcagcggtcgctacgcccaggtccgcgagcagttcaacgtgccgatcgccgccttcgaaggcatccaggaggcgctcgcccgcatcggcggcaacgcctggctgatggacagcgcgcgaatcctcaccgccaacgcggtggacctcggcgagaagccctcggtgctttcggcgatcctcaagtaccacctcaccgagcgcggccgcgagtgcatcgcccatgccatggacatccatggcggcaagggcatcatcatgggcccgaacaactacctgggtcgttcctggcagggcgcgccgatcttcatcacggtggaaggcgcgaacatcctctcgcgcaacctgatgatcttcggccagggcgcgatccgttgccatccgtacgtgctcaaggaaatggaactggcccagcgcgaggacaaggaccaggccgcccgcgagttcgacgcgctgctggtgaagcacatcggcttcgccgtcggcaacgccgccagcagcttcctcctcagtctcagctgcggccacctcggcaacgcgcccggcgaccgcatcagccgtccctacttccgcgcgctgaaccgcctggcggcgtccttcgccctgctcgccgacttcagcatgatgctgctgggcggcgaactgaagcgcaaggaacgcctctccgcgcgtctcggcgatgtcctcagctatctctacctgggctcggcggcgctcaagcgctaccacgacctgggcaacccggactacctgcatccgctgctgcgctgggccatggaggaaaacctcggcaaggccgaggcggcgctggaggacctgctgaacaacttccccagccgcttcttcggctgcgcgctgaaggtcctggtactgccgttcggccgccggcacaaagggccgggcgacgaactggacgccgagatcgcggaaatcctcggccgtccggacgacgacccggcgttgcaggcgatcctcgccggcgcgttcctgccgaaagacccgcaggacccggtcggtgccctcgcccacgccttcgacgcggtacgcgaaagcgccgcgctggagaaaaccctgcacaaggcgatcaaggaaggcagggtccagccgcaagcggggcagaacccgatcgatgccggcgccgccgccggcgtgctgagcgccgagcaggcgcaggccctgcaccaggccgaagcggcacggcgcaaggtgatcgacgtcgacgacttcgccaaggaggaactgcaactggccgacggcaggatccgctga

SEQ ID NO: 324550 - DNA, 1215 bp, Pseudomonas aeruginosa
atgcaaggcaacatgaacgaacccgctatcgactgctggcaacgcaacctcgccgtgtgcttgttcggagccttcaccaccgtcttcgccatgacacttatcctgccgttcctcccggtctacataggtcaactcggggtatcgggccacgctgcaatcgtgcagtggtcgggtatcgcctacgccgccactttcgtcaccgccgggttggtagcaccgctttgggggatgcttggcgaccgctacggtcgcaagcccatgctggtccgagctagcctgggaatggcgatcaccatgttgctgatggggctggcctccgatatctggcaattcatcggcttgcgcttgttggcgggaatcgccggcgggtactcgtcgggggcaacgatcctggtcgcggtgcaagctccgaaatcccgttcggcatgggcattgggtcttctttcctcgggcgtgatggccggcaatctgttagggccgctggttggcggcttcctgcctcctctgatcggcatacgagccacattctggggcgccagtggattgatcttcattgcgtttgtcttcacgaccttcatgttgcgcgagactgcacgcccctccgtccccgccgtcgaagaacctcccaaggtcggttggtcgaatatgcccaacaaggcggtgatcctcgccatgctggcgacaggcctgctgctgatgattgccaacatgtcggtcgaaccgattatcaccgtctatatcgaaacgctgctcgaggactcgaggcgggtgacgtctgtggcgggtctggccatgtcggcggcagcgctcggaagcatcatctccgcgacctatctgggtaaggtggccgaccggattggctacggcgtcatcatgatagccgcgctgagcgtcgcggccgtcctgctgattccccaggctttcgtatatgcggggtggcaactcatcgccctgcgcttcctgatgggcatggcgcttggcggcctgcttccgtgcatggccgctgtaatccgccatagcgtcccggagcgattcgtcggctcggcaatgggctggtcgctatccgcgcaattcgccggccaggtaatcgggccggtaatcggagggttcgtcggtggccagttcgggatgcgcagcgttttcctggtaaccagcctgttgatgctggcaggggcgctattcaactggcgagcccttgggcactccacccgctag

SEQ ID NO: 324551 - DNA, 597 bp, Pseudomonas aeruginosa
atgaacgtctatcgcaaggtttcccgcagtgccgtgacttggctgtgctccgcgctgctggccgcatccggccatgcctgggccgaagactggtgggtggtacacaagggcgatgaccctgccgagcttgacgtgttcctggccgatgccgattcgctggcaccggtgccgggtatggaaaacgcctggcaggtgcagatcgccatgctgttcgactctttccatctgctcagcgcgcaccagtaccgctgcgatacgcgagaggtgaaggtggtcaacgccaagaccttctccaacaacgggcaacccacgaacctccagttcaccttcgccaagggctggaccccgctgcccaacgaaagccatgaggctgtcctccagttcatctgcgcgccgcagcaacgcgaacgcaacggcatgcgctccaccggcaggggcgtgccattgcaggcggtgatcaccgccgtcggcatggtcgagatggagcgcgcccaggccaatctcgccgaggcccggcgcaagctcgaagaggccaagagcgatcgcgtcatgggcgaactcgatcgtctgctcggcaacgagccccggaagccctga

SEQ ID NO: 324552 - DNA, 1932 bp, Pseudomonas aeruginosa
atgagctacgacacgaccggttccatggtgggggccacagtaggagaccctagcgatgagcgatggaatgcgttgattgacgaaaccgacctcgtaaagggcgcatcacttataggcagatcggcaatggttttagccagcctggccgatcttccagatgttccgcaaagctacacccatgagtacatcgttcaaggccacagacccggtattaccactggtggtggcaggttctactgggatggggcggttgcgcggaatcgccacaacggcgggactatcatcagccccactgttcctgcgtacactgcccagacggggttggctggctatctggatggctcgggggaaactgagccgtccgcctttggctgctttgtccgcaaaatcgaaggttatggtattcgcctcgaatggttcggctggctgccgggggaactcgctaccgcgccagcgcaaaagcttctgcaacaaacccgttcgaacgaaggctctgcggcccacatcggttacacggccatgtttcccccggcgaccgttcgctccggtccattggttatcggttcggaccagatcatcgccggaaccagccggactgtcattctccaggagcccggtacggtgacgatggatgtccagccgttcatcagcatggccggacagagcaatgtgttcatcttcggcaatggaatgcagatcaatggacagaagaacgaggcacgcagcggcgaaggtcgatatggacttttcatctatggctcgaaaaaagtcctggtccaggacctgacaatcaacgcgttctccggtgatggattggccgttaccggcgatgcggggcgaccaagcgaagacgtacgcatcgaccgagtcctttgcaacttcaatggacgcaatggcttttcggtcatcaatgccaggcgcgcgacgctgctgaattgccgagcgactaacacgaataccaatggacttggtgcatcagccaatggaccctgggcggccttcgacatagagcccaatgaaggaagcggttacttcatcgaagatatcaacctgatcggttgttcgagcgagggcaatgctgggaacggagtccagttcaccatcccgaatacggactcccctgtctccgtcagggtgtccggattccagtcccgacgagacggttcggctactcaatacggggcgaagaatggcggagtgggtttcatatatggagggggtctctctccgaaaaacactatgtcgggtctgatccaactggttggcatcgttgtcgacgagccttttggcagcgctatgcgtttccgcaactggagcgccagaaacgcgccggtactcatcagggatgtcacgataagaaatgtgaacttcggcgtggccacgggaaacataaatcgatgcggagtctggcaggactcttctgactccatggaagtgattgaaccaaagggcaatttcgaagtggatgggctgaccgtcttcgacgataaccaacagctcattcgacccgtgtggaccatgggaatagcggcggctcctacaatcgccaaggtgaggaatgtctacgtcaaccgacatggctatcctgctgttttgccgttacgtacgaaagtacaaggaggcgtagggtggagcgagctgccgatggtgtccttgtcctcgtcctcagcaatcgcaggaacggattatgtcggacaaatggtcgagttgacggggagcggaggattcgtactgccggaggccgctcttgcctcgggctgtgtcttcaggatcaggaatggttcgagcggcagcatcaacgtcacggcactggctggaggaatcacgggcagtacctacggtagctacaccaacacaggaagcagcctgaccttgatcaatgggcagtatgccgagctatggagcaatggaagcacctgggtcctgaaatga

SEQ ID NO: 324553 - DNA, 1239 bp, Pseudomonas aeruginosa
gtgcacgcccgccgcctgccccgcctcttgccgttcgccctcgccttcctgctttcgcccgccgccttcgctgccgacacgccagccgccgaactgctgcgccaggccgaagccgaacgcccggcctacctcgacacgctccggcaactggtcgcggtggacagcggtaccggccaggccgaaggcctcggccagttgtccgcgctgctcgccgaacgcctgcaggcgctcggcgcgcaagtccgcagcgcaccggcgacgccctcggccggcgacaacctggtggccaccctcgatggcaccggcagcaagcgcttcctgctgatgattcactacgacaccgtgttcgccgccggcagcgcggcgaagcgtccgttccgcgaggacgcggagcgcgcctacggacccggcgtggccgacgccaagggcggcgtggcggtggtgctgcatgccctggcgctgctcaggcagcaaggcttcagggactacggacggatcaccgtgctgttcaatcccgacgaagagaccggctccgccggctcgaagcaactgatcgccgagctggcccggcagcaggactacgtcttctcctacgagccgccggaccgggacgcagtgacggtagccaccaatggcatcgacggcctgctgctcgaggtgaagggtcgctcgtcccatgccggctcggcacccgagcaaggccgcaacgccattctcgaactgtcgcaccagttgctgcgtctcaaggacctcggcgatccggcgaaaggcaccacgctgaactggaccctcgccaggggcggcgagaagcgcaacatcattcccgccgaggcttcggcggaagccgacatgcgctactcggacccggccgagagcgagcgggtactggccgacgcccggaagctgaccggcgaacgcctggtcgccgataccgaagtcagtctgcgtctcgacaagggtcgtccgcctctggtgaagaaccccgcctcgcagcgcctggcggaaaccgcacagacgctctacggccgaatcggcaagcgcatcgagccgatcgccatgcgcttcggcacggacgccggctacgcctacgtgcccggcagcgacaaaccggcggtgctggaaaccctcggcgtggtcggcgccggcctgcacagcgaggcggaatacctcgaactatccagcatcgccccccgcctgtacctgacggtggcgctgatccgcgagctgtccgccgactag

SEQ ID NO: 324554 - DNA, 1800 bp, Pseudomonas aeruginosa
atgaagaaatccctgctctgctccaccctagccctggcggtagcctctgccgcccaggccgcgccgaagaccgtcgacatcatggtcctctacacccccgcggcgacccagaccgcaaatggccgcgacatcgatgcgcggatcgccagctacatcgagttcgccaacaccgcctacgagaagagcggcgtcaacctgcgcctgcgtctggtgcacaagcagcgcctggactgggccgactacccgacggtgaccggcaccaacctcgatcgcttcatgcgcgacccgcaggtgcagcgcctgcgcgagcagtacggcgccgacctggtcagcctggtcaaccgctcgcagaacagcggcaacggctacatcacctgcggcatcggctacatgggctcgggcgataagaacagcgggcgcttccacggcaacgccaaggacattgcctacaacctcaccggggtcgactgcgggctcaacaccttcgcccatgaagccggccacaacatgggcctgcgccactcctacgagcaggacctggagtccagctactacgatccgcgctacgcccacagcggcacctacgaatggagccgcggctacggcgtgcaggggcgcttcgccaccgtgatggcctacccgcatgccttcggcaccaacaagcaggcaccgttcttcgccaacccgcgcctggtcaacgccgaatgcgccaaccagccctgcggtcgcgaagaacacgccgacgccgtacgcgcgctgaacagcatggccacgcagatcgccgactttcgcccgaccaaggtacccggcacggtcaacccgggctccggcggcgacacgccgaccccgccggacctgccatggtgcacgaaagccaagctcggcggcctgctcggcgatggcgagttcgccagcatggaaggctggcgcgcatggtccggcaacgcccagctgagcctggtgaacgtcgccaagggctgccgcgacaatgccttgctggtcgacgtgcgtggcttcgatctgctggtccgccccattgcccccctgcgcgccggcagcggctaccggctgagcggcaaggtcatgctcaaggccgccaatacccgtgaaaccgtgcgcatggcgctgctcagcgaacgcgccgatggcgccctggcctacaacccggcgcagagcgtcgaactgtcggtcagcggcaacgagttcagtcgcctggagaagaccttcgactaccgtcccgccgccgaccagcgcaacctctacgtggcggtctggagcgacagcggcgccagcctgctggtcgacgagatgaacctgcaggaagcccagtccgcgccgccgagcgtaccgccggcgccgaaacgcatcgcctacgacttcgagagcggcatcggcggctggagcggtgtgcatgccagcacccgcgccacgcgcgtcgccagcgccgggcggctggccctggaagcctaccagcggcgctacgccggcaccggcgcgagcaccagcctgctgggcaacctggaagcaggccggacctacgcgttcagcgcggacgtgcgggtcggcgacggtcgcggctcgcaggccatgacctatgcctacctctacctggaaagccagggtcggcccggcgaatacctgcccctgggctacaaggtggtcgagaatggccgctgggccagcctgcgcggccaggtgcaattgccgaaggggccgatcaagcgtgctgaactgatgatcctcagcggtaaccagcaggagtcgatgttcatcgacaacgtccagttgctgcagaagtag

SEQ ID NO: 324555 - DNA, 858 bp, Pseudomonas aeruginosa
atgcacctgcatttcaccgaggccgaatcgaccttcagctacttcaccgccacccgcgcctacctggagcggcatggaaagccgctggccttctacagcgacaaagccagcgtgttccgcagtaaccataaggcgcctcagggtggcgacggctatacccagttcggccgagcgatgtacgagttgaacatcgagagcatttgcgccaacagcagccaggccaaaggtcgtgtggagcgtgcgaacctcactctgcaggatcgcctggtcaaggagctgcggcttcgcggaatcagcaacatgcccgacgccaatgcctttgcagcccactttatggccagctacaacgcgcgttttgccaagcccccgcgctctgagcatgactgccatcgcccgctgcacagtgatgaagatttggatctgatcttcgcctggcgagaagcgcggcgagtttcgcagcggttgaccgtgcagtacgacaaggtgctgtatctgctagcggacactccgcagtcccgtcgcctggcgggtgatcatgtcgagatctaccactacccggatggccgcatcgagcccagggtggacggcaccgccctcccctttaccacctacgacaaactctgcgagatagaccagggtgccatcgtcgagaacaagcgcttgggtcatgtgctgcaagtcgcccagctcgtccaagcgcagcgcgacagtcggcgctcgcaatcggtaccgggaaatccgcggcagtcaacgcaaggcaagatgctgtcgaagaaggcgcagcgagaactgatgccggaagatatcgccgccgccctggataacacgccaccatcgaggcgaagtcgccatgcgtga

SEQ ID NO: 324556 - DNA, 648 bp, Pseudomonas aeruginosa
atggccgagatcaatatctaccagaaccctggtcaatccctggctaatatctataagggttttgcccgtcaatgcaatcctggctttgtcttccccgaagcacagactatagaggcatgggacattccgctgaagctacacccggaattcgtcccgggcggagacatcagcaaagcggaccagcagtattcgacgttgcttgcccaagaactagccaacggcgtaaccattggtttcaggatggtcaatgaaaaggaacgtgtttgcaacggtgagatacttcctttgctcacctccatggcgcagaatcttgatagaataaaggctcgcttcggcagcggatatcttgaccgcttcaagggcagcccgaacgtctatccaaccgacgttggtctatctccggacgcctccggaggcatttcgcaggagtccgggctgctggtttcctacggtgtgaacctgcggacactggctccaggcacttggcaggcaatgacgctccccgaggatattaagacgttggtagggcctggtgttggcctacgtctggacgcgccaaatttcagcgacgtattcaatacgatcaaatcgggcctccgctatacgaccgcagtagccttgctgctggcctattttgcagcgatctaa

SEQ ID NO: 324557 - DNA, 1020 bp, Pseudomonas aeruginosa
gtggatagagaattggatcagccccttcagcgcaatctggagcggctatacaattacctagaaaatccagaacgagaggaggcacagcgtgttctgctcgcagcggaaccagagccgatccgaattactcacggaattcctgacctctataccgactggctgtcatcccccagctactcagcacaaggtggattgacggggcaactgacgcaggtcataagccagactgccgggcggcccgttctagtgttcgacgactacttcaaggttcatgaggtcactattcgtacggtcgccgaaaccggaggagccaacagtatttcggtgagcgacctccaggtgcaattgaaccagcagatcaatacctttatccaagaccgcatcgatggtgacaaagccgataaggtcagccgcctccagtccaatatttcctatctgattgaaatgggtattaatatcgatttcaccgcccgtcatgagcttccacctggtgggcgaggcaacagagctactattccgacctctgaccccaacggtgaatcaggtgtaacgattggctatggcttcgatgtcggccagcacgatgaatccggcattcaggctctgaacatcgctgaatccacgcgcaaaaaaattcgccccgccctcggcttgaaaggagcgaacaccgcgaccttccaggcattagcccaactcatcccggtactcacagatgaagacgggctgtccctctttaccgccaagatgatcaaggtcactgatcggatgaaggtgaagttccagcagtggagcaccttacctccggcggtcaaaaccatagtgacagacctgtattaccactatggtgagtattcctcgttcccaaactttgagactgctatttctcagagcgactggccagccgccattagggagttgaggaactggaatggtactcccaacagtaccgatccgagcgatggcatagccaggcgattgaacaatcgcgcggactatctccaacgatccctgggactctag

SEQ ID NO: 324558 - DNA, 729 bp, Pseudomonas aeruginosa
atgaagctcaaaagcattagcatttttgccatactcgccctttgctacaatatcactctttgtgtcgctgaagaaccaaagagctacttcccacccggggattactataggactggaaatagtgggctgctgacgatatctccgttattcgaaggacttcaaaagtttcggatacgaagcactggacacaatgcccatgcttgcggattgaatggaactatagagtcagatcatgtgcaggtcgacgtccgtggcatcggcgatatgtcgtgcgatgtcgttttcaaactgaatgatgacagaattaccatagagaaaggagtcgcaagtagggactgtcagggcttctgcggggcggcagcaggttttactggcacgtattggaagccttccccaatctgcgagcccgcctctataaaattcaacgacaagcaagtgaagaaagcactgaagaataacgagacagagaaggcctactggatttctcgaaaactgataacagagtgtagggacatgtttgaaggttttggttatctctctcgtgtttttcatacggcacatctctccttgtctgccaaaaaccaccaatgcaagaagatactagagaagggcagcttcttcagagacctgaagcgagagtatttgccggaaaaaatgcaaaatgaatatgacaagtattctactgagttcaatcgtctagaaagcgagtgcgaacaatcaatgaaataa

SEQ ID NO: 324559 - DNA, 417 bp, Pseudomonas aeruginosa
ttgaggatagtttgcctattggtattgctgagtctgatcggcggctgctcccattcagtcactttgcaggagcgagcagagcaagaggccatttttatccaggaattccgccaggaattcgccaagaggcttcgttacccgctgttcgcaccgggagatgagatccccgaggccgatgttgtggtgtttttccgcttcgcaagctcgtcggggcgcataagcagttgccgggtacagtacggcgaggggaatgttaagagccgcagtacgctcgatgaagtcttcgccaggcgcgtgatagccacctgccgcgagcccgatctaccggttgctccgcccgctctgctggatggtggtggaggtttcggcttcaagcagagagtgatgtttcgcaaggaagtggaacgtcccaggtga

SEQ ID NO: 324560 - DNA, 978 bp, Pseudomonas aeruginosa
atggtgaccgaacacatatttgattttgaatggcgccctctgcagaactatcttcgtgatcgagatatcgcaataccaccctttgcggcagatcaagagtcaagaagtgacgcactttacaactggatagttagcaaggggtattcaggaaaagaaggactgaatcttggtacttattaccatatatctgattatggcgtgataggattggcgttgctatgcgctgagaacgtaggtgatattttgaaagtcataaaggcctatgtcaagttgttcaatcgtgatatagctaatgttgacgtcaagcctagggagaattacgaagtagaaatccatatttcagttaactttaagccggagtggaatgacgcatcccgtcagtttcatgtaaatgttatagcctctgcaacctacaagctcattatggacctgttaggtaatgactttcccatctctgcattgacagtacctgtgcatggcgcagataaaacaatctatgaaggtttcttttctttgcctgtgaagcatgaaggaagtgacataatatttagctttccagctcatcagttgaatagaacactggcgactgccaatccggcggtatttcagtcagccctgaatatggcaggtgagagtttcaatgctctgttggaagtagagatgggagggctccgtcagcgaatcgagttattccttgagtccataccagatcaataccctagcttggtgactaccgcaaagtatttatgcatgaatgagcggacggtaagacgtcgcctggcggacgagggatgcacttatcgccagattgtagataaggcccgcaaagaacgagcaattgcactgctactgaattcatctataccagttgatcgtattagcgatattctggggtactcggaaacagcgagttttagacatgcattcagacgttggaccgggcagtctactacagaattcagaaacagtttccactga

SEQ ID NO: 324561 - DNA, 1212 bp, Pseudomonas aeruginosa
atgataaataagagaaatgctattttcctctcaatgattctcatcttttttatcatcgcctgcattggtagtgcaggtgtgagagtgtggaatttttacactttgtttgactcggggaaaattgctgaaaattttcgagcaatgccgagactgtttaactcggtcccaataaagaagagcggagcggctcatttttttgaaaaaaacctcagggatatgcctggctcatttagctttcaaggtcacgaggttggctttaaagactggttggcgagcagcaataccaccggccttatagttctcagtgacgatcgcattgcctttgaggaatactacctgggcaatagtgcgaaaagccttgctattggctggtcgctaagcaaatcattaatgtccctcttgattggaatggcagttgatgaaggatcaatacacagtctgctagatcctgtgaacctgtacgccccacagctttctgctggcggatatgcgggtgtttctttgagagatgtgcttgagatgtcatcaggaatagctttcagtgaggactacgggaattcggactccgatatcaaccagctaggtaggactatagcgcttggcggatcagtaaatgaaaaagtgagttcattgagaagagaagatgccccggggagagtgcaccactacgttagcgtagatacccaggtgcttggtatggttttattgggcgcgactggtatgggcccctcacagtttatgaatcaaagactttggccccaactgggtgccgaatgtgaaggtgcatggttaacagacgatcggggcacagagctagcattcggtggggtgaacctttgcctaagagactttgcacgcattggtctattatttcttcatggcggtcgcagcctgactggaagtcaaattgtaagtgctgagtgggtcaaggcatcaaccaaacctcggagtgctcacttgcgtcctggacgttacatagaggatggtgagccaaatcttgggtatggttaccagtggtggattccagaaggcaaagaaggggagttcttggctatcggagtgtacgggcagtttatttatgtaaacccactaaggcgtgtggtgattgcaaagacctccgcgtatgtcgactacaacgttgacggcatccgtatggagcatgaggcacttgcagcgttcagggctatatcaagaacagtaggggtgaggtga

SEQ ID NO: 324562 - DNA, 1437 bp, Pseudomonas aeruginosa
atgcattcgaagtcggtagatagcctgtcgctgacacgggctggattcatcgagtacttcctggtcgcgaccaaactggtacacgcgctcaccgccatcgccccggcgctgttcctgctgtactaccccggcctggttcccgtggagctgcgcagcaacatgctcgggctgctgctgttcttcggcgcgctcacggtgatcatgttccaggcactggacgtctactccgacgatatcttcagcaaccgcctgcgcttccgcatcatgttcttcgcctgggcctcggcgttctgcctgctgttgttcatgtaccagggcctgggcctgtttccctacctcagcagcaagctggtgatcttctggttcaccggcagcctgctgctgttcggcgtgcagcgcctgctggtgctgcgcctgtaccgggcctggatgaaacgcggcatgtacctgcaacgcacggtgatcctcggcttcaccgagagcggcatgcacctggccgaatacctggtacgcaaccacgacatccgctccggcatcatcggcttcatcgacgaccgctccgagcgggtcccggagaactacaactcgctgccgctgctgggcaacaccaaggacctggagaagctgatccgccaggaacaggtcgaccaggtgctggtcgccctgccctggttcgccgaggggcgcatcggcgccatcgtccatcgcctgcggcaattgccggtgaacgtcctgctggtgccggacatggctgccttccggcatgcccacaaccgcatcgtcgatgtctccgggatccccatgttcaacgcgtccgagctgccactgcgcggctggtcgccgctgatcaagcgctgcgaggacctggtcctggcgagcatcgcgctggtcctcttcgccccgctgatgggcctggtggccctggcgatcaggctcgactccaaggggcctgtgctgttccggcagaaacgctacggctacaacaaccggctgatctgggtcttcaagttccgctcgatgtacacggaaaggaccgacgccaacgccgaacgccagaccacccgcgacgacgaccgcatcacccgggtcggccgcttcatccgcaagaccagcatcgacgagctgccgcagctgttcaacgtgctcgccggcagcatgtcgatggtcggcccgcgcccccacgccaccgcgaccaaggccgccggcattcccttcgaggaggcggtcagcgaatacagctcgcgccaccgggtcaagcccggcatcaccggctgggcgcagatcaacggctaccgcggtgagaccgacaccctgcacaagatcaagaaacgcgtggaatacgacctcgaatacatcgccaagtggtcggtgtggttcgacctctacatcctgttccgtacggtgccagccgtactcctgaccaaggaagtctactga

SEQ ID NO: 324563 - DNA, 1467 bp, Pseudomonas aeruginosa
atgaacgccgtcgccccgctgatcccctgcatcgtttccggcggttccgggacccgcctgtggccggtttcccgggagagcatgccgaaacccttcatgcgcctggccgatgaccagagcctgttgcagaagaccttcctgcgtatcgccgggctgccggacgtcgcccgcctgctcacggtgaccaaccgcgacctgctgttccgcaccctggacgactaccgcgcggtcaaccgcagcggcctggcccaggacctgctgctggagccggtgggacgcaataccgcgccggccatcgccgccgccgcgctgcatgtgcaggagcacttcggcgaccaggcgcagttgctgatccttcccgccgaccacctgatccgcgacgagcaggccttcgccgcggcggtggccgaggctcgcggactcgcggcccaaggctacctggtgaccttcggcatcaccccggagcgcgccgagaccggcttcggctatatcgaacagggcgccccgctgggcaacggcttccgggtcgcacgcttcgtcgagaaacccgaccaggccaccgcccagtcctacctggacagcggcaagtacctgtggaacgccggcatgttctgcttccaggccgccaccgtgttgcaggaactggagcgccacgcgccggaggtgctgatcgccgcccgcgccgccctggccgacggcagcagcctggagaacggccagtgccgccagcgcgagctggccgccggggccttcgccgaggcgccggacatctccgtcgactacgcgctgatggagcgctcggacaaggtcgccgtggtgccctgctccatcggctggagcgacatcggctcctggcaggcgctgcgcgaactcagcgcggcggacgagaacggcaaccaggtacgcggcgaaagcgtgctgcacgacgtcagcaactgctacatcgattcgccgaagcgcctggtcggcgccgtcggcgtgcacgacctgatcatcgtcgacacccccgacgccctgctggtggccgacgcggcgcgcagccaggacgtcaagttcgtcgcccaggaactcaagcgtcgcggccacgacgccttccgcctgcaccgcacggtcagccggccctggggcacctacaccgtgctcgaggaaggccgccgcttcaagatcaagcgcatcgtggtgcgccccaaggcttcgctgtcgttgcagatgcaccaccatcgcagcgagcactggatcgtggtcagcggcatggcgctggtggagaacggcgagcgcgagtttctcctcaacaccaacgaatccaccttcatccccgccgggcatagccaccgcctgagcaatccggggatcatcgacctggtgatgatcgaggtacagagcggcgagtacctcggcgaggacgacatcgtccgcttcaacgacatctacggtcgcgcccccgccagcgacgagaagaaagcctga

SEQ ID NO: 324564 - DNA, 1188 bp, Pseudomonas aeruginosa
atgcggatcgccctcctcgcgcccctgccgccggaaaagaatggcatcgccgactacgccagtcatttccgcaacgccctgcagggtctcggcatcgaagtagccacgccgctcgccggcgtggcggccgacagcgcgaatatcgccagccggctggacagcgtcgactggaacggcttcgacctggtccatgccgaactcggcggcggccgcctgggcgagttcatcgccctgcgcgagctgcgcaagcgcttcccgcgcctgccgctgagcgccacggtgcacgatccggagcgcatggtctggcgccgcgagcgcctgccctggccgctgaacctgctggaacgcctgccctctcccctgccccaggccgccgtggtgctcgccgacccgctgaccctgcgcgaagaacgtgccgtggcccagggcctgacgcgcctggtgaccctcaccggcctgggcggcgagtgcctggcccggcggatgcgcctgccgcccgggcgggtcgaggtgatcaaccacggcaacctggagatcgccacggtgccgctgccgtcgctggacaccctgcgcctgctgtacttcggattcatctatcgcggcaaaggcatcgaggacctgctcgaggccctcgccgacctgttcgccagcgcgccggagatgcgccagcgcgtgcgcctgaccctggccggcggcaccgccgcggaaatggccttcggcgccggcggcaactacctcgaccagttgaaggcacagatcgccgagcttggcctggccgacgccatcgactggaacctgaacctggccgccgcggacatcccgcgtaccatccaggcccaccacgtgatggtcctgccgtaccgcgagtcgaagaaactcggtctgctcggccagcagcgcggcaccagcggcgccctgtcctgggcggcagcctgcgggcgcggcgcgatcacctcggacgctcgcgccttcgccgaggaagtcgccagcggcaacggcgccatctaccctcagggagacgtggcagccctctccgaacagttgttgaacctcgctcgcgaaccccgcctggcacaggcctgggccgagcgcgccggagcgatcggccatgcgcggacctggccgcgcaccgcgctgcgcttccaggcactgttcaacgacatggtgggaaccgttcatggcacgtaa

SEQ ID NO: 324565 - DNA, 1209 bp, Pseudomonas aeruginosa
atgcgtattctctggatcctgccctactcgccctggcccaccaccagcggcggcaagacccgccagtaccacctgctgcgcagcctcgcggcacgcggccaccggatcaccgtgctgctgcacagcaagcagccggtgagcgccgaggaccgccaggccctggagcccttcctcgaacgcctggtcgtgctgccgcgccgaccgctgcgcagcctctccacgctgctcgccgcgctgttcgcgccctacccgctgctggccagcgtcaacggcctgtcggcggagctgcaacgcaccgccacggagttgctgcgcgagccctgggacgtggtccaggtcgagcacagctatagcttccagccctacgagcgaccgctgcgcgacgccggccagccgttcgtgctcaccgagcacaacgtcgagtcgtccctcggtgccgccacctacgaccgcctgccgggctgggcgctgcccttcgtgcgctacgaccagtggcgttaccgccgctgggaacgccgggtgatgagccaggcggcagcggtcgtcgccgtgaccgagaaagatgcgcggcagctcagcgcgatgctcgggcgcccggtgccagtggtggtcaacggggtcgactgcgagcacttcgccgccgcccggccgacgcccgaagcgcagcgcgtgctgttcctcggcaactacgaatacgcaccgaacgtcgatgccgtggaatggatgctcgacgagatcctgccgcgggtctgggcacactgccccgaggcgcgcatgagcgtctgcggctatgcgctgccggcggagtgggcgcaacgctggagcgatccgcgcatcgaatggcaaggcttcgttcccgacctgctgcaactgcaatcgagcagttcggtgttcctcgccgcgctgcgccatggcggcggttcgaagctgaaggtgctcgaggccctggccgccgggctgccgctggcgagtaccgcgcagggcgtttccggcctggaactgcgggacggcgaggactacctcggcggcgaatccgccgagcagctcgccaacgccgtggtgcgcctgttgcaggacccggcgcaggcccgcgcgctgggcgagaacggccgcgcctacgtacgtcgcgcgcacgactggagcgtcgccgccagccaactggaacaggtctacgccggcctcgccgaaggagcgccggcatgcgcatag

SEQ ID NO: 324566 - DNA, 1410 bp, Pseudomonas aeruginosa
atgctcggctccgccttctggctgaccctggccaccctgctcggcctgtgcctgggcttcgcccgcgaatggctgctggtggcctcctggggcgccggcgagcgcagcgacgccttcctcatcgccctgttcctgcccgaggccctgcgcatgtcgctggccggcggcgtgctcagcgcggcggccctgccactgttcctcgaacgccagggcgaacgtcgcctcgactggctggcggcgatcctcccggcgctgctcggtatcgccgtggcgctcagcctcctgctgctggcggcggcgccctggctggtgcgcttgctcggcccgggcctggccgagacggccagcgcccaggccgcggccaacttgcgggtcctcgcctggtgcgtgccggggctgatgctccatgcgctattcagcatccccctgcaggccgccgagcgcttcgtcctggccgggctcggctcgctgctgttcaacctgccgccggtgctctacctggccttgcatggccaggccagccagcccgaacaactggccctggcctgcctgctcggcagcctgctgatgccgctggtgctgctgccttcgctatggatcgagggctggcggccctggcactggcgcctgtccggcaccgaactgggcgagcttggcgggcgcatcgctccgctgctgctgagcaacgccgccagccagggcctggcgctggtcgagcggctggtggcctcgctgctcggcgaaggcgcggtgacctgggtcaacctggcgcgcaagctgatgaacctgccgctgatcgccctgatgagcctcaaccaggtgttgctcggcatgatgagccgacgccagggtggcgagcgtctggccctgcttcgccgcggcctggagaccgccagcctgctgaccctgccggccggggtcgggctggtcgctgccgcacccggcctggtggccctgttgctgccgcggcagaccgccggctcgccgttgccggcgctgctggcctggttcgccgtgccactggtgttcggcgcctggaatgccttgctggcgcgttacgcctacgccgccggcgatactcgcctgccgctgcgctgcgagctgctcggcagcgcgctgaacgccgcgctgctggcggtcctgccgttgattttcggactgccggggattcccctcgcggcccttggcggggtgctctgcaccgcgctgctgctgatgcgtcgccaggccctgctcggcgccctgccctgggcccggctgtggctactgaacgccctggccatggcgctcgccgccggcctgctgttccgcatcgacggtatctggctgcaattgggcctgggcaccgtcgccggctgcctggcgctgctcggcatggcgctctggctgcggccctggcgcaccgattga

SEQ ID NO: 324567 - DNA, 648 bp, Pseudomonas aeruginosa
atgactgagcgcaaacgctggctggccggctgcctctcggccctgctttccctgccgctggccgccgccgtgccgggcccggacgcgcccgccgacctggcgcgcggcaaggcgatggcgcagaaaatgtgctcgcgctgccacgacgacgacggcaacggcgggccgcggccgaaccgcagctacccgaagctcgccgggctcgaccgggaatacctgtacaagcagatctacgacctcaagacccagcgccggcgcaacccggccaccaacggccgcggcgaggagctgagcgcggcggacgtggtcaacgtctccgcctggttcgccgcccagcgcatgagtgccggcgagcagaccctggccgacccgaggcaacgcgaacgcggccgccagctcttcgagaacggcctggcgcagcgcggcgtaccgccctgcgtcacctgccacgggcccgccgcccagggcctggcggcgctgaaggcgccgcgcctggccgggcaatgggcggaatacctggcaacccagttgcacggcttccgcgacggcaagcgcggcaacagcgcgaccatgcgcgcggtcgccggcggcctggaggatagcgacatccaggcgctcgccggctacctgggcagcctggggccgtag

SEQ ID NO: 324568 - DNA, 1935 bp, Pseudomonas aeruginosa
ttggtaggtcaggctcggatcggcatcgccatagaccttggtcttggcatcggcgatcacattcagcagtgccttggtgatggtcaggttattgccctggtagttcagggtgtaattgctgctgaccaggcccagtccaccctggttgatgccgtacacgccgacattctcgccagccacgcggctcaggctgccgccgttgagcacggcaccggcggtgtcgccgttcttcagcccggacacctggtaggtcagtgccggatccaggtcgccgtagaccttggtcttggcatcggcgatcacgttcagttgtgccggggtgatgcgcaggtcgttgccgacgtagctgagggtgtaattggccgtgttgaggcccagcccgccctggagtatcccgtagttgccgacgttctccccggccacccggccgaggttgccgctcagcacgccagcggcggtatcgctgttcttcaggccactgacctggtaggtaagggtcggatcggcgtcgccatagaccttggtcttggcgtcggcgctgacaatcaattgcgccggcgtgacggtcagcttgccgtcctggcgcaccagttggtaacgctggctgaaatactcgctgccattggcgttaccggtgatcgcgtactgcccgacgttcgacgcctgggtcgccgtggtgctggcggtcgcctggtagaggtcgttgaactggctgttgacgtaggcgtcgatggcgttgatgccggacatcgtggccgtcagagtcggattcacatcaccgtagacgcgggtagcgtcattggcggtcagggtggcggtctgctggcgggaaaggatgtcgccggcagtggtggtggtcttgaacatctccacctgggcgcgctcggcgaagctgttgaacgctccctcgcgcatgaacaggtccaggcgggtatcgacgcggctggtcttgccgccgaggccgaagatcagttcctcggtcaggccggtgccgacgtcgtactgcagctcgtcggtcacgccgatcacgccgccgaagcccttgacgccccaactggtgccccagtttccggtccaggtggtgacgctgccgttgccggcggcgacggtgaacccgctgggcgcaccgccgttcggggtggcggtgacgttgctgccgttgacctggtagcgcaggttggtcaccaggtagtccgacgagtcgttggtcgggaaactggcggaaccgctgacccgccgatagggcagcgcggtgaacaccaggcggtcgaactcgctgttgccgtcggcagtcagcgtgtagttgccggtggtgccaacgctgttggcctcgagaatccgcgtaccgacgctggagacgatgttctgcgcggtgccggtcatgctctggttgatgaacggatcgaacaccgtgccgctcgtggtcacgccggtggcgttgctctgccggtacttgagcgtaccgttgaaggtctgcagcgccaggttgccggcgtagttgtcccaggaagccaggtcgatgctaccggcacggccggcgaggttggcggcgatcagcgcggtaccggcctgctggctgatcttgccggcggtgctggtctgcatccacagggtgccgctgcccaggtcgacgatgccgctggtctgcggcgtgccgccgctgaggaagctgatgttgccgccggcgcggattgccaggctgccgttgcggaacaggatcggcgcagagatatccaccgcaccggcaggtccggtggcgatcagctccaggccgcgactggcgccgcccaggttgctggtgatcagcggcgcttccaccgacagccggtcgctggcgctgagggtcaccttgccgcctgccagcgccccggtaaccaccgaggcattcaccgtcgcgtcgccgctggcgccgttggcgccccccaccgaacctga

SEQ ID NO: 324569 - DNA, 600 bp, Pseudomonas aeruginosa
atgctcaggttgaccttgccggaggtctccaccaggccgccgttgccgccctgggcgccgccgcgcgcgaggatccgcccgtccatgcgggtattgccgtcggaccagaccaccgccaggccgccattgcccttgccggtagccgagacgtcgatgctggcgcccttggccagcgtagcgttcttcgctcgtggcagctcgccgcggccctggaagtcgccgccgatgcgcacgctgccgccctgtgcggcgccgcgggcgtcgatgctagcggtgctcgccagggccacctgctgcccgctgaccagcacgtcgccgccgctcttcggaccgctgacgtcgatcttgccggcgacctggatgtccccggacttgcttaccagcgccacgctgccctcgcgcacctcggtaccgcgggcgaggatcacgccggacaggttgaccgcgttgtcgaccacccgggaagcctgctcggcggtgatcagcacgctaccgccgtcggcctggatcgcgccgccgttgctgaccagcgcctgggcatcctgcggcttgcgggtaaccgggtcggtcacggcgatggacaccaggccatcgccgtag

SEQ ID NO: 324570 - DNA, 972 bp, Pseudomonas aeruginosa
atgagccatgccctgcgcgccgttttcctcgaccatgcctccctcgacctcggcgatctggacatgcgccccctgcacgccgccttcgacgagctgcaactgcatgccgccagccaaccgcaggaagtcgccgcgcggctgcacggtgcgcgggtcgcgatcagcaacaaggcgccgatcgacgcgcaatgcatcaccgcctgcccagagctggaactgatcctggtcagcgctaccggcaccaacaacatcgatctcgctgccgctcgcgagcgcggtatcgtcgtcgccaactgccatggctacggcacgccctcggtagcccagcacaccctcgcgctgctactggccctggctacgcgcctgccggactaccagcaggcggtacgcagcggccgctggcagcaatccagccagttctgcctgctggacttccccatcgtcgaactggaaggcaagaccctcggcctgctcggccatggcgaactgggcggggcggtggcgcggctggcggaggcgttcggcatgcgcgtgctgctcggtcagttgccaggacggcccgcccgggcggaccgcctgccgcttggcgaactcctgccacgggtcgacgccctgaccctgcactgcccgctgaccgaggacacccgcgggatgctcggcgccgccgaactggcgctgatgaagcctggcgccttcctggtcaataccgcccgtggcggcctggtcgacgaacaggcgctggccgacgccctgcgcggcggccacctgggcggcgccgccaccgacgtgctcagcgtcgagccgccgagaaacggcaatccgctgctggcccccgacatcccgcgcctgatcgtcaccccccataacgcctggggcagtcgcgaggcgcggcagcgcatcgtcggccaactggcggaaaacgcagaggcatggaaggccgggcgcgccctgcgggtagtcaacgccggctga

SEQ ID NO: 324571 - DNA, 999 bp, Pseudomonas aeruginosa
atggaccctcgcagtgaagtgctgctgcgccagcgccacctcttcgcgaccccgctgctgctggccggcctgcccgccgacgacctgctcgccgagctaccgcaggcccagggctggagctggcacgccggcgagcaggcgcagttggacgcccgcttccccggccgtagccgtttcgacacgcgcgcgccgactggcgcctggacttcggccgttctgttcctgcccaagtcccgcgaactgaccgactacctgctggccagcctggccgcccgcctgcccggcggcgaactcttcctggtcggcgaaaagcgcggcgggatcgagcgcgcgagcaagcagttggccgcctacggcaagccccgcaaactggatagcgcgcggcattgccagctctggcaggtgcgtatcgaacaggcgccggccgagcccgacctgcacgccctggcccagcgctacagcctgccgctggccgatggcgagctgcaggtggtgagcctgccgggggtgttcagccatggccgcctggatcgcggcagcgcgctgctgctggggcaactgcaagccctgcccggcggccatctgctggacttcggctgcggtgccggcgtactcggggcggctctcaagcgtcgctaccccgccagtcgcctgactctgctcgacgtcgacgccttcgctgtcgagagcagccgactgaccctcgccgccaacggcctggacggcgaagtgatcgccgccgacggcatcgacggcgcgccgcgcgaactcgccgcgatcgtcagcaatccgcccttccaccagggcgtgcacaccgactaccaggcctccgagcgcctgctgcaacgcgccgccgagcacctggcgccgggcggcgaactgcgcctggtcgccaacagcttcctgaagtacccgccgttgatcgaacgccacctcggcccctgccggacactcgccgaaggcgacggtttccgcatctactccgcccgtcgctcctga

SEQ ID NO: 324572 - DNA, 1464 bp, Pseudomonas aeruginosa
atgactgacctgaacgccagccagggccagcaattgcggcgggtgctcaagccgcgccacctgaacatgatcgccatcggcggctccatcggcaccgggctgttcgtcgcctccggggccaccgtggccaccgccgggcccggcggtgcgctgctttcctacgcactgatcgggctgatggtgtacttcctcatgaccagtctcggcgagatggccgcctacatgcccgtttccggctcgttctgcacctatggcagccggttcgtcgaagatggcttcggtttcgccctcggctggaactactggtacaactgggcggtgaccatcgccgcggagctggtggcagcgcaactggtgatgagtttctggttccccgaggtgccgggcatctactggagcgcgatcttcctgggcatcatgttcggcctcaacgtgatttccgcgcgcggcttcggcgagagcgaattctggttcgccctgatcaaggtagtcacggtggtgatcttcatcggcgtcggcctggcgaccatcttcggcatcatgcatggcgtggagtcgcccggcttcagcaacttcaccatgggcgacgcgcccttcgtcggcggcttccaggcgatggtcggggtggcgatgatcgccggcttctcgtttcagggcaccgaactgatcggcatcgccgccggtgaatcggaaaatccgcggaagaacatcccgatcgccattcgccaggtgttctggcgcatcctgatgttctacatcctggcgatcttcgtgatcggcatgctgattccctacaccgacccgaacctgctgaagaacgatgccagcgacatcagcgtgtcgcccttcaccctgctcttcgagcgcgccggcttcgccgcggcggccggggtgatgaacgcagtgatcctctcggcgatcctctccgccggcaactccggcatgtacgcctcgacccggatgctctacaacctcgccctcgagggcaaggcaccgcgcctgttctcccgcgtctcgcgcagcggcgtgccacgcaacgcgctgtacgccactaccctggtcggcgccctgtgcttcctcacttcggccttcggcgacagcaccgtctacacatggctgctgaacacctcgggcatgtgcggcttcatcgcctggctgggcatcgccatctcccactatcgcttccgcaagggttacctggcccagggcggccgcctggaagacctgccctaccgggccaagctgttccccttcgggccgctgttcgccttcgccctgtgcatggtcatcaccctcgggcagaactaccaggcgctggtgggcgaacgcatcgactggatcggcctcctcgccacctatatcagcctgccgctgttcctggcgatctggctgggataccgctggaagaagcgcgcacgcttcgttcgctaccacgaaatggacgtcagcccgaccaatacctga

SEQ ID NO: 324573 - DNA, 2139 bp, Pseudomonas aeruginosa
atgaagctcaagtcgatccagttttctgtcgccgccctcgccggcgccagcgttctaagcgtcgtcgtggtgctggtgctgtacgccctgttcgccggcgcgcgaacgcaggagctggtgcagcaacgcacccagggcctgctggagaaggtcatcaacgagcgcctggtggccctggcccgcgcccaggtcagccagatccagcgcgagctggagtatccgctgacggtggtccacggcctggccaacagcacccgcctgctcggcgagccgggcgccgacggcatgccgcagctgaacgccagccgcgacgaaatctccgcgctgctgcgcagcaccgtgcagaacaaccccaagctgctcgacaccttcatggcctgggaacccaatgccttcgataccgatgccgccttcgccgggcaacccggcaagggctacggcccggacggccgctacctgccctggtggtatcgcggcgccgacggcaagccgatcgtggaggccatggccgacagcatcgatagcgaaaagctgctgcccaccggggtgcgcgagaacgagttctatgcctgtccgaaagagaacaagcgtccctgcatcatcgacccggccccttacgaaatgggcggcaagaccgtgatgatgtcgtccttcaacgtgccgatcatggtcggtgaccagttccgcggcgcagtcggtgccgacctctcgctggccttcatccaggacctgctcaagcgcgccgaccagcagctctacgatggcgccggggaaatggcgctgatcgccagcaacggccgcctggtggcctacacccgcgacgacagcaagctcggcgagcccgccggcagcgtcctcgacggcaacgaagtggacaacctgaaaaacctcacggtcgaccagccgctctacgacatcgacgccgagcacggccacatcgagctgttcctgcctttcaccatcgccgacagcggcgtgcgctggaccctcatgctgcagattccccaggcggcggtattcggcgaactgcagcaactccagggcgagctgagcgaccagcgccagcaggatatcctcggcatgagcctggccggcctggtggtagcggccctcggcctgctggtggtctggctggtcggctacggcatcgcccggccgctgcgccaattggtcggcatgctcgacgacatcgcccagggcgaaggcgacctcacccgccgcctgagcagcgagcgcgccgacgagctgggctccatcgccaagggcttcaataccttccttggcaaactgcagaacatgatcggccaggtggtgcaatcggtgcagaaggtcagcgactcctcggagcacaccgccgacatcgccatccgcaccaaccagggcgtgcagcagcaactggcggagatcgaactggtggccaccgcggtccacgagatgaccgccaccgcccaggacgtggcgcgcaacgccacccacgccgccgaggcagccaaccacgcggaccaggccgcgcaccagggcaagcagatcgtcgaaagcagctcggcggcgatccaggccctggccagcgagattggccgcgcggtcggagtggtgcagaacctggccaaggacagcgaaaacatcaacgcgatcctggtggcgatccgcggtatcgccgagcagaccaacctgctcgccctcaacgccgccatcgaggccgcccgcgccggcgagcagggtcgcggtttcgcggtggtggccgacgaggtacgcaacctggcgcagaagacccagcaggccaccgaagaaatccagagcatgatccagcagttgcagcagggcacccgcgacgtggtgaaggtcatgcaggacagccaggagcgcaccgacgacagcgtgcgccatgcgcgccaggcggccgaggcgctggagtcgatcacccaggcggtatcggtgatcaacgacatgaacacccagatcgccagcgccgccgaggagcagagcgcggtggccgaggacatcaaccgcaacgtcgccaacatcggccaggtcgccaaccaggtggccggcggcgccgacgaggcctcacaggccagcgccgagctgacccgcctggccgagcagcagcggcgcctggtgaatcagttcagggtctag

SEQ ID NO: 324574 - DNA, 279 bp, Pseudomonas aeruginosa
atgtccttgcaagccttgtgggcgctgttcctcgcccatcccgcgcaggccgtgaacggccttgcgctgttcttcggtgtcgccggcgcctggctgctgctggccacccgcgcacgcgagcgtcgcgccctggcgcgctgggccgcggagggcgaggcgggggaggcggcattgccgatggacgaggcgaccctgcggatcaacctgttcttctaccgattcggcaccgcctgcctgggcctggcgctgctggtcagctgggccagcacgcggctctga

SEQ ID NO: 324575 - DNA, 1473 bp, Pseudomonas aeruginosa
atggcgcaaaacgatcacgaaacagtcgacatgctgctggtaggcgccggcatcatgagcgcgaccctggcggtcctgctcaaggaactcgaccccaacctgaagatggaagtcgtcgaactccaggagtccggcgcgatcgaaagctccaacccgtggaacaacgcgggcaccggccacgccggcctgtgcgagctgaactacaccccgcagtcggccgacggcagcatcgacatcaagaaagccgtgggcatcaacaccatgttcgaggtgtcgaagcagttctggtcgcacctggtcgccaagggcaccttcggctcgccgaagaccttcatcaacccggtaccgcacctgagcttcgtgcgcggcagtgaaggcatcgcctacctgaagaagcgcttcgaatcgctgaccaggcaccacgctttcgagaccatggtctactccgaggacaaggccaccctcgccgagtggatgccactgatgatgccgggtcgtccggccgacgaagcgatcgccgcgacccgcgtcgagggcggtaccgacgtcaacttcggcgccctgaccaaccagctcctgcaacacctggcgcaacagccgggcgcgcagatccgctacaaccagaaggtcacccacctgcgccgcgccgataacggctggcgggtcaccgtcaaggacacccgtaacggcggcgagccgctcctgcaactttccggcatcccggaaggcaagggcttcggtggtttcccggtgagcggccagtggctgcgctgcgacaacccggaaatcgtcaagcagcaccaggccaaggtctacagccaggccgaggtcggctcgccgccgatgtccgtgccgcacctggacacccgtgtggtggacggcaagaaatccctgctgttcggcccctatgccggtttctccaccaagttcctgcgccatggctcgttcctcgacctgccgctgtcggtacgcccgggcaacatcctgccgatgctctcggtggcccgcgacaacatggacctgacccgctacctgatcggccaggtcatgcaatcgccggaacagcgcctggaagccctgcgcaagttctaccccgaagccagagccgaggactggcgcctggaagtcgccggccagcgcgtgcagatcatcaagaaggatccgaagaaaggcggcatcctgcagttcggcaccgagctggtggccgcccacgacggctccatcgccgccctgctgggcgcctcgccgggcgcctcggtgaccgtctcgatcatgctcggcctgatcgagcgctgcttcccggagcaggcccgctcgccggagtggagcgccaagctgaaggaaatcttcccggctcgcgagaaagagctggaaagcgacgccgagctgtaccgcagcgtcagcagccgctgcagcgaggtgctggaactgaccgcgaagaacgacgtgcaggccccggtcaacgccgagtga

SEQ ID NO: 324576 - DNA, 291 bp, Pseudomonas aeruginosa
atgcgcaaagacaagaaacagatcattggcgaagagatcagtgacgagtcgatcaagctgttcctcggcgtcgagccggccgacgacacccccccctcgctgcacaagctgatcaaggcctatcgcggtctgcgcatcgacgacttcgagcgcttcctcaccttcttccgcgaggccggctacgatctcgacgcgcgcgacgccaagggcaacgacttcgtcgccctggtcgccgaccagcgccaggccgtgccctacatcgaagcgctgcaggcggccaagggcgcctga

SEQ ID NO: 324577 - DNA, 1212 bp, Pseudomonas aeruginosa
atgcccgagaatctactcactgacgccaaggtcaagtcggtcaagcctgctgatcgagactggaaactttcagacggcgggggcttattcctgctggtcaagcccaccggcggcaagctctggcggtggaagtaccgcctgcaaggcaaggaaaacctttttgccatcggcagctttccccaagtaagcctcgcagaagcgcgtgcaaccagagagaaagcacgcgctctggtcaagcaaggcatccaccccgcccatgagcggcagcaggtcaagcaacgcaacctgaaggcgctggaggaacgcaagcgcgcccgggaaagctcgttcgccaaggtggcgcaggcgtacctggccgaaatcaagcctgccttcgcgttcagctcttaccgcacgaaagaatcccgcatcaggaagtacctgtcgcccaagttcgacgggatgccgatgagcgacattggcgtcaagcagatccgcccactgctggaagagtgcaaggcccatggcgcgtgggcagcgatccatgtcaaaggcgatctttcggccatcttcgagttcgcggtggtgcgaggcctggttgaggccaacccgatcccgagcctgcgcgggctgcttcgcgtgccggccagcgaaagcaaggcggcgatgacgcgcgagcagatccagaagttttatcaggcattgcgcggctacaggggctatccggaaactgcgctgtgcctgcggttgattgcgctgaccgcttgccgtcccggggaagctgccgatgccgaatgggaagagttcgattttgaggatgccgtgtggcgtcggcctgcagccaagatgaaggcgcggcgagagcatgtcagcccactgtctgcgcaggccattgcagtactgaaggacttgcagcgcatcacgggtggcggacgctacttgttcccgcaccggagcggcaaaggcttcaccacgcccaaccggcttacctacgccatgcgcgatatgaacctgggccggggaacgacgccccattgctggcgcaccaccttttcgacctgggccaacgaaaacgggttccgacccgacgccatcgagcggcagcttgctcatgtggaaagcaacaaggttcgggcgacctacaacaaggcgctgctgctggatcagagaaggtcgatgctacaggcttgggcgggctacctgagtgcgacagagcacagcggcaccgaataa

SEQ ID NO: 324578 - DNA, 1101 bp, Pseudomonas aeruginosa
atgcactcgcttacccccgagtacctcaccgcgcttcgcttcgatggtacccaggccgccacactgcgcgcattgggcgagtatcaaggcaagcaacagctctacgcagcccagtctccggaagccctcaagggcctgcgccagatcgcggtggtcgaatccaccgaatcatccaaccgattggaaggtgttgtcgtcgcaccctcacgactgaagtctctggtcatccgcaatgcagcaccgaagagtcgctccgaacaggagatcgccggctaccgcgatgccctggcgttgatccacgaatcggccgcgcacatgaccttcaacgaaggcgtggtgctgcaattgcacaccatgctgtatcgctacatgccgcaggccggcggacgctggaaagccaccaacaacgacatcatcgaacgccatccggacggcacgtcacggctgcgcttccaaccggtcgctgcgcatctgacgccgatggccatggccgatatgacccggcactacgccaccgcactggaccaacatctggccgatccgctggtgctggcacccctggcgatgctcgacttcctatgcatccaccccttccccgacggcaacggtcgcatgtcgcgtttgctaaccctgttgctgctctaccacttcgactatgccgtaggccgctacatcagcctggagcgcatcttcgaggaaaccaaggaaggctattacgagacgctggaagccagttcgcagggctggcatcaagggcagcacgacgtcaaaccctggcttgactacttctggggggccttgctgcgggcctaccgcgagttcgaggagcgtgtcggcaccatcgagcgtggccgaggcagcaaaggcgaccgggtgcgctcggaagtcctggcgcgcgccctgccgttttccatctccgagattgaagaagcttgcccgggcgtgagtcgggacatggtgcgactggtactgcgggcgatgaaatcagagggtttgatcgaatcgaccggcaaagggcgtggggcgaaatggaagcgcatcacggcaggcacctccggtagtacggcggttctggcgactagccgcaagatggatcagtga

SEQ ID NO: 324579 - DNA, 5274 bp, Pseudomonas aeruginosa
atggataacgttttccaattccgcgaccagctcatcgaacgctatggtagcttttcccgcagtttcgttcgtatcgccgcacccgatatccaggccgaggtagaacatcagtacgcgcagggccgctactggcctgagccgctggtgcagatcaacccgaactaccaacgtcaggggaccgtgcagcaactggtggagcagggcatcttggattctgcctgcgcagacattttccaggtcgggaaaactgaaggttcgccacaacctctgcatctttacaaacatcagatggaagccttggccaaaggccagggacgtcaaagctatgtcgtcacgaccggtacggggtcggggaagtccctgtccttcttcatcccgatcattgatcgcattctcaaggccaggaaatccgacggcaaagcacgcaccagggccatcgtcatctacccgatgaacgccctggccaacagccaactggaagagctcgacaagtttctgcatggctatgcgccagagcttcgccccttcaccgtgaagcgctacaccggccaggaaagcaaggcggaacgcggtgccatcgcggatgacccgcccgatatcctgctgaccaacttcatgatgctggagtacatcctcacgcgtttcgacgaagtggatcggcgtgtggtggagcactgcgaggggcttgagttcctggtgctggacgaactccacacctatcgtggccgtcagggtgcagacgttgccttgctggtgcgccgcctgcgcgaacgtctgaaggccgggcaactggtctgcatcggcacttcggccaccatgtccagttcaggtagtcaggccgaccgcaaccgcgtggtagccgaagtagccagcaagctttttggcacccagatcagcgagcaggatgtcatcggcgagaccttggagcgagtcaccaacccgctcaaggaggtcaacgccatccgcgctgaactaccggcggccattacgcgcgagcaggatatctgggccgacttcgacgccttccgcaacgacccgctatccatctgggtggaattgaacctgggtatcgaactgccggccgacgagcctccccgccgcgcacggcccatgatgctggaagaagcaagccgacatcttgccgaagacgcgggttgccagcctgaagctgcccgagccgcgctacagcgttttctcgtggctgcccatgacgtgcgcacgtctcagggcaggccaccgttcgcgttcaagctacaccaattcatcagcggtcccggcaaggtgctcaccaccctggaagcacgcggcaagcgtcatgtcacgctcgatgcccagcgtttcgcaccggggcgccagcaagaaaatgtgctgctttaccccacgcacttctgccgcgattgcggccaggaatacctgcctgtttggcactcacagcaacctgtcagcttcagctcgcgtgaaatcgacgacatcgcagcagaggacgacgccagctatggctttttgtgccctctggtgcccgggcagcaatatggcggcctgctcgaagacttgccggaaacctggatcgacctcagtcgcagcgaacccaaggtcaagcccgcttataaaaatgccgttccctatatggtcactgtcgatgccaaagggcaaacgggctcggggacggagttctggttcatccccggcaagttccgcttctgcctgaactgcggcacgacacacgaagcccacggtaaggatgccaaccgcctctccagcctgtccggcgaaggccgctcctcggccaccaccatgattgccctggcggccttgcagcaattgttcacgcttcccgaaccgtcgccaggccagcctgacccgcgcaagctgctcgggttcaccgacaaccgccaggatgccgctctgcaggcgggacatttcaacgactttattttcctgctgacgctgcgcgccggcttggtcggtgccctgcagggcagcggcggtcaactcgatgaagagcacctagccgaaagcgtattcaaggccctaggttttcaaggagtcgatgaagcgaccctggtggagtatctgcgtacccccaagctcatggggcttgcccggcaggaagcgcaacgcaccttgcgcttcatcatcgcctaccgtctattgcgtgatttgcgccacggctggcgtttcaacaacccgaatctggatcagctcggcctgttgcagattcgctatcgcgacctggatgccttctgcgcggacaccagcatctttgctgccaacagcatcctggccggattgacggccgcgcaacggacaggtctgtacgagcggctgttcgacaccctgcgccgccacctgtgcctggaaagtcgttacctcgatccggtcgagcaggacaaggcacgcaccaacgcccacacctacctgaatgaacgctgggccttcgcccccgacgaaaagctcgataccggtcgctaccttatcctcagcaagcgcccggaatacaaaaaggggggtactgagcatctggtgacgggcggcccgcgctcccgtctgctgcggcaaatcaagaccgccgccttctggcgcgacagcgcctgcgccagcgaggtcgcgcagtggaaggatgccgaatgggccgagctgatcgaagccatgctggagtgcgccaagcactacggctacgtgcagcgccaccccatcgatgcccaactcgccggttggcgcttgaacgcagcagccctggactggtgcctgattgccgatcagccgcaaactgacagcagccgcatcaatcagtatttccgcgccctgtacctcggcattgccgacctgctgcaacagccctcgcatccactgttcgacttcgaggcccaggaacacacggcccaggtggatgcgccacgccggcaactgctggaacagcgcttccgctataccgaaaaggataggcaggactgggcgcagaacccggctcacgaagcgcctctggagcgtctgccggtgatgttctgttcgcccaccatggagctgggcgtggacatctccgcgctcaacactgtgtacctgcgcaacgtgccgccgactcccgccaactacgcccagcgtagcggccgagccggtcgctctggccagcaagcgctggtcatcacctattgcgcggcgctcagtccgcatgaccagtggttcttccacaatgccgagcagatggtgcacggcgtggtgcgcgcgccgaccctcgacctgactaatcgcgatttgatcgacagccatctgcaagcagtctggctggccagtacccaggtgccgctggatgacagcatcgcgcccatgctggatctcgatcagcccggcaagccactgaaacagcccttgcacgaagcgctgcgctcacctgccgtccagcagcgagcgttggccagtgcgagacgggtcatcgaccaactcgcgggtgagctcgaaagcacctcctggttcacccaagactatgtgcgccaggtcatcgacaacgccgcacaggcattctccggggcactggagcgctggcgcgtgctgttcgatgccacccgccagcagatggacatggccgaccgtatcgtcaagagccacacagcctcgcacacggagcgacagaatgcccagcgccgctatggcgatgccgcgcgccagtacgccgtgttgctcaagtccggcaacggtcagaacaatgacttctacacctatcgctacctggccagccagggcttcctgccgggctacaacttcccgcgtctgccgctaatggcctggattcccgcccggggcggtcagactgccaatggcaaggacgacgaaggcagcatggtcagtcggccgcgctttctggccctgtccgagtttggcccacgcagcctcatctaccaccagggccgtatgtaccgcgtggtgcgcgccaagctcaacgtcggcaataccgaccacatttccggcaacagccagttggccactatcgcctcgctggtatgcagccagtgcggctacggtcatctcggtgaacctggaggagaacagccactggtcaaccgttgcgaaaactgcgacgccttgctgaccgagcacgattgggtgcgcgaactctatcgcatcgaaaccgtggagaccgtagccaccgagcgcatctccattaacgacgaggaacgccagcgtcagggcttcgagctgcaaaccacctaccgcttcctgcccggccccgatggccggattcagcagcagaaagccgttatccggcagagcggcgaactgctgggcgaactcacctatgcccccgccgcacaaatctggcgtatcaaccgtggctggcgcaggcgcaaggacaaggagcaactgggcttctacatcaaccccatcaccggtacctggagcaagcaggatgcaccggatgcggaagacgacaagggcagcgacgatgccttgatggagaaagtgcccaatcagcgcattgttcccttcgtcgaggaccaccgtaatttgttgatcctcgcgcctctgcaagcgttatcgctggaggccatggccacgctgcaggcagcgctcaagcgcggcatcgaaatgaccttccagatcgaggaatccgaactggttgccgaacctctgccgaaatccgacgagcgtcgcgccctgctgttctatgaagccgccgaaggcggtgccggcgtcctcacccgcctggccaacaaccccgccgatctggcccttgtggcagacaaggccctgcaactgatccactatcgcgccccgcttaacggcgtctgggctctggaagacctgccgtcactggaacgcagcgatgaacttggcaatcatcagtgcgaagccggctgctaccagtgcctgctgtcctacttcaaccagcccgaccacgagcacatcaaccgccgcaaccccgatgtgctcaagttgctggtggcgctggccaacgcccaggtgcagcccccgatggacagcccgaccgctgcggcctccggtgcgtcaggcgacgagccgctcgatgcctggctgaccgcgctccggcaggcaggcgcaatacaacctgatgtactcagcgtgcccgtcaacaacggcgcagccatcgccgccgcccaatacaaggcatctcgtgccctggtattcctgtccacggtggatgaggagaccaccagcgtattgcgggacaaaggctggcaggtgctcgatttttcggaggcttcacgctggtcacaacaattcgccgcgcacgccgatgtgttcggttccaaggaataa

SEQ ID NO: 324580 - DNA, 2784 bp, Pseudomonas aeruginosa
atgacaaccctcgaacacgacttcctgcccggcaacctggtgcgcgcccgtggccgcgaatgggtggtgcaaagcgattctcgccgcgactggctgcgcctgcgtccattgagtggcgctgatgacgaaagcattgccctggttcccgagttggaactgcaccccgtcgagcccgccacctttgcctggcccgaccccgtgcgtgcaggcaaccacgccgccgcactgttgttgcgcgacgccctgcgtctgaccctgcgcgccggagccggcccgttccgctccttcggcaatattgccgtggagccgcgcggctaccagctcgtgccgctgctgatggcgctgcgcctgtccaccgtgcgcttgctgattgccgacgacgtgggtatcggcaagaccatcgaggccggtctgatcgcccgcgaactgatggatcgcggcgaaatcgcccgcctggccatcctctgcccgccgcacctggtcgaacaatggcaaagcgagctggaaacccgcttcaaccttcaggctgtggcgttgacctcagcttccgccccccgcatcgagcgcgagctgccgcatggtatgcgcctgttcgactaccaccccgtggtcgtcgtcagcctggattacatcaagagcgagagccaccgcgaacaattcctggctgccgctcctgagtgcatcatcgtcgacgaggcccacacctgcaccagtagcggtgcaggcaagcaactgcgcttcgaactgctgcaacgcttggcgaaagatgagcaacgccacctgatactgctcaccgccacgccgcactctggcgacgaagccgccttctacaacctgctgtcgctgctcgacccgcgctttgccgccttgcaaggccgcatgaccacagccgacccgttgcgccaggaactggcccgccacttcgtccagcgccgccgcaaggacatcgccgaatggcaggccgaaaccaacgacggacgcggttttccccgccgcatgaaaaccgagcttacctatcagctcagcggcgaatggggcgcgttcttcgacgcggtgcaggattactgccgcgaactggccgaaaccatcgaacagcagcaacagcagggcggcgcccgcctcatctggtacgccaccctcgcgttgcttcgctgcgtggcctcgtctcccgccgccgcggtcaaagccctgaccacacggctggaaggcacgcagcccgacgacaacctccttggcgacgaacgcctgcacgacggcgaggctgacgacctctccagcaacgatttggagccgcccgcccaagtgcaggacgccgcgccgcgcctgcaaaccctgatcgctgaagcgcaacgtctgtccggcaaggccggcgatcccaagctggccgcactcattcagcatatcggcccgctggtaaaagacggttaccaccccgtggtgttctgtcgctacgtcgccaccgcccattacgtagccgagcatctcaaggccgcctttcccaaggcctccatcgaggccgtgaccggcgagctcacgcccgaagaacgccgcgagcgtgtggatgatatggaagatgccgagcagcgcatcctggtcgccaccgactgcctctccgaaggcatcaacctgcagcacctgttcaccgccgtcgtccactacgacctggcctggaaccctacccgtcacgagcaacgcgaaggccgtgtcgatcgtttcggccagcatgccgaagaggtgcgctgcaccatgctctacggccaggacaacccggtggatggcttcgtgctcaacgtcatcctcaagaagggcgaagccatccagaaggagctgggcgtgctggttccgctacccgaagacgaggcccgcatcaatcaggcgctagtcaaggccgccctgatgggccgtgagcgaatggcagcaccctacacgcctgatctatttgccgaagccaacgtcgaactacagccactgcaagcgcaatggcaagacgccctggaaaaagccaaggccaaccgcaccgtgttcgctcagcgccgcatcaaacccgacgaagtgttgcccgagtggcacaaacagcaacaagccctgggcacccaggccgacgtgcagcgcttcctgcaaagtgcctgcgtgcgtctgggcgcgccgctggaagctggccgcaagcagaccgcacgcttcctgccgcagcacctgcccgaagccctgcgccaacgcctggccgatgaaggcatcaccgcccccctgtccatcgacttcagtgaactgcaccgcagtcacccactggtgggcctgctggcccagcacctgctggaaggtgcgctcgggggcgaaaatccactggctgcccgctgcgccgccaccctgactgaagacgtcgaagtcgtcaccaccctctatctgctgcgtctgcgccaccagctcagctacgtgcgccgccgcgaacccttccagatgatggccgaggaaaccgtggccctggccgtgcagggccgcaacgctccgcagtggctggccgatgacagcgtgagccgcctgctcgaatgcacgcccagcggcaacttgcctacggaagccgtgcaacgcgaagtacgcatcgcgctcgacttcctcgctgcgcaccctcagcaactgcaagcgctggcccagcagcgggccgatgccctgctggccgaccaccaacgtgtgcgcgaggccacccgcgacgtaggccaatacagcgtcagcccctgcctgcccgtcgatgtgatgggtgtgtacgtgctgctgcctgactcgctataa

SEQ ID NO: 324581 - DNA, 4473 bp, Pseudomonas aeruginosa
atgaaacgcactcgcaaaatccaggccacgctgaacctgcctaccctaaaactcgaaggtgggctgttcctgcccgaccaactggaaaaggccgcccatggccgcgccagcgcacagcttgaggccgattacctcatccccaagggcgtcaagctcaaggacgaatacagccgcgccttccagatcgcctgcgcccagtggcagcacttcgccgcgcagatggaacgcgccgacctcgatgccacgcagctcaccaccgctttcattgacgaactgctgcgtcacgctttcggctacaccgccctacatcctgcgcaagcgcagcaggtaggcgaactgcgctacccggtcagccttatggccgaccacttccccgtgctggtcgccccgcacaccctgaggctggacgatgccgacgcgcagtttgccgtgcagggcagcggcaaccgcaagaaagcgccgttccaggccatgcaggaactgctcaacgccagcgaaccgttgcaatggggcatcgtcagcaacggtaaacaactgcgcctgctgcgcgacgccgcctcgctcacccgtcccagctttctcgaagtggatctggccgacctgctcggcggccagcgctatgccgaatttgccaacgtctggcgcctgctgcacgccagccgcgccccactactcccctctccatccgggagaggggcagggggtgagggcacctgcatctgggaacaatggcgtaacgaaggccagatcgagggcacccgcgtgcgcgatggcctgcgcaacggcgtcgaacaagccctgctgaccttcggcacgggcttcctgcaacaccccgccaaccacaccctgcgcaccgccctggacaatggctcgctcagcaaggacgcctacttccagcaactgctgcgcctgatctaccggctaatcttcgtctttaccgtggaggagcgcggcgtgctgcatccgcaggaggatagtccggatgccctggccgcccgccgtgcctatgccgaaggctacgccctggcccgcctgcgcgatttctgcctcaagcgccgcgcccgtacccggcacgacgatcaatggcaggccatccgcatcgtctttcgtggcctggcccagggcgagtcacgcctggcactgcctgcattgggcggcctgttcgcccccgagcaatgcccccatctggatatcgccagcctggataacgctcacctgctcgcagccctgcaacacctacgctgggccgtagtcacacagggcaaaggcagcagcctgaccccggtggattaccgcaacatggggccggaggaactcggcagcgtctatgaaagcctgctggaactggtgcctagcatcgacctgccagcccgcacgtttggctttgtcggccgcaccgaggagggcagcaccgccggcaacgcccgcaagctcaccggcagctactacacccccgacagcttggtgcaggcgctgatcaagagcgcgctggaaccggtcatcgaacagcgcctggccgccaacccggccaaccccaccgcggcgctgctggccatccgcgtcatcgacccggcctgcggcagcggccacttcctgctcgccgccgcccgccgtctggcggaaaaactggcccagttgcgcagcctcgaaggcgggcaggaaggcgccatccagccgcaggactaccgccatgccctgcgcgaggtcgtgacccactgcatctacggcgtggaccgcaaccccatggccatcgaactggcgcgcatggccctgtggctggaaggttttgaagaaggccgaccgctgggttttctcgatcaccacctgcaagtcggcgacgccctgctcggcctgaccgacctgcaagtgttggagcaaggcatcgccaaggatgccttcaagcccctcagcggcgacgacaaggatgtgtgcaaggcattagccaaaaccaatgccgccgcgctcaaaaacctggagaaaaagcgcaccgcgcacgctttcggccagaccgagctggtgcagcgacacgacaacggcctcgccgcgttacgcgcgctggaggctctgcccgaagacaacaccgaacagatcgccgccaaggcgcaagcctacgagcactacctgcacagcgcccgcaccggcaggctggcccaggccgccgatctgctgctgggggcctacctgctgcccaaaaccgaagacaatgccctggccatccccaccacggccacgctctacctgaccctgctgggcaatgccctgcctgccgacctgcagcccgccctggcggccgcccgacagatctgcgcagaggcccgcgtgctgcactggccgctggcctttccgcaggtgtttgcgcagggaggattcgactgcgtgctggccaacccgccgtgggaagtgtcacaaatgggcgaggaagaattcttcgctacccgagcacctcacatcgcggaattagctggcgatacgcgaaagaaagccattgccgcgttgcctgaaaccgatccacgtttgtgggatgagtttgtaaaagaaagccaacggattggcgccaccaacaacttttaccgggaatcgggacgctttccactgacagctatcggtaagctcaatacctaccccttgtttgccgaaaccattctgcagatccaggccgaaagtggccgcgccggctttatcgtgcccaccggtatcgccactgacgacagcaccaaggcctatttcggccacatcacccagaaccgacggctggtcagcctctacgacatcgagaaccgcgacaagctgttcccggctgtggatagccgtatgaagttctgcctgctgactctgggtgcggcagaacaagccgagttcgtctgttttgccacgcaagtcagccaactggccgacccgcgtcgccgttttaccttggcacctgaagatttcagtctcatcaaccccaatacgctcacctgtccagtgttccgcagcgagcgcgatgcagagctgacaaagaagctctaccgtgccgcccccatcttgatccgggaagccattacggcagggagtcgaatcattcaccccgaggagaacccgtggaacattacgttctcgcaagggttgttcaacatgaccagcgcgagccacttgttcaaaaacgaacccgcccccgatcgcctgccgctgtatgaagccaaactcatccatcagttcgatcaccgctgggccacctacacggtggatggcaacagccgtgatgtcactgccaccgaaaaggcttcgcctgacttcactgtcaccccgcgctactgggtcaatcgcagcgaagtggaagcacggctgaacgacaaagattggcaacacatctggttgatgggctggcgggatatttgccgggcgactgatgagcgaacagtaattgcgtcggtggtgccgttggtgggggcaggggatacgttgctcctaatgtttccagacaccaagcatggtgctcgcagggcatgtctactggcggatcaatgctcattggtacatgactttgttgcccggcaaaaaataggcggcacgcatctgaagtaccacgtcaaaaaacagatcgtgaatcttccgccagatcgctacaccgaagccgatctcgccttcatcgtcccgcgcgtgctggaactgacctacaccgcccacgatctagccggttgggcgcaggacttgggctacgacggcccacccttcgccttcgacctcgaccgtcgcgccattctgcgcgccgaactcgacgcctactacgccaaactctatggcctcaccgaggaagaactgcgctacatactcgaccccgccgatgtgcttggcgaagactaccccagcgaaaccttccgcgtactcaagaacaaggagctgcgggagttcggcgagtaccgcacccagaagctggtgctcgaagcctttaagcgagatctccaggcagggcacgtattggttcgtcggactgcgaatcgagcgtccttgactgatggattctgggcacggccgcaacaggatgaagctgcggagacggggcttgtcctggccgccttactgaaggcggtggatgccccatggccggtgcaccatgtacgtctcgccgccgtcttggcgctggagcccaggctgatgacgcctatgctggacgcgcaggatgcactggattggcaacgcctgattggcgaagaagccacgccgctatccggggcggtgttgagcttcataccgcgtgcaaatcaggcttggggcagagctgtgcgcttcctgcgaagcagtggctacctggttgaagatctgggggcaggaacttgggcaaaaggtgccgaactggatatgcctgctgccgaatgggccgaagggcgcgcccagatgattcttgctttcctgcatgcacgagggcagagctttgatcgtgtcattcgcgagttgcctgatgagatagggggatggattgaaaccgcaacctga

SEQ ID NO: 324582 - DNA, 1893 bp, Pseudomonas aeruginosa
atgcatgagccgcgtttatgggtgaagcggctggtgatatgggaaaagcctggagagcagcccttgcgggacgtcccattacgtccaggcctgaatatcgtctggacgccagacgacaacggtatcggtcatggcggcggcaagaccttgttctgcaggctactgcgctattgcctgggcgaggacaagtttgctcccgaagatcagcgggacggaatcggttcggcgtttcccaacggatgggttggaatggaggtcgtgctggatggcacctgctgggccgttcttcgaccattgggcatccggcgacggcatttcgccgtaccgaatggcaatcttgatgagcttattctcagcgaaatgccgaccacgggcctgtctccgctgctgaactccatcgaagataatctgctgacgccaggcgtcagggacctgatcgctggcaagaagcaagggcatcaggcctggcagattgccttggcgctgttgagcagggatcaggaatgccgattcgaccatgttcttgaatggcgatcctcgctatccgactcggaatcgccggcgcgagggctgaaccgaaccgagagactggagacactgcgagccctattgaatgccatcgacccatccgagcaaacgctccgcatcgacatcgcggccatgagcgagtcgagccgtagccaagagcaggaaataggccatcgcgcctgggaaattcgcaagcttagaaagcagcttctggaagtgcttggcgttacggacgatgagctttcgcaaggcactctgggtgtcgaaatcctgcgtcgggcggcgcaggagcgcttggcagcagaaaccaagtccgacggtgcgggcgcaacctcggaccttgattccgttcggcaggcgcacgaaagcgcccaagcggaagtggcaagagtccaggccgatataggaagacaagaggctgtgataccagccatcgagcgcgcgatatctgcgatcaagggcgaatatccggcattggcctactcgctcaaggaggcagagaattatccttgtcccatctgcgaggtgcccattgaccgcgtgctggcgagccaatgcgggttgtcacataaggttccagatctggaggcatgcaaggccaggttggagaacggtaaaaaagtgctcaacgatgaacaggatcgtctcgaatcagccaactccctactgaagcaattgcggccggagctggcgctggcaaaacaggatgcaacgcgtaaagagcagcactatcggaacctgctgaagcttcgcgagcagcgcgatggggcgtggtatgtcgcacgcaaagccgtggacgatgtcgagcggctggcctcgcttctcgaacagcagcaatctgctgaagtccgcctcgacaggcatcaaaccgacattgagcaagctcgggagagaatcggggcgttgcaaagtcagaatgcaacggctttctcgaagcttgctcagaaattcgacccgatcatccggcgcctggtcggacctgaagccagtggcgaaatccgattgaccggaaacgggctgagcctggttgtacaaatgggcggggatcgctcgacatcggccatcgactcgctgaaagttgtggccttcgatctagcgaccctgtgcatgagcatcgaaggtgacacgaggctcccggctttcttgcttcatgacagcccacgtgaagccgatctggggctcgccctgtatcacagcctgtttcatcttgtgcatgagctggaagagttcgggtcagcccccctgtttcagtacatcgtgacgacgaccaccccgcctccgcaggaatacgcacaggcgccctggatcgctgtacaactgcgcggttcccctgcctccgaacgtctcttgaaacgagacttataa

SEQ ID NO: 324583 - DNA, 768 bp, Pseudomonas aeruginosa
atgaatcccctacagcgtgcgcttatcgagaaaaccggccatgacaacggcttcgaacatgtgctgccagcggttggcgatgccgtgacgctggcctctgcgcgccaccggagctatgcggtggtgacgccattggccggtgatttagaggtgcggctccagcccgcctcgcctgcgctggtgccggagttgttgcgcagcttcaagctctgggcaggagccgatggtgtattccgcgtgcccaccctggctgatctggcgacattgctgcgccgtgcggccagcctgtcgcaggcgctgccaaatcaggctgtgcgggattaccacacagccgtcgcgcaggtactggcggacttgcctgccgaaaaccggggcacagaggtcgaacgtctggtgcgccagcgcgtggggcaggatcgttatcgcgatgccttgctgaactactggggcggtgcctgtgcggtaactggtgtcaccgtgaccgaggtgcttcgcgccagtcatgccaagccctgggcggaatgcacagacgatgccgaacggctggatgccttcaacggctttctgctggtggccaacctcgatgcgctgttcgatcgttttctaatcagctttgacgatgccgggcatctgctgaccagcgcccgcctatccccggacgatctgcacggccttggcatccacctaggcatgacgctgcgctggctggccagcgaacaccggcattatttgcagtggcaccgcgagcgcttcctgctcggtgcctga

SEQ ID NO: 324584 - DNA, 864 bp, Pseudomonas aeruginosa
atggatgacttgacctataccctgcggcagctttgccagcgcaaccgcgacggcagccacaacacacaggccgaccgcatgcgttcgctggccctggctgcgcggcaattgcgcgaggccggttttcggcagatgaaggcatcgtcgctcaagggcaagcacgtccaggcgctgctggatcgctggcaaggcgaaggcctgtcgtccggcaccctcaagaaccggctttcccatctgcgctggtgggccgagaagatcggcaagtctggcatcctgccggcggacaacacgcagcttggcgtgtcggagcgccgctatgtgaccaacgtcagcaaggcccgggaactgggatcggggcttgacctagtcaccgatgcccacgtgcgcatgagccttaagctacaggccgtcttcgggttgcgtcgggaagaggcgatcaagttccagcccagttatgccgaccgtggcgatcatctcgccctgaaaggctcgtggacgaaaggagggcgagagcgaaccgtgccgatcacgacgccagaacaacgcgaggtgctgcaggcggcgcaccatctggcgggggccgggtcattgatccccgcccacaaaacctacatccagcagcgtcatgtctacgatggccaatgcaagacggcggggctgagccacatgcacgggctacgtcatcagtacgcccagagccgctatgagactctgacggggtggccggcgccagcggcaggtggaccgtcagtcaagggactgagtccagcgcagcgcgtagaagacagccgtgctcgccagaccatcagtcgtgaattgggacacgagcgggttcaaatcaccgccatctatctcggcagttag

SEQ ID NO: 324585 - DNA, 1542 bp, Pseudomonas aeruginosa
atgaaaattcgttcgcaagtcggcatggtgctgaacctcgacaaatgcatcggttgccacacctgctcgatcacctgcaagaacgtctggaccagccgcgaaggcatggagtacgcctggttcaacaacgtcgagaccaagcccgggatcggctacccgaaggaatgggaaaaccaggagaagtggaagggcggctgggtgcgcgcggcagacggttcgatccgcccgcgcatcggcggcaagttccgcgtgctggcgaacatcttcgccaacccggacctgcccgagatcgacgactactacgaaccgttcgacttcgactaccagcacctgcataccgcgcccaaggccgagcaccagccggtggcgcgcccgcgctcgctggtctccgggcagcgcatggagaagatcgagtggggcccgaactgggaggagatcctcggcaccgagttcgccaagcggcgcaaggacaagaacttcgaccaggtccaggcggacatctacggtgagtacgagaacaccttcatgatgtacctgccgcgcctctgcgagcactgcctgaacccggcgtgcgtggcgtcctgcccgagcggggcgatctacaagcgcgaggaggacggcatcgtcctgatcgaccaggacaagtgccgcggctggcggatgtgcatctccggctgcccgtacaagaagatctacttcaactggaagagcggcaagtccgagaagtgcatcttctgctacccgcgcatcgaggccggccagcccaccgtctgctcggagacctgcgtcgggcgcatccgctacctcggcgtgctgctctacgacgccgaccgcatccacgaagtggccagttgcgagaacgagcgcgagctgtacgagaagcaactggagatcttcctcgatccgttcgacccggcggtgatcgcccaggcgcgcaaggacggggtggccgacagcgtcatcgaggcggcgcagaagtcgccggtgtacaagctggcgatggactggaagctggccctgccgctgcacccggaataccgcacgctgccgatggtctggtacgtgccgccgctgtcgccgatccagaacgccgccgccgaggggcacatcggcagcgacggggtgatcccggacgtcgagtcgctgcgcatccccgtgcagtacctggccaacctgctcaccgccggcgacaccgcgccggtgctgctggcgctcaagcgcctgctggcgatgcgcgcctacaagcgcgccgagcacgtcgaaggccgccaggacctggaggtgctggccaaggtcgggttgagcgtggagcaggtggaggagatgtaccgctacctggccatcgccaactacgaggatcgcttcgtgatccccagcgcgcaccgcgaggaagcgctttccgatgccttcgccgagcgttccggctgcggcttcagcttcggcaacggctgttccggcggcagcaactccgccgtcaacctgttcggcggcaagccgaccaaccgccgcgacgtgatccaggtcgtgcagatccaggagtga

SEQ ID NO: 324586 - DNA, 3786 bp, Pseudomonas aeruginosa
atgagtcacctgctcgaccgcctgcagttcttcaagaagaagcagggcgaattcgccgatggccacggcgagaccagcaacgagagccgcgcctgggaaggtgcctaccggcagcgctggcagcacgacaagatcgtgcgctccacccacggggtgaactgcaccggctcctgctcctggaagatctacgtgaagaacggcctgatcacctgggaaacccagcagaccgactacccgcgcacccgtccggacctgcccaaccacgagccgcgcggctgcccgcgcggggccagctattcctggtacatctacagcgccaaccgcctgaagtacccgaaggtgcgcaagccgttgctcaagctctggcgcgaggcgcgggcgcagcacggcgacccggtgaacgcctgggccagcatcgtcgaggacgccgccaaggcgaagagctacaagagccagcgcggcctgggcggcttcgtccgttccagctgggacgaggtcaccgagatcatcgccgcggccaacgtctacaccaccaagacctacggtccggaccgggtgatcggcttctcgccgatcccggccatgtcgatggtcagctacgccgccggcgcccgctacctgtcgctgatcggcggggtctgcctgagcttctacgactggtactgcgacctgccgccggccagcccgcagatctggggcgagcagaccgacgtgccggagtcggccgactggtacaactccagctacatcatcgcctggggctccaacgtgccgcagacgcggaccccggacgcgcacttcttcaccgaggtgcgctacaagggcaccaagaccgtctccatcaccccggactattccgaggtggccaagctcaccgacctctggctcaaccccaagcagggcaccgacgccgcgctgggcatggccttcggtcacgtgatcctgaaggagttccacctcgaccggccgagcgcctacttcgtcgactactgccgccagtacaccgacatgccgatgctggtgttgctggaagaacacgccggcggcgcgttcaagccgacccgctacctgcgcgccgccgacctggcggacaacctcggccaggacaacaaccccgagtggaagaccatcgcctacgacgagcgcagcggcgggctggtctcgcccaccggcgccatcggctaccgctggggcgagtctggcaagtggaacatcgccgagctggacggcaggagcggtgaccagacgcgcctgcaactgtcgctgctcgatggcccggaacatgcctgcgaggtggccttcccgtacttcgccgggcaggagcacccgcacttcaagggcgtcgccaacgacgaggtactgctgcgccgggtgccgttccgcgagatcgtcgcggcggacggcaagcgcctgcgggtggccaccgtctatgacttgcagatggccaactacagcatcgaccgcggcctgggcggcgacaacgtggcgacctcctacgaggacgccgacacgccctataccccggcctggcaggagcgcatcaccggcgtcccggcggcgcgcgcgacgcaggtcgcccgcgagttcgccgacagcgccgacaagacccgcggcaaggcgatggtgatcatcggcgcggcgatgaaccactggtaccacatggacatgaactaccgcgcggtcatcaacatgctgatgatgtgcggctgcatcggccagagcggcggcggctgggcgcactatgtcggccaggagaagctgcgcccgcagaccggctgggcgccgctggccttcggcctggactggagccggccgccgcggcagatgaacggcaccagcttcttctacctgcacagctcgcaatggcgccacgagaagctgtcgatgcacgaggtgctgtcgccgctggccgacgccagccgcttcgccgaacacgccctggactacaacatccaggccgaacgcctcggctggctgccgtcggcgccgcaactgaaccgcaacccgctgcgcatcgccgccgaggccgaggccgccggcctgccggtcgccgactatgtggtgcgcgaactgaagagcggcggcctgcgcttcgccagcgaatcgccggacgatccgcagaacttcccgcgcaacatgttcatctggcgctccaacctgctgggctcctccggcaaggggcacgagtacatgctcaagtacctgctcggggcgaagaacggggtgatgaacgatgacctcggcaaggccggcggtccgcgtcccaccgaggtcgactgggtcgacgacggtgccgagggcaagctcgacctggtcaccaccctggacttccgcatgtcctccacctgcatgtactcggacatcgtcctgccgaccgctacctggtacgagaaggacgacctcaacacctccgacatgcaccccttcatccatccgctgtcggcggccaccgatccggcctgggaagccaagagcgactgggagatctacaaggccatcgccaagaagttctccgccgtcgccgaaggccacctcggcgtggagcaggacctggtcacggtgccgctgctgcatgacacccccaccgagctggcgcagccgttcggcggcgacggccatgactggaagaagggcgagtgcgagccggtgccgggacgcaacctgccgacgctgcacctggtcgagcgcgactacccgaacgtctaccgcaagttcacctcgctcggtccgctgctggacaagctgggcaacggcggcaagggcatcggctggaacaccgagaaggaagtgaagctggtcggcgacctcaaccatcgcgtggtcgagagcggcgtcagccagggccggccgcgtatcgacagcgccatcgacgccgccgaggtggtcctcgccctggctccggaaaccaacggccaggtcgcggtcaaggcctgggaagcgctgtcgaagatcaccggccgcgagcacgcccacctggcgctgcccaaggaagacgagaagatccgcttccgcgacatccaggtgcagccgcgcaagatcatctccagcccgacctggtccggcctcgaggacgagcacgtcagctacaacgccggctacaccaacgtccacgagctgatcccgtggcgcaccatcaccggtcgccagcagttctaccaggatcacccgtggatgcaggcgttcggcgaaggcttcgtcagctaccggccgccggtcaacacccggaccaccgagaaactgttgaacaggaagcccaacggcaacccggagatcaccctgaactggatcaccccgcaccagaaatggggcatccactccacctacagcgacaacctgctgatgctcaccctgtcgcgcggcggtccgatcatctggctcagcgagcacgacgcggccaaggccgggatcgtcgataacgactgggtcgaggtgttcaacgccaacggcgcggcgacctgccgcgcggtggtcagccagcgggtcaaggacggcatggtgatgatgtaccacgcccaggaacgcatcgtgaacgtacccggcagcgagaccaccggcacccgtggcggccaccacaactcggtgacccgcgtggtgctcaagccgacccacatgatcggcggctacgcccagcaggcctggggcttcaactactacggcacggtcggctgcaaccgcgacgagttcgtcgtggtgcgcaagatgagcaaggtcgactggctggacgagccccgccacggcggactcggcggcgacgccctgccgcaaccgctgccccaggacatttga

SEQ ID NO: 324587 - DNA, 1869 bp, Pseudomonas aeruginosa
atgaacaaggcgaccgcgccggacgctgaccagcgggacagattctttggaggtagtgacagggccggaaagccgatcctgcgccgctccctggtagtccgcttcggctgctacctcaccctgctggtatcgctggcgctgatcgggatgttcagcgccctgctcttcgccgactacacgcaccaggacgccgcggtgatcaaccacgccggctcgttgcgcatgctcacctaccgggtcgccctggagcccagcctggaaggccgccaggcgctgctcgggaccctcggcgaacgcctcgacagcggcgacatccgccgcctgctgcaacgccaggacgccgacgacccgatccgccagttgcaccaggagctgcgcgagggcctcgcgcgcctggacccgcgcgcgctgcccggacgcgccgtgctggacgcctacgtcggcgacatcgaccgtttcgtcggcatcctccaggccaaggccgagcgccgctcgcaactgctcagcacggtgcagggcctgtgcctgttcctcagcctgctggtggtgttcgtcaccctctacgacctcagctatcacgtcatcggcccgctgcgcgaactcaccagcaccgcccgccgcctgggccgcggcgagctggacgcgcgggtcacctacagcggcgaggacgaactggcgcaactgggcgagcgcttcaaccagatggccggcgagctgaagagcatctacggcgacctggaagagcgcgtggaggacaagacccgcgccctctcgcagagccaccagcgcctcgaactgctctacgccagcgcccgccggctgggcgagaacccctacgacagccgcaccctgcaaccgctgctgaaccagttggagaaagtgctcgacgccggccgcgtgaccctctgcctgaacaaggacggggtcgagcgcgcctacagttcgctgaccaccaccgagcgcccggcggacttctgcctgcagggcgactgcggtagctgccgcgagcaggccagcgcctgcgaccaaccctcgtccctggcccagccattgctgatgcagcccctgtccatcgccggccaccgtttcggcgaactgttcatcgaaagccgcagcggccgcctggagaactggcagcagcaactgatcgagaccttctgcgacaacatcgcccgcaccttcgccctgtccctgcaacaggaacaggaaagccgcctggccctgttcgccgagcgcggcaccatcgcccgcgaactgcacgactcgctggcacagtcgctgtcctacctgaagatccaggtcagccgcctgggcaccctgctcaagcgcgaggcgccggcggagaagatcgaggacaccctcgacgaactgcgcgaaggcctcaacggcgcctaccggcaactgcgcgaactgctcaccaccttccgcctcagcctcgacgagccgagcctggaagccgcgctggggaacgccgtggccgagttcggcgagcgcggcgaggtgacgatcgaactggacaaccgcctgcaacacgtgccgctgagccccaacgaggaaatccacgtcctgcagatcgtccgcgaggcgctctccaacgtggttcgccattcgcaggcgcaacgggcctgggtgcgcctgagcagccaggccgacggccaggtgagcatcgccgtcgaggacgatggcgtcggctttgatccgcagcagaaccgcagcggccattatgggcttaccatcatgcaggagcgcggccagaccctcggcagccagttgcgcttcgaagcgcgcgcgccccacggcacgcgagtgctcttcagcttcgtgccgaccgccctgcaaccctccgccgccaaggagccgaccccatga

SEQ ID NO: 324588 - DNA, 465 bp, Pseudomonas aeruginosa
atgctgatcggtgcgctgctggtcctcacctgggtcatcctcctcgtccgatacccggccaaggccctgccggtctccctggcggctctcgccgggctgggcctggtggcggcctgggtgatctggcaggacaacgacgaaagccgccacctgcaacgccaggaactgcgcctgagctatgcgccggaacgctgtccggtggaccggccgctggcggtcgaactgaagaacggcagcgaccgtccgttgctggagctacgctggaggatcgccgcctaccgccccggcgacagtgtcaacctggccgacaccagcttcgacagcccgcgctaccgggcgccgaacgccctgctcggcggcgacagctggcacgattgcctgccgctgccgccgctgcgtccgggctatcgcgccagcaccctggaattccgcgccgaacgcctggacgggcgtttcggcaactga

SEQ ID NO: 324589 - DNA, 1164 bp, Pseudomonas aeruginosa; identical to SEQ ID NO: 322685

SEQ ID NO: 324590 - DNA, 909 bp, Pseudomonas aeruginosa; identical to SEQ ID NO: 322684

SEQ ID NO: 324591 - DNA, 978 bp, Pseudomonas aeruginosa
atgaaaaagaacgtcttcgtcttcagtcgcctcgcccccgagcatctcgaacgcctgcaatgccagttcaacgtccgcgtgctcgaaccgaaacagggcgacatcgacgcccagtacgccgccgccctgcccgatacccacggcatgatcggcgtcggccggccgctcggcgccaggcaactggaacaggcgatgcagctggaagtcatctccagcgtctcggtcggctacgacaactatgacctggactacctgaaccgccgcggcatcgctctcaccaacacgcccgacgtcctcaccgagaccaccgccgacctcggcttcgccctgctgatcagcgccgcgcgacgggtcgccgagctggacgcctgggtcaaggccgggaactggaagcgcaccgtcgacgccccgcagttcggcaccgacgtgcatggcaagaaactcggcatcctcggcctcggccggatcggcgcggccatcgcccggcgcggccgtttcggcttcggcatgcaggtgctctaccacggcaacaaccgcaagccggaactggaacaggaactcggcgcgcgcttcctcggcttcgacgaactgctcggcgaggccgacttcgtctgcgtggtggtgccgctgggagcgcagacccggcagttgatcggtgcgcgcgaactgggcctgatgaaaccctcggcgatcctggtcaacgtcgcccgcggccaggtggtcgatgaggccgcgctggtcgccgccctgcgggagaagcgcatcctcggcgccggcctggatgtctacgagaaggaaccgctggccgaatcgccgctgttcgccctggacaacgtggtgaccctgccgcacatcggctcggccacccacgagacccgccgggccatggccgagcgggcgctgcagaacttcgaggcggccttgcgcggcgagcggccgctggacctggtcaatccgcaggtgtggcgacgcggctga

SEQ ID NO: 324592 - DNA, 903 bp, Pseudomonas aeruginosa
atgaatctttcgctgtacctgctcaccgtgctcatctggggcaccacctggatcgccatcaagctacagatgggcccggtggcgatcaccctgtcgatcgcctaccgcttcgccctggcggcgctggtgctgttcgccgtgctgctgctcggccgccgcctgcaaaggctggacgcacggggccaacgcctgtgcatggcccagggcgtatgcctgttctgcctgaatttcatctgcttctataccgccagccagtggattcccagcggcctggtggccgtggtgttctccaccgccaccctgtggaatgcgctgaacgcccgcctgtggttcggccagcgcatcgcgtcgaacgtgatggccggtggcggtctcggcctgctcggcctggggctgctgttctggccggaattggtgggtcaccaggccaccccggaaaccttctacggcctcggcctggccctgctaggcacgctgtgcttctccaccggcaacatgctttccagcctgcaacagaaggccggcatccgcccgctcaccggcaatgcctggagcatgctctatggcaccctgatcctcctggcgctgtgcctgttccagggcgtgccgctgagtttcgactggagcgcgcgctacgtcggctcgctgctgtacctggcgatccccggctcggtgatcggcttcaccgcctacctgaccctggtcgggcgcatgggcccggatcgcgccgcctactgcaccgtgctgttcccggtggtggcgctgaacatctcggccttcgccgagggctaccgctggaccgcaccggcgctggccgggctggtcctggtgatgctcggcaacgtcttggtgttccgcaagccgaaggcgccggcgctggccgggccggcgcgctcgacctag

SEQ ID NO: 324593 - DNA, 891 bp, Pseudomonas aeruginosa
atggccggcatgcaccaacccagtgatttccaggtattccgcaccctcgaccggacctccaatgcgcgcctgctgcgcagcagcacgctcagcgacggcctggcgctcgcccattggtaccgcgacgaagcggagatcctcggctacagcgaccccggccatcacaccctgtcgctctacctgcagggcggctggcagaccttccgccgcgatcgtcccgggctctatggcggccccgaccgcttctgcgtgatgccggccgaacaccactccgactgggcggtgacacgcggcctgggcttcatgcacctgtacataagcccggaacgcctggccggcgcggcggtacgcaccctcgattgcgaaccacgcagcctgcaactggaggagcgcacctacatccaggacgagccgctggccgccctgtgccggaccctggaacgacaggactggaacgaacccggcgagcgcctgctatgcaccagcctcgcccaccaggcggtggaccacctgctgctcaccgggtgcggcaggcgtaccgacgtgcgctggcagggcgggctggccgcgcacgtgcggcggcgcctggccgactacatcgaaagccacttggagcagccgctggaactggggtcgctggcggagctggcggcgctctccgagtaccacttcgcgcgcatgttccgcgtatccttcggcctgccgccgcaccgctacgtgctggaacgacgcctggcgcgggcccgcgacctgctggcgtactccgcgcagccgctccaggaggtctcgctggcctgcggcttcgccagtccgagccatttcaaccggcgcttccgcgaagcccatggcgccaccccggggcagtaccgcgccgccctgaaaggctcctga

SEQ ID NO: 324594 - DNA, 216 bp, Pseudomonas aeruginosa
atgcgccgcggctgggagggcaccgtgctgttgcgggtgcatgtcctcgccagcggcagcccgagcgagatccaggtgcagaagtcgagcggacgcgaagccctcgaccaggccgcggtgaaagcggtcaagcgctggtccttcgttcccgccaagcgcggcgacaaggccgaggacggctgggtcagcgtaccgatcgatttcaagttgaactga

SEQ ID NO: 324595 - DNA, 213 bp, Pseudomonas aeruginosa; identical to SEQ ID NO: 320945

SEQ ID NO: 324596 - DNA, 1458 bp, Pseudomonas aeruginosa
atgaagcccaaccctccgatcaacgagctggtcctgctccaggcccaccagcttgccgaacgcatccgcctgcgccaggtgtcctgccgcgaggtgatgcaggcctacctggcgcatatcgagcgcttcaacccacgggtcaacgccctggtcagcctgctgccggcggaacgcctgctggaagaggcggacgcgcgcgacggcgaactcgcccgtggcgaatggcgtggctggatgcacggtctgccacatgccatcaaggacctgtcgctgacccgtggcatccgcaccaccctcggctcgccgctgtaccgcgactacattcccgagcgcgacgggatcatggtggagcggatcagggccgccggcgcgattctcatcggcaagaccaatacccccgagttcggcctcggctcgcagacctacaacccgctgttcggcgccaccgcctgcgcctacgacgaacgcctcagcgccggcggcagcagcggcggagccgccgctgccctcgcgctgcacctggtaccggtggccgacggcagcgacatgatgggctcgctgcgcaacccggcggccttcaacaacgtcatcggcttccgcccttcccaaggccgcgtaccgttcgacgacagcgccgacctgttcttcgaccagctcggctacgaaggcccgatgggccgcagcgtgcgcgacaccgccctgctgctctcggtgcaggctggcgccgatcgccgcgcgccgctatccatcgccgaacccggcgcgcggttcgccgctccgctggagcgcgatttcgaaggcatccggctgggctggctgggcgacctcgatggctacctgcctatgcaggacggcatcctccaactgtgccagcgcgcgctaggcgatttccgcagcctcggctgcgagatcgaagaagcgaacctcggcttcgccccggagcgcctctgggaatgctggcgcaccttgcgccactggctggtggccggctcgctcggcggcgtgcatgccgatccggcgaagcgtgccctgctgaagccggaagcgctctgggaggtggagaacgggctgcgcctgggcgccgacgcggtctttcgcgcgtcggtcatccgcagcgactggtatcgcgccatcggccggctgttcgagcgctacgactacctgttgctgcccagcgcgcaggtatttcccttcgccaaggaaaccccctggccgcgcagcatcgaaggcgtggcaatggacacctaccaccgctggatggaagtggtggttcccggcagcctgtccggctgcccggtggccaatgtgcaggcgggcttcaatgccgagggactgccgatgggcctgcaaatcatcggtccgcaccaggccgacttcgcggtactgcaactggcccacgcctacgagcgggccagccgctggttcgagcgccagccgtcgccgctgctggcgaactga

SEQ ID NO: 324597 - DNA, 1035 bp, Pseudomonas aeruginosa
atgcatcaacggatcgcaagcatcggcctcggcctcaccctggccctgggcggcagcgcccaggccgccgggcaactcaacgtggtcagctggagcggctacttctcgccgcagttgctggagaaattcgagaaggaaagcggcatccgcgtcacggtggactcctatgactccaacgaaaccctgctggccaagctcaagcagggcggcgccggctacgacgtggcgattccttcgcagcagttcgttccgatcctggtcaaggaagcattgctcgagcgcttcgacccggccgccgagccgtactacgccaacctgctcgacaacctgaagaagcccgcctgggacccggagggcgcctacagcgtgcccttcatctggggcaccaccagcgtggtgctggatggcgcgcgctacgccggcccggccgacagctacgcggtgctctaccagccgccggaagagctgcgcgggcggatcaacatgttcgactcggtgagcgaggtggtcgacatggccagcctgtacctgggcatcccgctctgtagcgcggacccgaagcagatgcagcgcgtcctcgaactgctcaaggcgcagaaacccttcgtcaagacctacagctccaaggccggctcgatccgcgagaacctcgccgcgggcgaggtggacatgtcgatgttctggggcggctcgtcgatgcgtgcgcgcgaactcaagccgagcctgaagtacctgtatccgaaggaaggcgtgctggcctgggtggacaacctggtgatcccgcgcggcagccgcaacccggacaacgcgcggcgcttcatcgccttcctcgcccagccggagaacgccgcgctgacccagaacttcctcaagcaccagagcccggtgaagggcgtcgagccctacctcgacgccagtctcaaggacgccccggagctgcacgtccccgccggtacccgcgtggtgttcagccagacctgcggcgaagacgcgatccgcctcgccgaccgcctgtggaccaacctgatgcgctga

SEQ ID NO: 324598 - DNA, 810 bp, Pseudomonas aeruginosa
atgatcgcgcgcctgtggaaaggcagccgccataacgtccaggacttccccggcttcggtgccttcagcttgttgttctacctgtacctgtacgcgccgatcctggtgctggtggtgtactccttcaacgccaaccagtcggccaccgtctggaccggcttcagcctcgactggtaccgcgccgccttcgccaaccaggcgctgcgccaggccgccggcaacagcctgctgatcgccgtgtgcgccagcgccgcggccaccgcgatcgccaccctggccgccctcggcacctcgcgtggggcgaagttcaggggcctgcgcctgtcgatgggagcgatcatgctgcccctggtgctgccggaaatcgtggtcggggtcgccaccctggcgctgttttccaccgtcgggctgtctctcggctacggcaacctgatcatcgcccacacggtgttctgcatcccgttcgcctacctgccgatccgtgcccgcctggatgacatggacctttccctggagcaggccgccgccgacctctacgccggtccgtggcggaccctgcgcaaggtgacgctgccgctgctggcgccgggcatcttctccggcctgatgctcgccttcatcgtctcgctggacaacttcgtgatctcgatgatggtctcgcaggccggcaccaccaccctgccgatcttcatcttcggactgctgcggatgggcgtcacgcccgacgtcaacgccgtgtcgacgttgatcctcggcgtctccgtgatcttcgtcagcctttcctacctgctcggcaagccacgcgcctga

SEQ ID NO: 324599 - DNA, 921 bp, Pseudomonas aeruginosa
atgcatccgatcccttcccccggcgcagccttgcagcgtcgccaggccctgcgcagcttcctcggcgtcacgccggcgctggtcgccatcggcctgttcctggtgttgcccatcctcatcgtcgccgcctattcgctgatggaggccaacccctatggcggggtcgaccgggccttcagcggcgaggcgtacgtatccctgctcttcgaacggcagatggacgacagcctggccttcgccgactcctacctgacaatcgccctgcgctcgctcggcatcgccgcgctgaccaccctcatcaccctgtcgctcggcttcccggtggcggtctggctggccatgcagccgccgcgtcggcgcggcctgctgatcttcctgatcaccgtgccgttctgggccaacctgctgatccgcacctacgcctggattctcctgctgcgcggcagcggagtgatcaacaacggcctgctcggcctcggcctggtcgaccacccgttgccgctgctctacagcgacggcgcggtgctgctcggcctggtctacacctacgcgcccttcgtggtactgccgatctacgcgaccctggagaaaatggacatgcgcctgctggaagccgcccaggacctctacgccggccgcctgcgcacgctacgcaaggtggtcctgccgaccgcccggccgggcatcctggccggcgccatcctgaccttcgtgccctgcctgggcgcgatgatcgccccagaactgcttggcggcggcacccgcatgatgcttggcaacctgattttccggcagttcgccgacgcccggaactggccgttcggcgccgccctgtcgctggtgctgatggccgcggtgatgctgatcctgaccgtctacgcctggcgcgccgaacgtctcgcacgggggatgggccgatga

SEQ ID NO: 324600 - DNA, 1113 bp, Pseudomonas aeruginosa
atgagtgccctgcattcgctgcgtacccatgcagtgtccatccgcgcggtacgcaaggtgtacggcgatcccgagagcggcccggtggcactgaagcgcgtcgacctggatatccgcgacaatgagttcttcaccctcctcggcccgtctggctgcggcaagaccaccctgctgcggatgatcgccggcttcgagtttcccacggagggcgagatcctcctctacggcgagaacatcgccgcgcgaccgcccttcgagcgcccggtgaacaccgtgttccagcactatgcgctgttcccgcacatgagcatcgccgagaacctcgccttcggcctcgaatcgcgcccactgggacgcagcctgggcaaggcggagatcgccgagcgggtccgcgagatgctcgccctggtgcagatggaacgtttcgccgatcgccgtcccgggcagctttcaggaggccagcagcaacgcgtggcactggcccgtgcgctggcgccgcaaccgcgggtgctgctgctcgacgaaccgctctcggccctcgacctgaagctgcgccaggcgatgcgcgaggaactcaaggcgatccaagcgaagaccgggatcaccttcattttcgtcacccacgaccaggaggaggcgctgaccatgtccgatcgcatcgccgtgctctccgagggccaggtgcaacaggtcggaccgccggaagagatctacgagcgccccggcaaccgctttgtcgccgacttcattggcgagaccaatttcatcgaagccgagctgctccagcgcgacggcccgctggcgctgtaccgcggtcccggcggtgaagcgttcgaggccgccgcgcgcgacggcctggcagccggagcccgggtctgcctgtcgatccgcccggaacgcctggacctgctggcggccaacaccggcggcggcctgccctgcacggtggaaagccaagtctacctcggcaccgacctgcaataccgggtgcgcctggccgacggcagcctgctgacggtgcgcacaccgaacggcacggcacggcgcttcgccaccggcgaagctgcctgcctggccgtggccaaagacagcgccagcgtcctgctggattga

SEQ ID NO: 324601 - DNA, 894 bp, Pseudomonas aeruginosa
atgtcgatcccccgtttgcccccgttgaacgctgtgcgcgccttcgaggccgccgcccgcctgggtagctacgtggcggcggcgaaagccctgcacgtaacccagccggcggtcggccggcatgtccggctgctggaagactggctcggcgcgcgtctgttcgaacgtacttcgcgtggcgtgctgttgaccccggccgggcggcagtactacgccgcggtgtccaccgcgttgcagcagatcgccgaggccggcggccagctcagtggcgcgcgctggctgcggatcatggcggtgccggcgttctcccggcgctggctgacgtcgcgcctggaaaccctctgcgcacagcggccggggctgaagatcgccctcgaacccaatcccaccttcgaccacgtggaggagcgcagcgccgacctcggtatcgtctatggcctgccgggccagtacgccaacccgcgcgcgctgctgatccggcccaaggtgttcccggtgtgttcgccggcctacctggccgccgccgggccgctggagtcggcggagcaactggtcgcgcacaagctcatccatgtcgacgacggcgagtggtggaacctctggttctccgccatcggggtcgacgtcgaggtccgtccggcggtgctctacctgagcaacgaccatgccctggcgcgggccgaggagggtctcggcatcgccctggccaacgaggtgctggtccgccaggaactgcgcagcggcgctctggtgcggcccctggccgccgaggcggcactggagtgctaccaggtgctgaccccgcccggcacgccctcggcggacgtcgagtggttcatcggctggctgggcgaggccctgcgcgaagagtttccggacgccgtgacgtcctga

SEQ ID NO: 324602 - DNA, 1047 bp, Pseudomonas aeruginosa
atgaacgatagggttcggtcgaggacgatcgtctctgcccagtccatcaccttgcccaagggcggcgacgtgcacctggtgccgcctccgcccaagccttgcgtgaccatcgtggtgcatggcgtcaacgatctcgcgggttgctacgaacggatcgagcgagggctctgccaggggctcaacgaacgcctggacatgccgccgaccttgcccggcgggcaggccaatcccggctacctgacgccggcgggctacagcctgccggcggacgacgaaggcaaggcggagaaccccgacgccgtctactaccggcgcaagttcgccagtggcgccggcggggccgccgtacgcagcgtagtcgtacctttctactggggcttccgcgaggaagagcaatacatcaacaagaccgcggcccacggcgaatggctggaccgcaacggcaaccggctggacaagtccggcaccaaggaaggcgggcagttcgtcaatgccaccaccaacctgccggacatgtggggccagggtttcaacggcaagctgttcggtttcatctcgctggactggttcggcggcaccatgacccatccgctgttttcggcggcagggcgcaagtacatggtccttgcggccatgcgcctggccatgttgatcaatatcatccgcaagcgttaccccgacgacaccatcaatgtcgtcgggcacagccagggcaccctgttgaccctgctggcacatgccttcctcaaggatgacggcgtggagccggcggacggggtgatcatgctcaactcaccctacggcctgttcgaacccctcaacgagaagctccagggctggagcagccagcagaccagagaggcgcggctggccacgctcaaaggtatcctcgagttcatctgcggccgacgccatccggtccccgcgctgagcagcgtcgcgttgcgcaactgccaaggctacggcgcgataggcggccccggctgggtgggtgggtggccagggctgccagacgaccatcgacggggaacggctcagcttcgatga

SEQ ID NO: 324603 - DNA, 1173 bp, Pseudomonas aeruginosa
atgacagaattgacaaaaaaaatgcagacccattgtgttgggcgcttactcatcgatctaccagaaggaacggagtgggagcctaccgccagcggggcgcatcttgacggttatttagctctttcagtcaccacgggagtgtctgaggctgattacgctattttgatggagaaacgatgggcggagatcgaggcagaagaaaagaaatccaccagacttgctccacggtcggcaaataaaaggaatcctctaaaaaatagcgcagtctttatatataactatgtgtgggtcgaaggacctgacctgaatggagtgatgcgtaaagaggtttttcatgaggctgagggatatttgtggcgtgacaacaccttgttcaccttcggccgcacgctaaacgctgctgaggatattctgcgttggcttccccggctgtatacacggaagaacaatgaaatacccgacaggccagggctatgcctgaatggagcctttgttgagtcatactacgacctcaatgctccgttcgagtcagttagctggggattcagactgccaaaggagctagggttggtagtgcgtcatgcgaaggtgtgggaacccgagcagccaatgttggaacgttatcgggaaggagaggatgaattcaccgggcttctggcgaaagatcttgccaagccgggggttgtcgccggtcgaaaggaatatagagctcgcaaacgcaatgtaggcgatctggagggcgatgagcgtgtggttggtggcactgaaggaagaggtaattggaagtatttcaaaaccaacatcggtggcgaatggagtttccctggtgccggaagtccttatccgatgccgagcgttggcattgatctggaaacgacctttaagactgcgacgaagcctgcggaacttggtgatttccccacccacgacgaggctccggcttacccgactgaggcagagttctttgaactctgggacacaattctcaatagtgtccgttatcgccccggagcactgacacctcctccaccaaactcgggtccaatggccagtagcgtcggtagccctcctgttcgcccggcaccactgatgacctatgacagggacgattatgttctggaggagtttctcaccagtttgacgccgaaagagaattggttggatgacttgtaa

SEQ ID NO: 324604 - DNA, 1770 bp, Pseudomonas aeruginosa
atgagtgagccaactaggcttgtgtctacgcacattgggaccaatggacacaccactgctcgtgtgacgatgagtccaactagtaacaaggttcgtgccgaaattactgcccctccggatcaggcgattccggttgtttttgtgccgggcatcatgggtagtccgttattgacgtcgaatgcggaggctggaaggttacttggggaaaacaatcgttgggcttggtttccagacgatggcttggggtgggtggcggggtttactgcgaaaagagggtaccgtcatctgagcccgacagagcggaaattgttgcttgatcccgacactacacggccagtctcgtctcccgaggatgcagatcgtgaagttgtttccgagcacattactactctgccgttgcaggaggcacttagtcgtggttgggggtcggtgatgatcagctcgtacggcggcattctcaatttcctagaagcgcagcttcgcttcatcatcacctcgaagggggaggtgtatccgggggtgcaaggtgcggtgccgcacaacccagaggtgtgggggcagctcaatggctatcaagtactcacaaaggagatgttgcgggaggctgccgagtttcgttatcccgtctatgcagtgggctacaactggctgcagaccaacggcaaagccgccgactatctggcgggaaaaatcgaagccatcattgatcgttgcaggaaagaacttcgagtcaagtgtgaccatggggtgatactggttacccactctatgggagggctagttggccgaatgtgtgccaaacgctatcccgctttgattcagggagtagttcatggcgtgcagccagcggttggagccggaacggcttatcgtagggtgcgtgcggggtgggaggacttcgccggaagcatcgggcttggtggaactggaaagaaaattatgccggtatttgctaatgcagcaggcccattggagcttttgcccaatcatcgctatggggccggttggctgcgcatcacttgcgagggcagagttgtcgcacaactaccggaggcaggtgtggggaaggcggatccctatatgcaaatttatatggagcctcgagcgtggtggcgcttggttgatccgctttggattgatccggcggtcaataaaataaaaggtcccgcagcgcttcaagcacttcagaaagcctgggggcgctatggaatgcgactgggcgaggcaaagcattttcacaccgaactcggtagcagctatcaccctaatacatactcgcattacggcgcagatgaaggggaaatggcttttcatcgcgtcacatggaatcttcagccgcaaatgatcgctgcataccgcaaggacctgcctcctacccgagggcccgtaccatcgaccgttcacgctatagggttgcgtatgtggcgcgatgaccacgaggggacggcttatctggttaatgatgctgatggacaggatatggtcatgcagcatggagtgggggtcatgcgaagcactaaaggcaactcttatgttgggaaaatacaggggcaagaccaagtaggtgatgcaacggtacctgcgcattcttccgaagactcggcaaaggccgctgttttctccgctcgtatgacagggtttgaccatcaggcctcgtacgataatcgaatggtgcaaaacgtcactctgtattcggttctatgtatcggtgcgttggcagtacgaaaagaggccggaaaatccacgacaactacagaaatacccgcatga

SEQ ID NO: 324605 - DNA, 864 bp, Pseudomonas aeruginosa
gtgctctgcaccgcggtgacatcggtgccggcctggccgccctggccggcgaagcgcatcgccgcggtgaggatcgccaccgaggtgatgccggtagccagcgagccgatcagcacgcaggtccacgccaatccttcgctcagtgccaaccagcgaccggcctgcagataccagagcagcgccgaacaaccggcgagcaccacgccaagggcgaaaccgcgccacaggccgatccgcctgaccagccaggcgccgccgccgcagccgaggaataccgtgaccaggccaccgctcatgcccagccggccgatgtcctgcaaggcccagccggcatcgctgaggtacagcttggacaggccgaagccggataccgcggtcatcgccgacagcagcgccagcgccagcagcgaaggcgccagcggccgacgcaggaagcgcagcaggctggccttggcggccggtgccggggggagttcgtgggggtcgccgcgccccagggcgagcacgcagcacaggcttgccagcggcacgcaggccatgaccaggaacgccgtgcgctggccgaaatgcccggcgaggatcaggctgccggcgccgccgccgaagaagccgatcatcaccccggcgatctgtaccgcgttgaccttggccagcagctcgccgctgaagtgctccgccgccatgccgtcggtggcgatgtcctgggtcgcgctggccagcgaagccagcgccagcaggccgaccgcccaaccggcactggccacgccgaggccgagcgtcgccaggccgagcaggcaggcgaggaccatgcattgcatcggcaggatccagctacgccgccggccgagacggcgcgaccagtga

SEQ ID NO: 324606 - DNA, 1050 bp, Pseudomonas aeruginosa
atgcccatcagtgtcctggtcgtcgacgattccgccctgatccgcagcctgctcaaggagatcatccaggccgacccggagctgcgcctggtcggctgcgcgccggacgccttcgtcgcccgcgacctgatcaagcagcacgcgccggacgtgatcagcctcgacgtggaaatgccgcgaatggacggcctgaccttcctcgacaagctgatgaaggcgcggccgaccccggtgctgatgatctcctcgctcaccgagcgcggttccgaagccaccctgcgcgcgctggaactgggcgcggtggacttcatcgccaagccccggctgggcatcgccgaaggcatgcaggcctatgccgaggaaatccgcgccaagctcaagaccgtcgcccgcgcccgcctgcgccgccgtgcggcggacgcgccggcgccgccggaaagcacggcgccgctgctcagcaccgagaagatcatcgccctcggcgcctccaccggcggcaccgaggcgctcaaggaagtgctgctcggcctgccggcgcacagtcccggggtggtcatcacccagcacatgcctcccggcttcacccgcagcttcgccgagcgcctggatcgcctgacccggctcagcgtcagcgaagcgcgcgacggcgaccgcatactgcccggccacgccctggtcgcgccgggcgaccaccacatggaggtgcagcgctccggcgccaactacgtggtgcgtttgaaccgccaggcgcaggtcaacggccaccgcccggcagtggacgtgatgttcgagtcgctggctcgctgcgccgggcgcaacctgctcgccgggctgctcaccggcatgggcaaggacggcgcgcgcgggctcctggcgatccgccaggccggcggctacaccctggcccaggacgaggctacctgcgtggtctacggcatgccccgcgaagcggtggaactgggcgccgcggaagacgtgctgccgctcgaacggatcgccgccgcgctgctccagcaagccgcccggcgcggcagcggcaaccgcctctga

SEQ ID NO: 324607 - DNA, 1008 bp, Pseudomonas aeruginosa
atgagtcgcgaccgtctgtacacctgggccggcctgtggcgctcgccgtcgtccagctgggaggccctgcgcctggaggacgaccaggcggaaagccagttgcgcgcgccggacgaacgcagcggcctgccctaccaattggactaccggctgcgctgggacgccgactggcatctgcgtgaggcggtgttccacgtcgaaagcgaaaccggggtgcgcaagctgcacctgctcgccgatggccgcggccactggcaggacggcgacggcgaagcgctacccgccagctacggcgccatcgccctcggggcgccgctaggggtgctgctggtgcagtggctggggctgtggagcatgggcgcgtccatcgtcctgctcggggcgctcggcttcgccctggcctggccgaagttgccggcgccgctggtgcacggcgagcggctgccgttccaccatgtgctcggccgggtcaccccgcacggtatgggcctggcgctgggggcgatcggcttcggcaccatcgccaccttcatcaccctttactacgccagccgtggctgggccaacgcagtgctctgcctgagtgccttcggcggttgcttcatcggcgcccggctgttgttcgccaatagcatcaaccggctcggcggcttccgcgtggcgatcatctgcctcggcgtcgaaagcctcggcctgctgttgctgtggagcgcgccgaatccctgggtcggcctggccggcgcggccctcaccggcttcggcttctccctggtgttcccggcgttcggcgtggaagcggtgaacctggtaccggcttccaaccgtggcgcggcgctgggcgcctactcgctgttcgtcgacctgtcgctgggcatcaccgggcccctggtgggcttcgtagccaacctgttcggcttccgctcgatgttcctcttcgcctgcctggcctcgctcggcgggctggccctggccgtcgcactgcaccggcgcagccgccggcccggctag

SEQ ID NO: 324608 - DNA, 1056 bp, Pseudomonas aeruginosa
atggcccgccccgatacccctggcgcatccccgcaggcgaactcgctcgtactgggtctggatcgcctcgatgcgggtccgtgcatagtgttcgccgtcctggctctgcacatactcgccagggtagtcgtagagcgggtagtcggccgcggcatgggcgcgcccgacattggagcgcacttccaggcgggtgccgggacgctggaagtcgtagtcgttgaggctcagcgagccgggctggacctcgcgcgccatgtgccagtcgaagaagtggtcgcgctcgcgatggccgaggctcggcgggtaatagggcacgctggtgtagccggccgggctgtggtgcgcgccgtaggcatcggagagcaccaggatgtggcgcttcttttcgtggcggaaccagtagtagatgccttcctgctccatcagccggctgacgaaatcgaagctggtctcgcggtattgcacacagtattcccactcgcggtaggagcggctcagggcgtcctcgaagtcggagaagccaaggtcgcggaacacctgcttgatgatgtccgggaccttctggttctggaagatgcggcagtcggaggtgcgcgtcagcagccacagccagggccgcagggtgacctggtagctggcgaactggccggcgccggcgccctggctacagcgcgcgacgatgccgtggaaataccgccggctgccgccggggagttccagcgcgaggctcatcggcttgcccaacagggcatccagaggcaaggcgggattgctcgagaccagttcgagctcgtggctgaacagccggcccagctcttcgcgaccctccagccgttgcagttgcaggacctcgggtcccagcggggagtccacgtgtaccaggcgggtgtgttgggagaacagcatggggaatcttccttgatagtcacctgcggcgggcggcccgaacaacgcgccagcagcgcgccagatgatcgtacaacccagtgccgtcgcgaaaggctggccaatagccacgacactcctgcccgcctcctgcggacccgccgaccctaa

SEQ ID NO: 324609 - DNA, 906 bp, Pseudomonas aeruginosa
atgcagttcttcctgcgctacgcctacgcgcccctcttctggtccggcttcatcggcctggcgacctggcaggtcggctatcgccaggcttcccacgcctggctggtcgccctgttcctcggggcgctcggcctgtcctttctcgccgaacgacgactgccctaccagccacgctggaaccggccgcacgccgaccgcctgcgcgatgtcctgcacgcgtcggtcaacgaaagcctgaacgcacttggcatcctcgccctgccactgctggccggagtcctgggcttctggccggtatggccgcaggcctggccgctgtggctgcaactgctgctggcgatcgtcctggccgatctcggcatcaccctggtgcactacgccagccaccgttcggcgctgctttggcggctgcacgcggtgcaccatagcgtgcagcgcctgtacggtttcaacgggctgatgaagcatcccctgcacctgggcctggaagcgctcggcggcaccctgccgctgttgctgctcggcgtgccgcagacggtcgccgcgctgctcgccttcgccatcggcatccagttgctgctgcaacacagcaacgtcgacatgcgcatcggcgggttacgccatgtgttcgcctgggcaccgctgcatcgcctgcaccacatccgctacgggcgcgccggcgacgtcaacttcgcgctgttcttcagcgtctgggaccgcctgctcggcaccgccctccatcgtcccgactaccgcctggacagcaccgacatgggcatcggcgaccagcctgactatccccgcgactatgccggccagttgctcgcgccattccgcgacctgccacgcagcaggcacgtcccacagccgccggaaggattggggcgttcagccggccaggcgtag

SEQ ID NO: 324610 - DNA, 987 bp, Pseudomonas aeruginosa
atggccctatcggagtccgccgggcagcgcccggcactgctcaggcccgcgcagggacgcgacgaccgtgcctattggcacgagctgttcggttctctggaggtggtgcatttcttcctggtcaccgcccgttgcggctgtttcatgcaggctgcgcgcagcctggacgtcaagccgacgctgctgcgcaagaccctggcccggctcgaggagcgcctcggcctgcatctgttcgtgcatgagggcaacgccctctcgctgacccgcgagggccgcatcgtccaggccgccgggcagcgcctggtcgaggacagccagagccacgccgatcttcaccggcaacagccgctggtgcgcctggcggtggccgaaagcgtcctgcacgatgtgctcagtcgcgagctgtggggctacctgcgcaagaacgccaacctgcgcgtagccctcgccgagttgcgcgagggctggccggaaagcgcagggccggcggagatcgccatctggatcgccgatccggggcagccgcatccgccgatggaaggccacttcgccgcaccggcgcgcatcgctgagctggagtaccagccgcacatcggcaagcgctattcgcgcgagcgcacgcggccggccagcgaggacgagctggacgactacctgctggcgcagctccacggccaggccgccagcgccgccctggcaccctggaaccggcgggtggcggctcgccagtcgggagtgatcgaggtacagagccacgacctgctgctacaggcgatcctctggggcgcctgcatcggcctgctgccgcattacgccggacgcctggagcgcaacctggcggcgttgccgcaggtcttcgacgagccgatgcggcgggaagtctggatgagcgtgcagccggaagcggagaaccgcgtggaggtgcgtgccttgctcgatctgatcgagcacgccttcgacgaccggcgcgactggttcggacgctga

SEQ ID NO: 324611 - DNA, 12543 bp, Pseudomonas aeruginosa
atgccgtcccgttcgccgtcgtccgcccgttcctcccgcgcgctttacgcgccgcgcctgaagccgctggcccaggccatcgccctgctgctggtcgcagggggcgcccaggccgccgggcagccgttcagcgccgcctggttcgccgccaagggcgcggctcagggcggcgctgccggggcgccgcgaccgggagcgcagttgccgggggcgccgccgccgctggcgcagcagcagcgggtcaaccagcagttgcagcgttcgatggccaacctgaacaacaccgtcgccgccattgccgcccagcaggccgcccaggccgccggacgccaggcggcgctgaacctcccgcaggatgttccggacgggctcggcgagggcggcctcaaggtcgacgcctcgctgccgttcgagcaggcctggcagaacgccaagggaccggtgcagacccaggccgccggcaagaccacggtgagcatcgagcagaccgccgacaaggcggtgctcaactgggaaaccttcaacgtcggccgcaacaccaccgtggacttccagcagaacgccgactgggcgctgctcaaccgggtcaacgaccccagcgcgcggcccagccagatccaggggcagatcaaggccgacggcacggtgatgctggtcaaccgcaacggcgtggtgttttccggcagcagccaggtggacgtgcgcaacctgacggtggcggcggcgaacatctcggacgaacagttccgtcagcgcggcctctactacgacaacgccggcagccgtccgaccttcaccgacgcggccggcgccgtgcgcgtggagcagggggcacagttgcgtacggcagcgccgtccggctcgaccaggggcggcggctacgtcctgctgctcggcagcgaggtggacaacgccggcagcatcgtcacaccgaaggggcagacggtcctgtccgccggcgacagcttcgtcatccgccgtggccagggcaccgacggcaacctgagctccaccacccgcggcaacgaggtgctgccgggcttcgccgccgacagcagtgccggccgggtacgcaacagcggcctggtgcaggccgccaccggcgatatcagcctcaccggccgcgaggtggagcaggccggtgtattgctttccagcagttcggtggacagccgcggcaccctgcacctgaaggccagcgagcggatcaccctggccgaaggcgccaccagcgcgatcctggtggatagcagcggcagcgccgccctcgacagccagcgcgaggccttgctcaagccgttgaacggctccagtgccgctgtcagtcggggcgacgacgaccgccgcgacctgtcgcgggtggagatcgactccgccggcagcgtcgatttccgcgacggctccatcaccctcgccagcggcggccaggtggcggtcaacgctggccagcgcgccctgctgcgcgacggcgcggtgatcgatgtctccggcgcgcaaggtgtgcaagtggcgatggagaccaacagcatcaaggtcaacgtgcgcggcaacgagcagcgcgacgcctcggtcaaccgcgagggcggcggtctgaacagccaggatgtgtgggtcgacgtgcgcgacctggtacgggtgcctgccggcaccaacggctatgccagcgaccgctggtacaccgccggcggcctgctggaggtcggtggctacctgggcacccagggccactcggcgggcgagtggatggcccagggcggcatcgtcagtttcaccggcaacgacgtggtgacccaggccggttcgcagatcaacctgtccggcggaaccctcgatgtgcagggcggctacatccgccagacctggctgaagggctcggacggacgcctctacgaactcggctcggcgccgggcgacctgctctacgacggcatctaccgcggctacgaggcacacagcgagcgctgggaccagacccgttatttctacaatccgctgatcgcgccgacccagcgctacgagaacggctacatcgtcggccgcgacgccggcagtctggtgatcggcagcgccaatgcgcggctcgacggccaggtggtcggcgatacctatcgcggcgagcggcagaccgaagcgccacaggccggcctggacggctacaaccagtcgcagaatgccgtggcgcgcggcgcacagctggtcgtcgggcgctacaccccctactacgtgaagagcagcggcctgctggagtacgctctcggcgccgatgccggcagcctcaagcaggtggtcatcggtgccggcgaggcggcggccgaggagccgaccctggacgctccggtggccgccgagcgccagggccgcctgagcctggacagcgaactgctcaacggcttccagctgggcggcctgaaggtggcggccggcgagagcatccgcgtcgacagcgcgctgaccctggccaatggcggcgaggcgatcctgttcgccaacgacgtggcgatcgacgccgacatcaccgctcatggcggcagcctgcaggccggcaacgtactggcgcagatttccccgaacgggacgatcgatggtttcgtcgatgccggccgcgaagccggcatcttgcgcgtgggcgatggtgtacgactggatgccagcggcttgtggagcaacctgctgctggcgccggaggacaacgatacgttggcctaccgcgacggcggacggatttccctgcgcagcggtggcgacctgagcctgggacagggcagtctgctcgacgtgtcgtccggggcggcgctgctggccgacggcaagcgactgggcggacgcggcggcgacatcgccttgcacgccagtgccgggctggcgcaggccagcgatggccaattgcagttgggcggcacattgaatggtctcggcacgagtggcgccggcacgctgtcgctgcagagcggcaaggtgcggatcggcggcggcgacctcggggatggcagcctgcaactggccgaagatttcttccagcagggcttcgccagctaccgggtggtcggtcgctccggattgacggtagccgaggatgcccaggtgcgggtcgcgcggccggtctaccgtttcgccagcggggccggcgaggtcgcggctggcgaggcgccgcgagaggcgctggaggcctggataccgccgctgtacctagaggatgccttggccggacgcttggtccaacgcgaaggggcggacctgtacctgcaggcaggcggcgacggcaatatcctcgggcagctcgatcccgccagccagacgctggagctggggcgcggttcgctggtcgaggtcgatccggggcgcgccatcgtcctgcgcggtcccggacagatcaccttggatggcactctgaacgcttggggcggacgcatcgacgtgcgccagcagcagttcggcgcgctcgacgttacccaggacaatcagcccaaggcccaaggccagccccatgcacgctccatctggattggagagcaggcattgctggatgttgccggccgcgctgtcactgccgtggatgggcgcggtcgccgctatggagaagtacagtccggcggcagcatcgtcatcggcggcgagatcgatccgggcaaggcgatcgcgacctcggcggatgcgttcgtcatcgtacgccccggtgcacgactggaggcctccggcagccaggcacagctggatgtaccgggactgggaagggttttgctggccggcgacggcgggcgcatcgctctcagttcctacaatgggctgtatcttgacggttcgttgcgcgccgcagccggcggctcgggagcggcgggcggcagcctggagatcattgcggacgctcccctgtaccaaggttttactgtcgtggatgaccgggtattggccatgcgcgagctgatcctgacggcagggcatgccgattcgggattaccgaccttgctgcaaccgggaatggacgattcggctctgcgctatggccagagccgagttgggacgcagtcgctgacgggcggcggattcgaccaactttcgttgttcagcaacggtccgctgtcgttcgaggggaacatcgatcttgcgatggggcgcagcctgaatctgtacgcggggacgatagccgccacaggtggcgggccgagcgaggtgaagttgcaggcgccctatgtccgcctttccggcatcgggatgtatgggcagcaggcctctggcgagtttcgtccgcgtctcacgtacgggccgaccgcgacagcggagcaggttcgcttgcaggtttctgccgggcgcctgctggatatcgccgggcgcttgtcattcggtagcgacggggtgatcaatggggtcaacgcagaggctgtccgctatcagcgaccaggtttcgagaaggtaacgctgcgcagcgagggcgacctgcgtttcgctggcgactatccagagaatggcgatccgtcggggcgcttgataacccacggcgatctgcaactgactgcggcccaactctatccggtgacgggagcgagttcgaccctctatgccgggtatggactggatgagggggggcaggctgtcttcgatgccgaacggcatttggctatcgaacgtagcggcgagtccttgccggacactccgctgtcggtattcggcagtctggcgttcatggcatcgaatatcgagcagggtggcgtggtgcgtgcgccgctggggctcatccagttcggcagcaatctggatcgtgccccgggcacggtaaggttgttgccgggtagcctgacctcggttagcggcgctgagctggtcatgccctatggaggcacgaccgatgggatcaactatctggtcaaccaggtccccattcaactgaccggtgccgggggcgccctcgctgctgggacactggttgcgggagtcggcctttatgccagcgaggtcgatgtgcaacagggcgcgcggctggacctgtccggcggcggcgaactcgcgggggctggattcatctccggcagagggggttcgaccgatgcgcgttttcatcccctggtgcagcaggacaatgatgggttccgtctgccggagctgtccagcaacccggtgtatgccatcgtgcctggacaccaggccgttagtgcgccattgggcggcgaggcgggcgccatccagccgttggtcgggcaacaggtcaccatcggggatggcgttcccggcctggccgccggtacctacaccttgctgccttcgacctatgccctgttgccgggcgctttccgcgtcgagatcaacggtctggcggggcaaggcgcgcccatggcgacgcaggggttgcgcaatggctcctgggcgacgtccgggcagttgtcgattgccggcacgtccatccgcgacagtctgagccgtcaggtcatcctgtcttccgccgatacgctgcgccgctactcgcagtacaacgaaatgagctatgcggatttcattcgcgccgatgccgcgcgcaagaacatccccagagcgatgttgccagtggatgccagatccctctacctgggattgcgcgcggatgaggagcttcgggaaaacgccctgagcttcgaggggaaggtcgacttcacgccggaagaaagcggatatggcggcagcctcatcgtggatgccgaggcgggcatcgagattctgcctgaaggtgggctgcccgactccgatttcgctggcgtgtcgttggttgcggacgatctgaatgcaataggcgccagccgtatcgccattggcacgctgccctacgtcgaatacggcgagcaaggaaacttcgtccagttcggcgggagcaaccggctctttcccgttgtgctgcgaaagggcgcgcacctttccgcaccggaggtgatcattggcagggatatcacccttgaaggcgggagtggcatcagcactctggggaaaggcaagactgcatacgattcgtccgatggtttcatctatcaacccggcggccgtaacctgctgctcttgtccaacggatggctgaacctgctggcacccgcagcggatagctcgttaccggttcgtctcggaggttgtgcggaaggggcgggctgcgccgacaccgaactctattcggagggcactctgggtatcgccaccaatggtacggtgacgtttggcgacaacgttcgttacgggacacgcaatctcagcctggcgctgagtacgatcaatatcggctccagccagtcgctggccgacgcggccgctcgcggcgtgttgccgaacggcctggcgctggaccagacggtgctccagcgcctgctgcgcggcgagcgcggggcgggtattccggccctggaaaacctgatcctcagtgcccgcgatgcggtcaacatatacggtagcgtcagcctcgacacctacgacccggccaccggcaaatccagcctggccaacctggtgctgggcaccccggccatctacggccatggcaccggcgaggatgtcgccagcattcgcaccgccagcctggtctggagcggctccagccagccggccgcggcaccggtcgccggcggcgccggtagcggtagcggaaccctgcgggtggatgccgagcgcatcaccctgggctacggcgcgaatacccagccggccggcgagaccgacgaggcacgcctggcgctgggcttcgccgaggtgcaactgaacgccagcgagcggatcagcgccaaccacaagggcagcttgcgggtctaccagcacctggacggctacgtcgccggcgaaggcctgcgctacagtggcggcgacctgcgcctgagcacgccgttgctgaccggcgaggccggctcgctgagtcggatcagcagcggcggtagcctcagcctggcggcgccggcgggcgctgccgcggtgaccttcgacagcggcaccgccgggcttggtgccgagttgtccctcagcgcccgcgagatccgcctggatagcgcggtctcgctacccagcggcaagctgagcctgagcgccgaagacgacctggagctgggcgatggcgcgcgcatcgacctggccggacgcaaggccagcttcaacgatgtggataaatacagctggggtggcgacctgctgctgagcagtcgcgccggcgacatccgccaggccgccggttcgctgatcgacctgtcggcgcgcaacaaccgcggcggtaccctgagcgccgtggcgttggccgaggacgccggggtggtggaactgcagggccgcatactgggtggcgccagcggcgactacgatgccggcggcacccgcgtgccgttcctcggtggcgagctggagatccgcgcccagcgcctgggcgatggcggcagcctgagcgagcagttcaccgccttgaaccagcgcctgaaccagggcgaggtcttcggcgcgcggcgcttccagctcaagcaaggcgacctgcagatcggcgacggcctgaaggcgcatcgcatcgaggtgtccctcgacaatggccagctcggcgtgagcggaacggtggacgccagcggcgcgcaggtcggcgagatccgcctggccggcggccgcggcctgagcctgggtggcaacgcgctgctggatgcgcatggaagcctgctgcggcgcgacagctacgggcagatcatcgacagcccgaaccgggcgatggtcgagctgagttccggcagcggcaccttggtcctggccggcggcgcgcgcatcgacctgcgccatggcaccgcggcgccagcggaacaggttgatggcgtcgcccgtggcacgttggagttgaacgcgccacgcctgggcggggtcagcgccggcgacatcgccatcgatgccagcggcgcgctggatatccgcggcgccggcagcatcgccctgaacgcgatgcagcgttacgacgatgcgccctggggcaacgatccggcggccggcgggcggtcctaccaggtgatcgaccaggcttacctcgatgcgcggcatgccgagagcagcgcgttcatcgccgcggcgctggccaaccgcgagttgctcgacggcaagctggccggactgaccaatgccacctacgcggatgctttccacctgcgtccaggggtggagatcgtcagcgcaacggcggacggcgatctggtggtgcagggcgatctcgatctgtccggctaccgctacgccagcctcaatccgaacacgccgctgaccgaggtctacggttccggcgaggtcggcgcgctggtgctgcgcgccggcggtgacctgaacctctacggcagtatcaacgacggcttcgcgccgccgccggactcgccggacgacaagggctggatcctcaccccgggagtgcagccgttcggtggcgacctggtggttcccggcccgggcgtggtgctcggcgacggtaccgcgttcctcggcggccgcaccctcaactacgacctgccgatcaagggcaccaccctggccgccggcacccgtctggccaccgaggcggtactcgaacagccctataccctggccgccggcagcgtgctggtagcggacatccacgatgccgccggcaacctgctgtacgccgcgggcagcctgctgcgcgacggggtgacgctggaggtcggcagccggctgggtgccggtaccctgctggctgcaccggccagcgtgcaggcgatgacctggcctgcgggcgtgcccttgccgagcatcctgcgcgaggggcccagcagacccaatgtcctgctgctcaatggagagctggccttggcacgtggttctctgatcccttcgcagaccgaggtggtactggctggcgatgcgcctttcatcgagttgcggcccagcgacggtgtccgccagggacgcaactgggcattggccgagatgctgccggccggtagccagtcctggtccatgcgcctggtcgccggtgccgatctcgcggctgccgacaaccgtctggtgcatccggactcctcggccagcctgaacctggccgatacgcactatcaggcgaagatcgaacagagctcgggagggctggtgttcaccgatcaggctaccgactgggggatcaccccgggaactccggtcgacgagagcaatgaatggatctgcgggctggggccgtattgtgccgagcctccccgctggacctgggcgcccggcaattacctgggcatgcctgctggtacggcgatcggcgagggcgatctgtggtggtgcagtgtcgatccgtccctgtgtatcgagaatctcggcaaaaccgtggtcacaccgcagaaccagttgttcagtgtgctgcgcaccggcactggcgatcttgacctggccagtgccggtaaccttacgcaatggtcgccgtacggcgtctataccgccggaacgcaggccgccgatgtcgcgacgggattcaatcagcctcgcggtctgttcaatgggtcggtactgggcgccggtggcgcggattacgaagtgctctcaaccagccagtaccaggcctggtatccggaacatggcggcaacctcgatatcgccgttggcggtgatgtggttggcgatcaatgggccgagaaactgacaagtagcgatcccattcgccccttgccccccagcgctgcagttggcaactggctctggcgccagggcagcgccgatagggaaggagtgccgacggcctggtgggtcaatttcggcagctatgtgcgtggcgcggagggagatgctccctatctggtcggcttcaccggtttcggcactctgggaggcggcaatctcagcatgcgaaccggaggtgatgccggcaatatcgcgccacgcggagatggttcgataccttcgtccggtaaccttaatccgcgcagccagggactggtcttggcggttgccggcactggccggctcacctccgacggcgcgctgcaacttggcggcggcggtgacctgaatgtgagaattggcggagaggtgaacccgagccgggaggcgcgggctacccagacctactcgagttcggggtttgacggtctttacagcggcggcaccattcacgatctgcagggggccctgatcaatctgcgcggttccgcgagcttgtacagtggtgcgctgggaggcatcgatcctcgctacgacactctactgcgggaccccgccgaagtgcgcagcagggatgcgttcagcccgacgctggctagctccacgggtggcctcaccctggtggccggagatactggcatgcgtctggaaacccgtggcgacctggtcctgggtggggtgactgaccccggtagggtgggggtgccgaataccgttggcttcacggctcccgatggcagcgtctaccaagggggcgggatcgcttggttcagtctctggactgcacacacctcgatcgatctgtttgcggcgggcggcaacctgacgcccagcacccaattggtcgaggcaaccaacgctattcccatggcaggccgaaacctgtcgcctagcgatgggcgattcatctatccatcgatagtacgtgcggcggccccggaaggaagtatctatctcggtccttccagcggttacatgggaggcgtgagcctgaatgtctcgaccactccctactccttgttattggcaccgtcgctcaacggtgaactggagttgctggctggagactccatttatgccggtggctattcggtgcaacgctcaggtgccgatcctgcgaacctgccatcgatctggacgccggcatttgccggctactccgatgccgcgctgctcaacccgatagccggcaacggcagtccggacgggaatccggccgtcattggcggattgcctctgttctacttcggccccgatagcgctgcgagcttggcgcgcgatctgcaaccggcgcgtttctatgcgttgacaggagatatcgtcgggctcaatagcggtgcgcagattcgtttcggcgagcaggcggggaaccgcgccgggcaaacctggtatgaaggtgcggggcccgtctggatgcgcgccgggcgcgacatcgtagcctccggaaccccattgggacagcgtatcagcgctcccagtcagatcagtacggatgcctcgttcaccggcaacctcttcgtccacgacgaccccaacgacctctcgctggtccaggccggccgcgacatcctctacggcaacttcaacgtcgccggccccggtaccctggagatcagcgccgggcgcaacattctcatggaggatcgcgcggcgatcaccagtctcggcgcggtggtgccgggcgacagccggccgggtgccgatatcgtgctccaggccggcgcggcgggggccgactatcaggccttcctcgagcgctacctggatccggccaacctggcgcagggcggcaccccgctggccgagcagccgggcaaggtggtcaggacctacgaaagcgagttggccaagtggttgaacgagcgcttcggcttcgccggcgacgcggaacaggcccaggcgttcttcgccggcctgcccgccgagcagcagcggattttcgcccgccaggtgtacttcgccgaactcagggccggcggccgcgagtacaacgaagtcggcggggtacgccagggtagctacctgcgcgggcgcaacgcgatcgccgcgctgttccccgagcgcgatccggcgggcaatccgatcagctacgaaggcgatatcgtcatgtatggcggtgccggcgtgcacaccgacttcggcggcgacatccagttgctcagccccggcgggcgccaggtgttcggtatcgagggcgaggcgccgccgtccaccgcaggcatcgtcacccagggccagggcgatatccaggcctattcgcgggacagcatcctgctcggccagagccgcatcatgaccaccttcggcggcagcatattggcctggtcggcggaaggcgacatcaacgccggtcgcggttcccagaccaccgtggtgtacaccccgccgcggcgcatctacgacgcctggggcaacgtcagcctgtcgccgcaggtgcccagcaccggcgccggtattgccaccctcaacccgattcccgaagtggcaccgggcgacatcgacctgatcgccccgctcggcaccatcgacgccggcgaggcgggcatccgggtctccggcaacgtcaacgtggcggcgctgcaggtggtcaacgcggcgaacatccagacccagggccagtccagcggcattccgctggtggcttcggtgaataccggtgcgttgacctccgccagcgccgcggcgagctccgcgacacaggcggcggaggacgtcagtcgccagcagcaggccgccgcgcggcagcgcatgccgtcggtgatcacggtgcaggtgctcgggttcggcaacgagcgcctggagccttcgcgcgacggcgccagtcgttcgccgggctacaacccggacagcgccgtgcaggtgctcggcgccggagccctcggcgaacaggcgcgcagtcaattgaccgatgaagagcgcggcaacctgatcctgtaa

SEQ ID NO: 324612 - DNA, 519 bp, Pseudomonas aeruginosa
atgctcaagccaatgtttggcgtcgttgctctgacgctcttgaccagtcatacaacgctgggcgctacggtgaccggcggtggtgcttccatgccggccaagttgtacaaaggttctgccgacagcatcctgccaatcaacttcagctatgccgcaagcggcagcggcattggcaagaccgctttcctgatgaataaccccatgctgcttggcgctactaccggcaccgtccactacattggtagtgactcgatcttgagtagcagcgaactgagcgcctattcaaccaactatagaggcgcatatggtccactgatccagattccattggcgggtaccgcagtaaccattccttacaagaagcccgatattaccgacctgaacctgaccagtgcccagctctgcgatgccttttccggcgccaaggtcacttgggggcaactattgggaaccccgccgaccgtacgccgattcgtatcgtctaccagcggggcggcagtggagccaccgagttgctga

SEQ ID NO: 324613 - DNA, 1107 bp, Pseudomonas aeruginosa
atgttcaagcgctctctgatcgctgcctcgctgagcgtggccgccctcgtatccgcccaagccatggccgtcaccggcggtggcgcttccctgccggccgagctgtacaaaggctccgccgacagcatcctgccggccaacttcagctatgccgtgaccggcagcggcaccggcaagaacgctttcctgaccaacaactcctcgctgttcggcaccaccggtaccgttcactatgccggtagcgactcggtcctcagcggtagcgaactgaccacctacaacagcaactacaacggcacctacggtccgctgatccagatcccgtcggtagccacctcggtcaccgtgccctatcgcaaggacggcaacaccacgctcaacctgaccagcgcccaactctgcgacgccttctccggcgccaagaccacctggggtcaactgctgggcaccaccgacagcacgccgatccgcatcgtctatcgcaccggtagcagcggcaccaccgaactgttcacccgccacctgaactcgatctgcccgactcgcttcgccaccaactcgacctttaccaacgcccgtctgccggccggcggtacgttgccgagcaactgggttggcgtcgccgccacttccaccgtggtgtcgaccgtcaaggcaaccaacggctccctcggctatgtcagcccggatgcggtgaacatcaacagcaacgccgaggtttcccgtgtgaacggcaacctgccgacccaggctaacgtttccactgccctgggcagcgtggctccgccggccaacgccgccgaccgtgcggaccccagcaagtgggttccggtgttcaccaatccgagcgccggctactccatcgtcggttacaccaacttcgtcttcggccagtgctacaaggacgccagcgtttccaccgacgtccgcgccttcatcaacaagcactacggtggcactaccaccaacgccgcagttgccgcccatggcttcatcccgctgactccggcctggaagagcgccatcgtgagcgccttctacaccggcaccagcgaaaacctggccatcggcaacaccaacgtctgcaacaccaaaggccgcccgtaa

SEQ ID NO: 324614 - DNA, 2412 bp, Pseudomonas aeruginosa
atgaggcaatcagctttccaccatgcccggcgtcgttggcctgtactgggcgtggcgctgggcgcgctgctggtcgcggcgtgtagcgagacgccgaaggtccccggcgtgcccccggccgacgaggaagttggccggccgctgagcagtgtccgctccggtgcgccgttgcgcagcgccgacgtccgcgagcggccccaggccgagcaggcccgccgcgcgctgagtgccggacgcggcgtagcgcgctccggtgccgtggctccggtctcagcgacagcggccgaactcggcgagcagccggtcagcctgaatttcgtcgataccgaggtggaagcggtggtgcgcgcgctgtcgcgcgccaccggccggcagttcctggtcgacccgcgggtgaagggcaagctgaccctggtttccgaaggccaggtgccggcgcgcaccgcctaccgcatgctcaccagcgccctgcgcatgcagggcttcagcgtggtcgacgtcgacggggtcagccaggtggtgccggaggccgacgccaagctgctcggcgggccggtctacggcgccgaccggccggcggccaacggtatggtcacgcggaccttccgcctgcgctacgagaacgcggtgaacctgatcccggtactgcgcccgatcgtcgcgcagaacaacccgatcaatgcctatccggggaacaacaccgtggtggtcaccgactacgcggaaaacctcgaccgggtcgccgggatcatcgccagcatcgacatccccagcgccagcgacaccgacgtggtgccgatccagaacggcatcgcggtggacatcgccagcaccgtctccgaactgctcgacagccagggcagcggcggcgccgagcagggccagaagaccgtggtgctcgccgacccacgctccaacagcatcgtgatccgctcgccgagccccgagcgcacgcaattggcgcgcgacctgatcggcaagctggacagcgtgcaaagcaatcccggcaacctccatgtggtctacttgcgcaacgcccaggcgacccgcctggcccaggccctgcgcgggctgatcaccggcgacagcggcggcgagggcaacgagggcgaccagcagcgcgcgcgcctgagcggcggcggcatgctcggtggcggcaacagcggtactggtagccagggcctggggagcagcggcaataccacgggcagcggttccagcgggttgggcggcagcaaccgcagcggcggcgcctatggtgcgatgggcagcggccagggcggcgccggacccggtgcgatgggcgaggagaactcggcgttctccgccggcggggtcaccgtacaggccgacgccaccaccaacaccctgctgatttccgcacccgagccgttgtaccgcaacctccgcgaagtcatcgacctgctcgaccagcgccgcgcccaggtggtgatcgaaagcctgatcgtcgaggtcagcgaagacgactccagcgagttcggcatccagtggcaggccggcaacctcggcggcaacggcgtgttcggcggggtcaacttcggccagtcggcgctgaacacggccggcaagaacaccatcgacgtgttgcccaaggggctcaacatcggcctggtggatggcaccgtggacatccccgggatcggcaagatcctcgacctcaaggtgctcgcccgggcgctgaagagccgcggcggcaccaacgtcctgtcgaccccgaacctgctgaccctggacaacgagtcggcgagcatcatggtcggccagaccatacccttcgtcagcggccagtacgtcaccgacggcggcggtaccagcaacaacccgttccagaccatccagcgcgaggacgtcggcctgaagctgaacatccgtccgcagatctccgagggcggcacggtcaagctcgacgtctaccaggaggtcagcagcgtcgacgagcgcgccagcaccgccgccggggtggtcactaacaagcgcgcgatcgataccagcatcctcctcgacgacggccagatcatggtcctcggcggcctgttgcaggacaacgtgcaggacaacaccgacggtgttcccggactctccagcctccccggcgtcggttcgctgttccgctaccagaagcgctcgcggaccaagaccaacctgatggtcttcctgcgtccctacatcgtccgcgacgccgccgccggccgcagcatcaccctcaaccgctacgacttcatccgccgcgcccagcagcgcgtgcagccgcgccacgactggagcgtcggcgacatgcaggctccggtgctgccgccggcgcagcagggcatcccgcaggccgcctacgacttgcgcccgagcccgcggccgctgcgcgcggtaccgttgggcgaggcggcgccgctatga

SEQ ID NO: 324615 - DNA, 1038 bp, Pseudomonas aeruginosa
atgagccaggccctgagcatcgtcgcctccggcatggtcagcgcggtcggtctcagcgcgccggccagctgcgcggcgatccgctgcgccctggacaacttccaggaaacccgtttcatcgaccagggcggcgaatggttgcttgccgccagcgtgccgctggagcagccctggcgcggccgcgccaagctgctgaagatggctgcgcgagccatcgacgaggccttgcgcggccagcccgatctcgattgcacggagctgccgctgctgctctgcgtcgccgagggcgaccgtcccggacgctgcgcggggctcgacgagtctttcctgcgtgacctggaaggcgagctgggacgacgcttccatccctcctcggcactcatcgcccgtggccgggtcggtggcgcggtggccctgctcaacgcgcgcaagctgatccagggcggctgccggcaggtcctggtggccggcgtcgactccttcgtcagcggcccgaccctggccgcctacgaggcccgcgagcggctgctgaccagccagaactccaacggcttcattcccggcgagggcgccgccgccgtgctggtcgccgcgccgctccacgaggaggcgccgcagttgctctgcatcggcctcggcttcggcgtcgagaaggccacggtggagagcgaggacctgccgctgcgcgccgacggcctgagccaggccgtgcgcgccgccctcgccgaggctggctgcggcctggagcagatggactaccggctcaccgacatttccggcgagcagtactacttcaaggaggcctcgctgaccctgagtcgcaacctgcgcgtgctcaagccgaagttcgacctctggcaccccgccgactgcatcggcgaatgcggcgccgccatcggcccggcgttgctcgccgtggccctggccgcttcgcgcaagggctacggcgacgggccgaacgtgttctgccacctgggcaacgacgccggcgaacgcgccgccgcgctgctcagctatcgacgggtgagggctgcctga

SEQ ID NO: 324616 - DNA, 1161 bp, Pseudomonas aeruginosa
atggccaacgaggtgtacgccaacaacatggagatctcctgcaaggcggcgagcggcaagtccatcgcggccttcccggatgtctgcttcaccccgccgcaggcgccgccgacgccgttgggggtaccgatcccctaccccaataccggcctgtccaaggacaccaccaaaggcacccggaccattcgcatcacccgcaaggaggtgatgctgaagaacaagagctactacaagaccagctacggcgacgagccggggcgggcgccgaagaagggcatcgtcaccagcaagatcaagggcaaggtgtacttcacctcctggtcgatgaacgtcaagttcgaaagcaagaacgtggttcgccacctcgacctgaccacccacaaccacgcgtcctttcctggcaatacgccggtctggccctacctcgaccaggccaccgtcgatgctggtggtggaccgtgcagcaatgaagtgaagaaggagaagaaggattgcgctgacttcaagccgcatggcagcaaggatgcctgcgctggccttggtgcgggcaagccttccggcaagaagaccagcaacgaagctgaccgactggcagacaaggtcgctgcccgaaaatgcctgaccgcgcgccggtgtgccctgcaaccgtacaagccgaacagttgctgcccgcagcagaccgctcaccacctgatcgaggccagcgccttgcacgacaagggacgtggtggaaaaggctcggtacccctcaaggggatatccaactattcggagaacaaggctccttgcgtctgcgcggagggcgtcaatcagaacgtgggtacccacggcctcatgcacacgttccagagcgccgctgccgcgaagtcgcgcagtggaaccctgcaattgtccaatggcagctccatctccgcgaagaagaccacctacggaacggcgaaacgtcaatccatggctgccatgggcaaggtctttccgcagtcgaaatgctcgaaggaatgtctgtccgctcagctcgacaactatcacaagcagtgcggaatcaacgccagaacacccatcaaggccgttgaaaccggccagaccgacgtcacggctgcgacgcaggcgataaagacccgcaatgcgcgtcttggcgccacgaggagtcgagtccgctag

SEQ ID NO: 324617 - DNA, 921 bp, Pseudomonas aeruginosa
atgttgaagaaactctcgccgattttctcgaacatcaccggcgtcgtccgctatcaggacctggcgtacgtggcctcggtatccgacgagatccaggagcagaacatagcgcacagctatgtcacggagtgggactgcggaacctggtgtgttgctggcgaggatgacgacatgctgccctgggagatcgtgtcggccacggtagtgcacgagccagtggaacaagcattgtttctgggcgctcggggccaggtattctgcatgggctccggcgacatccatgaagagcagttgcccgacggcgacgatgccatcggtggccggggcaatatgcgcggcgttgcctgtatcgacggggtggcctatgcctgcgggatggatcgacaggtctaccggcgcttcgacgagaacgactggcgtgccatcgacagcggcgctcggcctccggcaggcagcgaagcggtggtcggattcgaggccatcggcggcttcggtgccagggaaatctatgccgtcggctgggacggggagatctggcagtacgacggcaagcgctggcagccccgggagagcccgacgaacttgatcctgacggcgatctgctgcgcggaagatggctcggtttacgcctgtggacaggcgggaacgctgctgcgtggacgcaacgaccactgggagatcatcgcccaggacgatgtcgatgaagacttgtggagcctcgcgtggttcgacggcgcactctacgtgtcgagcgcaacggcggtctatacgctggtcggtggccatctcaaggaggtggacttcggtgatgagcaaccccaacgctgcttccaccttagcgctgccgacggcgtgttgtggagcatcgccgcgaaagacatcttcagcttcgacggccagcaatggacgcgcatagattga

SEQ ID NO: 324618 - DNA, 1428 bp, Pseudomonas aeruginosa
atgtccaaagtcgtactggcttcacaactgccgaacaagcgcaacgcctcgctcgcgcccggcctgaaacaacgccacgtcaccatgctgtcgatcgccggggtgatcggcgccggcctgttcgtcggctccggccatgccatcgccgccgccggcccggccgccctgctcgcctacctgatcgccggcaccctggtggtgctggtcatgcgcatgctcggcgaaatggcggtcgcctcccccgataccggttccttctccacctacgccgaccgctccatcggccgctgggccggtttcaccatcggctggctctactggtggttctgggtgctggtgatcccactcgaagcgatcgccgccgcggccatcctcaacgcctggttcccggccatcgacacctggatcttcgccctcgcggtgaccttcctgctcaccgtcaccaacctcttcagcgtggcccgctacggcgagttcgagttctggttcgcgctgctcaaggtgatcgccatcatcgccttcatcgtgctcggcgcggtggccatcgtcggcggcctgccggagcgtgaggtcagcggcctgtccagcctgatggcgagccacggcggcttcgtgccgaacggctacggcgcggtgctcggcgccctgctgacgaccatgttcagcttcatgggcaccgagatcgtcaccatcgccgccgccgagtccaaggacccggcgaagcagatcacccgcgccaccaactcggtgatctggcggatcggcctgttctacctggtgtcgatcttcatcgtgatctccatcgtgccgtggaacgacccgctgctgatccaggtcggctcctaccagcgcgccctggagctgctagacatcccgcacgccaagctgatcgtcgacctggtggtactggtcgccgtggccagttgcctgaactcggcgatctacacctcgtcgcggatggtcttctccctggccaagcgcggcgacgccccgagcgtgctcaagctgaccaacaccgcccacgtaccacgcccggcggtgctggccagcaccgcggtgggcttcctcaccaccatcgtcaactacttcgcaccggagaaggtcttcaccttcctcctcgccagctccggcgccgtggcgctactggtgtacctggtgatcgccgtggcccagttgcgcatgcgcaagcaattgcaggccagcggccagcccatcgagttccgcatgtggctatatccctggctgacctgggcggtgatcctgttcatcgtcgccgcgctgagcatcatgctgatcatgccggagcaccgtcacgaggtgttcgccaccgctctgctgacgatcttcaccgtctgcctcgggctgctcaacgcgcgacgcaagccgcgcctcggcgaggactacgccgggaagacggcgcgggtctga

SEQ ID NO: 324619 - DNA, 486 bp, Pseudomonas aeruginosa
atggcccagctacgtatgatcaatgaacctggactggtcgagcaggtgcaatccagcctttacgaggccggaatgatctccctgacagaagtcagagactgcatctcgaaccccaggatccgggacttctacgtgagggatctcgacgcatcgggtcttccgctcgccggtatcagtgccctgagtgaaatcagcatgctggcggacaactggcagaaaacctatgccatcagccttgatggctggcgagacaggcaggggtcgcttcagcttgtcgatggcttccacttccgggacccgagcatctcgatcgtgcaggtctggtattgcgatccactagagattcactcgcacgaactgagctggctgctcgcgctggcagtgtcattcaccgattgcgaattgcgtcgctgcgaacggacctgcggggcgatcaacgaagtactcctaccccatggctttgcgctggaggactcctggttctga

SEQ ID NO: 324620 - DNA, 1110 bp, Pseudomonas aeruginosa
atggcacactccgtggttagacaccagcagtcccacttcgaacgagagatgcttgagctagtcaggcaggccctgacaaaggctttcggcagaagcgttcaagcagaatccagatccacgatcattacctctgctcactccattagcctgctcaagatcgactgggatggggaacccgcatttgttgcgattgaggtcatccgaactgcctatccccgagatatccatggtgtgctgtggcgccttgatgcactggagttggcaatgccagggactctcataaagctgatcgccgcggcgcatctcagccccggagcgaagtcaacactcaaagacaagggctacgccttcttcgaacgcagcggaagtctttttctgcatacggaaaaaatgctcatcaatatcgagtgtccgtccacgtcgtcagcccgctcacactcaattgatctattcacagaagcccgtgaaagggctgtacatggactgctcaaaaacgcctctcaatggatggcaggcgcagacctcgcagagcaagcacggacctccacatacacctgttccgtcgtgctacaggaactggaacgtcgagagtggtgcgaatctcaaggtgcaggtcgaactaaacggcgcaggctcgttcagcctggaaagctactggatgagtgggctgaacattggcggcagcgagacgtaaacagaagccgctggtacaccttcgtcgaacatcctcgcctgctgatcgatcggcttagcgagctggtaaaggaatctggcgttgactttccttgggcctttaccggggcagcggcagcaaacatctacgcccctttgctcacccatgttgattcagctgaaatcatcgttccacctgggtatgcgactattctggggacaacacttaatatgaaacccgcgccgaaaggcagcaacgtcacgatcgtcgagcgtggtggcgccagcctgcagtttcgagagtgctcccccttgcattccccctacttcgccagtccatatatccagtacctcgatctgctcgatgggcgtggaagaaataaagaactggcaatccatctcagagaaagactggagcaaaaatgggtgacagcctaa

SEQ ID NO: 324621 - DNA, 1809 bp, Pseudomonas aeruginosa
atgtggcttgatcgactcacaggggaacaatgtcgtcagctaccgcctgtaatcgagccggggcgctatgagcttgcagccagtggcccagccttcaacgggcacacacctgctttttcaggtgttttggtgagtgatggcggtgagcggtgccagttgggtggtgaggtacggtcctttgttttaccgcagcaggcacaggctacggcagcagagctgctgtgcaaagccatagcaaccatcgatgccgacatgctgcagttttcattgatgtcgccgttgatgccggctgcgatcattgatgctcagagccatctgctgccctttgaggagcgtttgattgatgtggtgcaacaagggcatctgcatcagatatctcagcggccgcgcctggatcttcactacgaggatgaggtggccgatgtcgcgcgggcacggcgcctggccaaaggcgctctggtgtatctggcatcacattcggagtgttggcagcggcagacactgagcggtgtgattcccaagaaggttttagcgcgatttagcgaggatgattacggcatctatgaaaaccgcgtttatgcccggttgctggacgaaactgagcgtcatttgcagcggcggctgtcagcactgaagagcttgcaggcaacattggaccaggcactgaagttctatcggtctgaggatgttgattttcgcctttctcacgaggtttgccgactctggggaatgacatttgaccaagtggcaaccagcaaggtttctgagcttttaagcgaaacgctagggactcttcagcgtctgcaccgaaccatttcggggctgcagcaaagtggcttgtacctgctggttagccggcaggcgcaggttacaggcgcgctgcatctgaccaacatcctcagccatgacccgcattaccggcatttggcgattctttgggatcttctggctaagacgacggtagctaatcgcgcgacgtctgaggagcgattcaggcagaaccagtatctggcaaatgcctattctcgttatgccggcctggttctgcgccatgcgctacgtccgtatctgcatgggcaagtcgagggcacatgggctggtagacgcatacgtctccagcagagcgggttggagtggcagttggtgagcgccgcctcaagtgagcatgctgctgaggacgttctgctcaccgtagtgccctggctaaccgacgtgccttggccggaggggcttcagcatctccctgtggagaggttcatcgcatggcccgctattgggcaggagcctcaacagtctgcatatcaggggcactggattactctgtcgccatcagatatgtactgcgtggaacgctttggcctgctcgtcgatcaggcgctgtaccgcatggtgctgctgtcgtacagccagccgctcaccaaaatcccggtcaaagtgctggctttggcagacggtatccagggggtacatgttgaccatcaggcccatgctctggaggtgcgggagatcgtgcctgcagagtccattgaattgctgaaaaatgccttgattgcagctaactcaactcggcaagggctagcactggaacagctcaaccaagaaatacttgccttggaaaattgcccagtctgtaaagccaaagcggatctagtttttcagagccctgctggcttccggacaaactgcgagggatgtggcactcagcgctacctgcgacagcaagacggccgattcgtatttgaacaaaatgtttccgggcgagccgaatttcttaccttggggcgtagagcattttcaatgcagatatag

SEQ ID NO: 324622 - DNA, 2457 bp, Pseudomonas aeruginosa
atggcgaagaagagctcaaataagtttggtcctcagcagatgcccgcggctgcaactgccacaggaggagtgccacgtccttcgctggagaagcagatccctgtctggagtgcttcatttgagagcgcctccaaggtgtaccggtcgtttggtatgagccttgatatccaggttgagccggattggttacgcagcgtgtgtgaacgtttccggggcgacggggacaccgatcttgcacgatggattgagcagtttgcgaatgtgtgcaaagagctggtgaggttcaaggagcatctgcacgacgaatatgccgagcgctgggaggcggctaaccagctcgccttaactgctgaagtaagggagcaagcacttgcgacacagcagcaagcgcttgaggaggcaagcgctgctttggagaatgaaaaggctgaactggcaagtgaacaagcactacttgctggaaagaaatcggagctgctggataccgaacgttctctgaacttgcgtgaagcaaacgcagaagctggatacgccgagcagaacgagcatgcgctacgccagcttgaaaagcgacagcgccaactgacgcagcagcatgaagctcatctacagcagttgcaggatgaaaaacgccaacttgatggcgagctcagtcaggtcgctcggcgcttggccgaggtcaagttcaactgtactgaggcggaggccgaacgcaccaggcagttggatcagcgtgagcatgaaatccagcagcggaagatagagcttgatcgtgcacgtagcaggctggatcgtgagtgggctgaaatcaaggctgcagagagcgacctggagcaacgtatcgctactgaaatggaggcggagcgtgcgagccatgcgcaatctatttccaggatggagcgtcagcgtgacaacgcctggagcaaagctgaggggttgaaagaacaactggcggatattcaggagctcaagcaagtgctgggtgagcagtcggctgcagagattctggaacagcttgagagcttgcggcaggaaaatagggcccttaaacgctcgctggagcagtcggacacagccgagttgcagcgggaaaatgaatatctgcgcagcagcaaggctgatcttgagcgagatatcgcaacgctgaggcccgagttggatgatctgcggcgagagctgagcatcaagcgtgttgcatcgactgagctggaggctgtagcgcgggagaagcgtgtgttagagcagcacaagaatacgctggctgtgcatatcgatgatcttgaaagccgaatcgagcagctcaccaacgcacagaaaacccagacgcctttcccagccatgtcgctcatggactctcaccgcgactatcgcgccagcatggagttggaggccgtgccggatctcaagttgtttgccgaggagctgcagcaccggattgccacagcagaagagcatgtagagctgttctatcccctcgaagatattcgcgtgctgctgggtggcttggccatgagccaattgcatgtctttcagggtatcagcggaactggcaaaacaagtctggccaaggcctttgccaaggccatggggggcttctgtacagacattactgtgcaggcgggctggcgtgatcgcgatgatctgctgggccattacaacgcttttgagcggcgcttttacgagaaggactgcctgcaggctctgtacaaagctcagacgccacgctgggaggacacctgtaacgtcatcctgctggatgaaatgaatctttctcgccccgagcagtacttcgccgagttcctctccgcgttggagaagaacaatcgggacgagcgcttgatcagtctgtccgagacagccctaccaaatgctccagccaagcttcatgaggggcgcaagattctggttcctgagaatgtctggttcattggcacggccaaccacgatgaaaccaccaatgaactggctgacaagacctacgaccgtgctcatgtgatgactctgcccaagcaggatcatcgttttgatatcaagaaaatggcgccggcgagttactcctatcgttcccttcgcaaggcatttgttcgagctcgcacggagcgaaaggcggaggtcgtggagttgatacagcgcatgactcgggacgctttcactgagcagttgggtagccaatttgcgcttgggtggggcaatcgttttgagaagcaggcgctggacttcatcccggtgatgctggcaagcggcgcctcttcaggcgaggcgctggatcatttgctgtctactcgggtcatgcgttcgggcaaggtcactggtcgctacaacattggtactgacgcagtccgaagcttgaaggacgccttggagactttctggatcaaggctggtcttgatggggagccgggaaagtccctcgagttgctggatgcagatgttcgacgcctggaaggccgtaactga

SEQ ID NO: 324623 - DNA, 1491 bp, Pseudomonas aeruginosa
atggcagccttcgttgaaaccggcacatacctcaggttcggtcccgccccgaggggcaagaaaaggccggtgctctggcctgtgctagtgcatcgagtgctataccccgacgccaaacgaccgcagttgaatctgtttcagcgtgcggtgcttgggttgattcgtgcacgcactgtccgcgatgagacaatcgccgagctgaccgggcttcaccagaacctgatcaagctgatcttggctcagggcgttagtaatggctggctggtggagaatgctcaggccctgacagccacgggtgaccgtctgctagacgacgaggagatagacgaggccaacctgaaagccggctatttgctccaagacgcgctgacggggcagttctggccgcgcctggttgctcagctaaaccagctcgagccaagagacccgctggcccggtacccggaatttctgggggaaagaaagaccggggagacgatcaggccattcatgatcgcgagcgggataagtgatctgcctccactcgatcatgagtccctgacgctggcctatcgggattatcgcgaagactatcgcgccaaccagcagctgggtcacggcaaccaactaccgaaacagatcagtttgcagggtgtgcagcgactggatgatgcaccgcaatctgcgcgggctcttgtctgggtgacggctgatgacgatggtggtgacctgtgggcggtcaaggatccatttgagctacgtgaaaatgcctggtggctgcaagccacgcttcggcgggtaattgatagtgacgcaaatctgcttgctcgcctggagccattggtgggtatagcgcgagctgacaatcaaagcgttgaacagtggctggaagcattgcgcaagcagactgagctgcaggtcctgattgagttcccctgggtggagcgccagcctgatatcaagcgtcatttggctgcactgctcgtgcgcaaggagaagctccatcaaggtgacagccacgaccaagagttggacgcggcgctgatggagtgccagaagctgctggaagtcgtcatgcagtggctgattcgcacgtatccagcggacgtaggacagctaccaaaacagcaacggcccgatccgaagcttaatcagcggattctctcagcgctgcagatccctgcattcacggaggatgtcatcaggctgctggctaggcagaagattgatcaggttatctgggcttgctcaaagcctgagtcctcgcttaaggcgctcacttttgccgcagccatgggcactcttaatacgccgcagcatccgctcaaggtgctgggtactcgtgagctgcagttgtcgaagctattggagctcgcggatttgcgtaatcggagtagccacgcccagagcagttttaccggaagagaaaaaactcaactcaccagccgtatggcgctggacagtatccagtacgccctgagcttcacagcatgttttaaggaatggatgtaa

SEQ ID NO: 324624 - DNA, 3393 bp, Pseudomonas aeruginosa
atggaacttaaagactttcccatgctgtccgaggatgttctggctctctctacggatgagcgtatcgacggtttcctggccggccaggcgatcttcctccagagctatcaggatgagtggctggcggttcagggcgactcacgtgtcagggtcaactgcgctccggctgaccatggtctatttagccgtctggtaatgcgcgatcagagccgctggctgctgaccagcaaacagggcggcaagctgctggtgcagtactgcgcaccagtcgaagtgtccgccatgcagcttgaactggggatagacgagctgatcgcagatgatctctacggcaagcaggaaatcgccgataagagcatcgaccttgcttgccgatggttcgcggagcagtttctggtgcgtgggctggccgagggggactggctcaccgtcgcgcgctttagcaacagcgcctccaaaggaggcttccaactgctgggcaagggttggcgcgccgatgtggagcaacggcaggaccgtggattgctgatcaaacgccttacccgccactctcgccgtgatggtgcattctcattgctgatcggccagtttgcgttttgtgatgcctccgttgccgctgttctcaatagcgccagtcagcaggcgttgctggatgccgcgctgcgcgacagtgccagttatttggagttgtggaatctctacaacgataaggaatggcagagtgcattgcggcaggccgagaccctgcgctcactgcgtttcgtgcaatgtgatggaggggaagatggacgtgaaaacgtctggcgtctgactccgaaatcgcaggacgactaccgggagtttcgtcagcgatggcgcgatctcgaattgccaagcgacacccagttcgaccttggtactgagcggcccgactgggctgaagagctgaccaccgacgaggcgaaggcagccgcgagcacgccgcgcggcaccgtacgctttgagcctgactgtgttgtcttcaagactgcctcaaaccggcgcgatgttcgcccgaaacaggctgagggctggctctacctctcactggcaggccagcgttccgtaggcaagaggcgccttgcggccaaacaatccattgactcgggcaagcggctgtcgcagttgaagtggcttctggagggcgttgcggtgccggcggcccggcgccggcccatcaaagggcttacgccctatgcgcaggaaaccttcaaggggggcaagccaacagagaagcaggccctggccctggatgctgcactcaatacaccagacctagccatcatcattggcccacccggtacgggcaaaacgcaggtaatcgcggcattgcagcgtcgtctggctgaggaggcagaagagcggaacattgccgcgcaggtcctgatcagcagctttcagcacgatgccgtagacaacgctctggatcgcagcgatgtgttcggcttacctggcgcgcgcgtgggcggtaagcgcagcgcgagcgatgaggcgtcgctgatcgatccctggcttgagcggcatgtggcccatttgcaggaaaaaattaccacggagtacagcaagtacccggaactggagcgcatcagggatctgtcgaccagattggcgctagctcgagttgtcggcgcatcgccagctcaacaagtggaagtgttcgaccgcattctggacggactgcgaggcctggagcaaagcggtctggtattgccgcccaggctggaaagtcagcttgaggaccatatcgagcaactaaaaaagcaggcgccaagttccgccgagagccggccggatgtagaagccttgagacgcattcgagcgttacgtgtcgagacctcctcattcgctgacgatggccccgatcgagcctgggatttgctcagctggttgaagcgtcgtggccaaggttgcagcgccgagttgctggcattgctgcaagacgctgcggatagctcgcacccggcggaatcgaccctgcatgcgcttgcggagtgccagggtcgcctactcgaacagtatttgcccgattaccgacctacggaattgaggcgtcaggcggaccctgaggggcaggctctgcttgatgaagtcgacaggcatctggagagcaaactgcgccagcgcaagcagggcgtagcctgggtgctggagcagctcgtcgacagcctggcgatggaccgcaatgctgctcaggctgtggttaacgagtactccatggtggtgggggcaacctgtcagcaagctgcaggccggcagatggcgagtctgaagtcagtggctggtctggatagctccgatattgagttcgacaccgtggtgatcgatgaggccgcccgcgccaaccctctggatctgtttgtgccgatgtccatggccaagcggcgcatcgtcctggtgggcgatgaccggcagttgccgcacatgctcgagcctgacattgaagggcaactacaggaggagcacgagctgaccgagctgcaactggcggcttttcgctccagcctgttcgagcgcatgcgcgtgaagctgcaagacctggagaaacaggacacgattcgccgggtcgtgatgctggatacccagttccgcatgcatcccatattgggggatttcgtcagcaaacagttctacgaggctgttggtctaggggcggtacgctccggcagggctgcggaagattttgtcttctcccaggatttgctggctgctctaggggagcgtgagccgtactaccgaggccgggtatgccaatggatcgacgtacctgttgcccagggcaaggatcagcgccgcgggacgagccgagtcagggatattgaggctcagcgcattgctgaagaggtggtaaggctgatgcatgccggagatggcagcctctcgattggcatcatcaccttctatgcggcgcaacgtgatctgatcatggagaagctcgctcagcagcggatagagggtgttgcgttgatggagcgccgcaacggcgcctatgagccgcacgagcatttcaaatgggccaaaaaggtgcgaggcgatggctcagtcagcctcgaagagcgactgcgtgtgggctcagtcgacgcctttcaaggcaaggagtttgatgtcgtcttgctgtcctgcgtacgtacctaccagcaggcaaggcctgggcaagcctgcgacgatgcagccgacgatcgtgagaagcaattgaatcgccagtttggcttcctgcgtttgccgaaccgaatgaacgtggctatgagccgtcaacggcaaatgctgatttgcgtgggtgacgcggcactggcaaccagtcccgaggcggaagaggcggtgccggcattggcggccttctaccagatgtgtggaggtgagcatggcagccttcgttga

SEQ ID NO: 324625 - DNA, 1404 bp, Pseudomonas aeruginosa
atgaccgcgactacgacagcgcagcagaagcgtgtggtacaggacaccaaaggctcggtttatgagctgagagaggaaatgagccggggtggacagggcattgtctatcggacgcagtacccccaggttctgatcaagggctttaccaataaggatgcgcaagctcgacagcgttggcatcgtcatattgcctggctgattcgtcagggactcggtgacctgaaacttgccaggcctctggcgctgttggcggaaccgcgctttggctatgtcatggagctgatggacggtctggttccgttgcaaagcctgctcgacagcttcatcaatgctgaagatgaggcgtctgccgattatctgcggcagggtggccttcggcggcgtatccgtattttgagccaactggccagaacactgaaccaactgcatgcgcgcggcatgctttacggcgatctctccccgagcaatatcttcgtgtcggatgaccctgcccacgcagaaacctggctgattgactgcgacaacatcagcttggaagcgcatggcggtctgaccgtgcatacggcggactatggggcgcccgaggtggtgcgtggtgatgcgctgctgtccagcctgacggacagctggagctttgcggtcatcgcttaccagttgctgacccataaccaccccttcaagggcgagctggtcagcgagggtgagcccgaggaagaagaggctgcgctgcgcggtgagcatccctgggtttatgacatgcatgacgatgccaatcagtgttttgccaacctgcccatccaactgattgagcacagtcggctgccagtgctcttcagccgctgcttcgagcaggggcggcatcgcgccagcgagcggccgagcatggccgagtggcttgaggcgctggcggaaattgacgagcgcctttattgctgcgcaagttgtggtggcactaccttgctgcctgtggagcttgactcactcgatgacgcgtcatgctttttctgcgacgagcctgccgataaccggctggtgttgctccaggagttcattgctctaccggtagaaggtgagagtcagtctgatgagctaggcaacttgatggcgactggccgcaaggtatggctgcagccgggaggcaatctggaactcaagcgcctgatgccaacgttcagctatgaccgttggcctgccgaccatatccgcatcgagtacaccgagcaggggctcggtattcaccccctgtcccaaagcaaattgcatctacagcggggggcggcgaagaagcctcttgagcgctaccaggggcttaaggaaagtctgcgtggacagcacgaggagccttaccagatccatgtaggcgacttggaagagtcccatgtcatttggcagttcaggtggtga

SEQ ID NO: 324626 - DNA, 693 bp, Pseudomonas aeruginosa
atgcgcctgctggcaggtggggcttcggtgcgaggccctgcgcatcagctggatggcacgcctaatcaggatgctctgtgtgtcagcggcctacgcggcggttggtgcatcgccgtggctgatgggttgggtagccgcccgcttagtcatcttggctcccggaaagtcgtccagctgttcaggcagctagcccgtcagcgacgagacatgccgcatggcacggttgccccggttttgcgtgatgcctggctggctcactttggtgaccgttacaacgaccacgagacgacctgtctgtgggctcgggtggatgcctccggacgaggtgtggctggtcaggttggggatggtttgctgctggttagaagccagggtgtgttcaaggtgctgactgaccggcgccaaggtttcggaaaccagaccaccaccttggcgcaggcggattctcaggatggctgcagcgccaaccttgtgttgagcctgccgggtgatggcgtattgctgatgacggatggcatctctgatgacctgattccggagcagttggagccattcttcgatgcgatttaccagcgccagttgcgttgcagcaagcgccgtatgcgccagtggctgacacgagagctgcacggctggtccacacctcgtcatggtgacgacaagaccatcgctggaattttcagaacggattga

SEQ ID NO: 324627 - DNA, 672 bp, Pseudomonas aeruginosa
atgtctgaactcaaaaaattccaggtccaaaccgcacgtccgctgccgatcatcgtgctagctgataccagtggcagcatgtcggtcgatggcaagatcgaagccctgaacaaagggctcaaggacatgatcagcagttttgccggtgagagccgtctgcgtgcagagatccaggtcagtgtgatcacctttggcggcagcctggctgagctgaacctgccgttgaccccggcccaccaactgcaaagtttcacaccgctggtggcagagggcatgaccccgctgggcggtgccctgtcgctggccagcgagatgatcgaagacaaggacagcatcccttcccgcgcctacaagccggtgatcgtgctggtctctgatggttatccaaatgatgactggcagggtccctttgctcgcctggtcaatggcgaacgctcctccaaggccactcgctttgccatggccatcggcgccgatgcggatgaggtaatgctcagcgacttcgccaatgaccctgaggcgccgctgttccatgccgagaacgcccgagacattcaccgtttcttccgggcagtgaccatgagcgtcagtgcgcgcagccagtcggccacacctaatcaatcgacgcccttgcagatccccagcgctgacgatcaagactgggagttctga

SEQ ID NO: 324628 - DNA, 1347 bp, Pseudomonas aeruginosa
atgaaattggtcgccaaccgaattaacggagtacacctgcgggatctgctgcctgcgataggcgttgaggtggatggtgtattggctgctgtggcttatggcagcagtgcgtctgatatcacacaggaccttgtcgggcattgcgtggccaacaagctgcgcctggatctgtggatgcgctacgaccataccgtgcctgtatcggtagagctgctcaagcggttgctcaatcatcaaaaggacaacgtctttacgcgtttcgtcccggatcgttttcaccccaaggtcatctggtggaaaggttatggaacctacatcggctcagccaaccacacggataacggctggctgacgaatatcgaggcgggagtattcctcacagaagatgagctgctcaccaatggcatggatagccagttggaggacttcttcgaataccttcgcgaactggatgtgacgattcctatttcggcggactacatcgcggaaatggaacggctcaacgccctgaacaggagcgtctatgccgacgccttcaaggcacggaaacatccggaatgggaggggcctagcttcgtagagaagaagccagcctttgatcggcgcaaggaaacattcaagcgcgagtggctcagcacgctgggcattttgcagagtatccagcaacagcttgccgactatcggcccaactgggtcggcgctgaggtaccagcggcctggcaggttgatcagttcctgcatgcgtactactacaaccacgttggcgacagcttgcataagccctatgaggactatcaccggcttaaccagggcaacccacaagtggctctggaaaccgagttgaagtggtggaaatccctctcggaggcgccctcaagggaggactacgccctttatgagagtgcgccgacggtgcgggccttgttggcgcaagacaaagtacaggaactgacctacgacgagttcgccaccctgtgtcgcaatacgcacgccaccatggatcacatcatcaaggtacccctggcggagttgggccggcctgagctcaagacgttggaccgggaagcgcgggttgagcttttcgcgccgctaatccttcgtcagcgcaatcgcaaaggttgggatgtgcgccagttgctccactacgtgctatatggcgggccgaacgatgagatctggcagcgcctctaccatgcagggcgtgattcggattacagcattgcgcgctacgggttgaactcgctggccgaagtggtcgggtgggctcggccggaattggttccgccccgcaatggacgaaccagcaaggcgctgagagctctggggttcgatgtgaaggtctactga

SEQ ID NO: 324629 - DNA, 897 bp, Pseudomonas aeruginosa
atgcacgccatttttgccatagagccggaggccatcaataactggccaggccttcgctatgccgtggagaagtttggctacagcaagggactcttgatcgcacgctacccaggtaagtgggagcgaatggtgatggaggcctgcaagcttaacggtgttggtgatctcgacatggcgcgagtcgtggagcgattacaagcaatcaagagcgaccggcttgtgcggatggggcttccgtacggcgatggcgattggctggaaaatgttggtgctgagggcgttttaaataggttgtcagccatcttggtgcgaaaccaggtcgtctcagaaaagttccatcgcctcgatgatgcccacgagaatctgtttgaaaatcgccgggattttcgtgtgaagcggactgcgaatgagttggctcaggccgctaaatatgttctggccgcctcggatagcattgtgctggtggaccgctactttcagtccaggcgaaagtgcacaaaagtcctcggtgccatgtttactgcttgtcaggaagtaggtgcattgcctaatcaggtaactattttctccgattacaccaaggaccctcgcggcataggcgtggtagggcaagagtatagagatttgctcggcggatgggttgagcgcggaattaaaatcaccatttgtcgattggctggagatcagttagatcaagatgtccatgcgcgatacctgttcaatcagaaagcaggactgcgctttgatcggggcttcgttgagcccgaggctcatgatgaacgtgagcatgagactgacgtgagctgtatagattcgtcattagtcaacgagctatatgcccgtttcattgatgttcgagggcgcttaagcgttgttgataaggttgttctggagtag

SEQ ID NO: 324630 - DNA, 1728 bp, Pseudomonas aeruginosa
atgcgcattacggaaatagctctcaccaactttcgctcatttcaggtcacccaatccatcgcgctggcacctgtcacactgctgttcgggccgaatagcgtgggcaaaagctctgtgctgatggcgctgttctatatccagcagatgctggaaaaagggcaatgtgacccccagcgcattgatgcgttgggtgaaaagcatgtcggcggcttcaaaagcttggtcaacggtcgagatatcgccaaacgaatggtcttgaagttgactatggataagtcagacttaattggcacaagttacaatcagattgtggatctgataggcgatgattttgaccttcccgccgacagccccacggctgacgccaaccgagttgctgttgagtttcatattgcttggtcgagcgcagaagatacggcatacgttgcctgctacaaagtctggctggacgaccgtctgattgccgaactcgacagtgatactggtctaaagcagcccactgtaacttggctcgattatcagcatcctgctttgttgaccccgctcgaacgtgtgcatcagggtggggacgttgatgtctttgtcagccgattccatgcgttgctcaacagtgatcgtaagccacaaaaagtttccagaagggatgtagggcaagccgctgacatttctttcgatcatgccgccatcggcttcaaggggattgctggtgccttacccgtgctaggtaggcgacttgaaactgtggtggatacggatgatccgctgatcaccacacgtctacatgaaattctgtccgatgtggttgtggctcccctagacaacctattggcattactgaatgatagcctgtgtatcgggccgttgcgccttatcccggacgccctgcatcagcctaatccttacccgcagcagacggactggtactccggagccgccgcctgggatatcaccgggcgactgagtgcagccaatatggcagagctcaatcactggctgaactcggcagaaaccctgaacctcggctactccctgcgctcgaagagtgtgatcagccaagccgcctacacgggaggcggcgatacttccagtgaattgcaggccttgcttgagaccttcggagactccctccgtctgggcctctctgaagcggatgcagatggcaatccgctgcctgaagagcattcagtatcgctagctgtactgaagaaactgcttgaggcagacaaagatactactgaagccaaagcccggcagcttgtgacgaaggagttccacaacaagtgggtgctgtgggatcacctcaacaacattgaggtggccttttccgaagtgggcgtcgggatttctcaactcttcccgctggtggtcgcagcggtacggagcaagcaaggcatcatcgcttgtgagcagccggaactgcatgtccatccgaggattcaggtcggcatcggcgatttgctgacacaagctaaaaagaagaccaccttcctgatcgaaacccacagcgagcacctgattcttcggattttgcgtcgcatccgagaaacctccgaacgcgagttgccagagggtttgcagcccgtttctccagccgatgtctccatcgtctatatggagccgggtgctgccggcgtaagaactcggcgtattgaaatagaccatacgggggagtttaccagccgctggcctaatggtttctttgctgaacgtggcgaggagctgttctga

SEQ ID NO: 324631 - DNA, 1188 bp, Pseudomonas aeruginosa
gtgagttggccaatagttaagctgggggaaattttcgatatcacatctagtaagcgggtccatgaaattgattggcgcaatgaaggtgtgccattttaccgcgcaagagaggttgctgttcttgcaaaggaaggtcgggttgataatgacttgttcattgatgagtcaatgtacgaagaatttaaagccaagtatggcgtccctaaggttggggacctgctagttactgctgttggaaccctggggaaggtatatgcagtccaggagtctgatcgattttattttaaagatgcgagtgttatttggttaagggcgaggcaggaggttgacacgtcttacatccaacacgccatgaatagcactgatgtacagaggtttatacagaactctagcggtgcaacagttggcacatatacgattagccgggccaacgagaccgaaatccccctcccacccctgccagaacaaaagcgcatcgctgccatcctcgacaaggccgacgccatccgccgcaaacgccagcaagccatccagctcgccgacgacttcctccgcgccgtgtttctggacatgttcggcgacccggtaactaattcaaaaggatttcctattggaacaatccgtgatttggttgctacagcagattatggttcatcagccaaggcgtcagagacttatggggagtatccgattctgcgaatgggcaatattacctatcaaggaagaattgatcttgagggtttgaaatatatcaaccttgaagaaaaggaaaggtcgaagtatctggtggaaaaaggagacctgttgttcaatcgaacaaacagcaaggagcttgttgggaaaactgccgtttatgatatggatgatccggtggctattgctggctatttaataagggttcggccaaatgaaatggggaatagccactatatttctgggtatttgaactctgcgcatggaaaggcgacgctgcgatctatttgcaagagtattgttgggatggcgaatattaatgctcaggaaatgcaaaatattccaattatgcttccttcgattgagctgcaaaggaaataccaagagctggttgttgtaacaaagtgcaagttgcaagtattcgatacggcgcttaagttgactgagcagcttttcagctcgctaagctataaggctttttctggtcagctatag

SEQ ID NO: 324632 - DNA, 1584 bp, Pseudomonas aeruginosa
atgctcaccggcaaaatccgcaatgatatcgacaagctctgggaaaagttctggactggcggcatcaccaacccgctgaccgtgattgaacagatcagctacctgatgttcgcccgcatgctcgacatgcaggaagacgtggccgagcgcaaggccaaccgtaccggcaagcccttcgaccgcctattccccaataccccggaaggccaactgctgcgctggaagaacttccgcaacatgagcggcaaggagctgcacagccacctcaagcagaaggtctatccgttcttcgcccaactcggcagtgctgaaggcgagggcggtgagcgcgaaggtcttggccatatcagcgagtacatgcaggacgccgatctggagatcaagaacgagtccgtgctgacctccgccgtggagatggtcaacgagctgccgctgacccagagcgatgtgaagggcgatatctacgaatacctgctgagcaagctcaccaccgccggcatcaacggtcagttccgcacgccgcgccatatcatcgacgcgatgatcgagctgatcgctccgcaaccgaccgaggtgatctgcgacccggcctgcggcaccgccggttttctcgcccgcaccatggaatacctcaaccgcgtgcattccagcccggaaggtacgttcagcgacgaagacggcaaccggcattactcaggcgacctgctcgaaccctaccgccagcacatcaacagccagatgttctggggcttcgacttcgacaccaccatgctgcgcgtctccagcatgaacatgatgctgcacggggtgaacggcgcgaacatccgctaccaggactccctgagcaaatccatcaaagagcactacccgcgccaggagcagaacttcttcgacgtggtgctggccaacccgccgttcaaaggcagcctggatgaaaccaacaccaaccccgatgtgctcggcctggtgaaaaccaagaagaccgagctgctgttcgtcgcccatatcctccgctcgctcaagctcggtggccgctctgcagtgatcgtgccggacggcgtggtgtttggctcatccaaggcccaccagcaactgcgtcaggagctgctcgacaacaaccagctcgaaggcatcgtcagcctgcccagcggtgtattcaaaccctacgccggcgtcagcaccgccattctgattttcaccaagggcggcaccaccgagcgcgtgtggttctacgacctgcaggccgatggctactcgctggatgacaagcgcaccgagctgaaaggcgagggctgcaacgacctgcccgatgccattgcccagtggcgtaaataccggcagatggtcgaaggcaatatcagcgccagcaccatcaataccctgttcggcgacaagcgcaaaaaggcttttgtcgtccccgttgaagagatcgtcgccaacaaatacgacctctccatcaaccgctacaaggaagtggagtaccagcaggagcagtacgaggagccgaaggtgattctgaaacggctcaaagggctggagcaggaaattctggcggatctggatgagctggaggggatgctgtga

SEQ ID NO: 324633 - DNA, 2130 bp, Pseudomonas aeruginosa
atgcaagctagccaatggacgacagaaatcatcgtgatctgcggggtgctcgctatcgccgcagcggttatcggctatgtgctcgccgccctgcgtcaggggaggcagatcggccagctcagcatgcagcttgagcaagcagagcaggccagggcttcgactgagactcagcagcaatctctgcagattcagctcaaggcagtagaagcacgcagccatgagctgcagatcgaagagggcaagctgaaggcgcagttgcaagcatcggccgataccgcggcacgtctttctacagagctgtatgagcgtaaagcggccggatcggacttgcaggtgaaactggacgaagctaaccggcaacatcatgagtcagccaggcgtctggaggctgtacaggctggcgcccgagggctgcaggagcaggtgaccgaactgcgcgggcgcctcgatacatcgacaaccacaaatgctgcgttgcaagaggaacgtgaccgtctcaaggatgccctggcgagcgaggaaactcgcgcgaaggtggcggaaaccgccgagcgtgaagctcgcgaacagctcaacgagatcaagcaaaagctggtcgagcatgcacaggcattcgacgctttgcaggcgcgttatcagtcgacgagcaatgagcatgcagagctggggaccgctctggacaagagcgagaagcaagtggccgagctacgagagcgcctggctcaggctcaagccacaaatgaacagctacacacggatcgtgaccgtctgaaagacggactggcggatgaaggcaaacgggccaaggccctggaaactgccgagcgcgatgtgcgaaaccaacttcttgaaaccaaggaagcgctttctcagcaagtacgatcgttcaacgagctgcaggagcgcctgaacgtactttcgtccgagcacaccgaactcaagaccaccttgcagaagcgcgaggagcatttccaggaacagatggcgcagttggccgacacccgcaagtcgctgacccaggaatttgaaaacctggccaacaagattttcgaggagaagggcaagaccttcacccaggccagccagaccagtatcgatgggatgctcaagcctttccgcgagcagatagaaggcttccagaagcgcatcaacgaagttcatgatgcctcgctgcaaggcaacaccagccttaatgccgaaatcaggaaggtgctggaaatcggcctgcagatgagcaaagaggccaacaatctgacctcggccctcaagggtgactcccagcagcgcggcgcctggggtgaggcacaactgcgtcgcacgctggaaatgagcggcctgatcgaagaggcgcactacgaagtgcagagcgccttcaaggatgccgaaggccgttccaggcagaccgactacctgatcaagctgcccgacggcaaacacatcattatcgacagcaaggtttcgctggttgcatacgaccgcgccgtggccgccgagtctacggaagaatgccaactggcgatggccgagcacgtcaaagccgtacgcaagcacatcgacgaccttgcctccaaggactacactaaccttgtcggtatgcgcagccccagcttcgtgctgatgttcatgcccatcgagccggcttacatcgaggccatgaagcacaacaaggacctgttcgagtacggctacaagaaaggcatcgtgctggtctcgcacaccaccctgattcccattctgcgtaccgtctccaacctctggatgatcgagcgcagcaacgccgaagcgcgggaaatcagcgagaaggcgggcgagatctacaaccaggtctgcactgtggcagagcgcctcggcaagctgggcggcaccctcaacaccgtcagcaaccactacaacgacaccgtcaaggcgctggctggcaagcaaggcctctacggaaaggtggaacgcttcaacaagctctcggccaaggtcagcaagaccctgccagcgctggagcctgcacacatggacttcgagaacgagcggctcgtgctgattgtagaggcgctcgacgaagcgccggagccagccgacgatttgccgcaactgatccagaacagtcacgaaggcgagctgctaccgcaggcctga

SEQ ID NO: 324634 - DNA, 3399 bp, Pseudomonas aeruginosa
atggacagaatcgcctatatgaaatcagtcaatttcgagttcctccgccccggcaacgaactgctggctaacctcgctggtctggctgaggccgtactgcatatcgacccgggcagtgcattgacgcgtctgcgaagcttcgccgaggagctgaccaaagccatctacaaggaagagctgctgccccgcatgccgcagtcaactttctacgacctggttaaaaactcggtgttcacggattgcgtcagcaagcctctggttcaccagatcaacttcctgcgtatccagggcaatgacaccgctcacggtgcggaaggtgacctgcgcaatgcacagctggcactgaagactgcccatcagctggccatgtatatggccatcaagtactacggcactgcgcaggccgatattccgccctttgccgaggtgcaggatccgaccgcgaccctcgccagcctgcagaagaccgtctccagctacgagaaggaactcaatcagcagcaggaagagctgcagcgcgtcatggagaagctggaccaggagcgcacccgcaatctcgacaagctggagccgccggctaagcctgaccagcagaagcgtcagcagcagagccagatggtcgctgacagcctgcaatggaacgaggccaagactcgtaccctgctgatcgatgccatgcttctgcaggccggctgggatgtcagcaaccccgctcaggtcggtcaggaggtggaggtcgacttcccggataacacctccggcaaggggcgtgcggattacgtgctatggggggacaacggccagccgctggccgtgatcgaagccaagaaatccggtaatgtcagcctgcaggccgggcgcgagcaggcccgcatgtacgccgacggcttcgagcgtatgggcatgcagcgtccggtgatcttttacagcaatggctacgaaacctttatctgggacgaccagcagtacaacacctaccgtcccgtctacggcctctacagcaaggacagcctcgaatacctgatctaccagcgccagtaccgcattgccgaggttgaaaaacacaaccccgagctgagcattgctgatcgcccctaccagatcgaagcgatcaagactgtcgccgctcacttccacaagcagcgccgcaaggccctgatcatccaggccacaggcaccggcaaaacccgcgtggccatcgccctggccgagctgcttctgcgcaccagttgggccaagcgcgtattgttcctgtgtgatcgcaaggaactgcgcgtacaggccgatgatgccttcaagcagaacctgcccagcgagccgcgctgcgtgattggcgaaaccaacaaggtcgaccggaccgcgcgcatctatatcgccacctacccgggcatgatgaatcgcttcgcccagctcgacgtaggcttcttcgatctgatcattgccgacgaaagccaccgcagcatctacaacaagtaccgcgacctgttcgattacttcgatgcgttgcaggtgggcctgaccgccaccccggtgaagttcatcagccgcaacaccttcgacatgttcgactgtgaaaccaccgatcccacctttgagtttgggctggatgcggccatcaacaacgagccgccctacctggtgccgttccgcgtacgtgacctcaccaccgattttctacgtgatggcatccactacaacgacctgagcgatgagcagaagcgccagctcgaagatgatctcggcgaagaggaggccaagcgcaccaccgtcgctggcaaggacatcggtcgcaagatcttcagtgaagacaccgaccgcatcattctggaaaacctgatcaacaacggcatcaaggacgaaaccggatcgctagttggcaagaccatcatcttcgcccagcgtcaggaccacgccgagcatctggaaaagctcttctgcaagctctatccgcagtatggcgccaaggtctgcaaggtcatccacaacgccatttcgcaggtggacaccctgatcaaggaattcaagaagccggacaacgacttccgcatcgccatctcggtggacatgctcgacaccggcatcgatgtgcccgaagtggtcaacctggtattcgccaagccggttaagtcctgggtcaagttctggcagatgatcggccgtggcacgcgcctgcgccccaacctgttcggcccaggcaagaacaagagtgaattcctgatcttcgaccactacggcaacttcgactacttcgagcaggagtatcaggagccggaggacaccggcggaaaatccctcctgcaaaccaccttcgaggcacgcgtggagctggcccaggcggcgctcaagcacaaccatgcagccgccttcgataccaccatcgagctactgcgggcggacatcaacgacttgccggacaccagcgtggccgtgaagcgcgagctgcgtgttgtgcatcagttgcagcaaaccgcgctgctgaaacagttcgatgccaaaacccagcacctgctgatggacagtatcgctccgctgatgtcggcccgggtgctgcgcgacaaacatgccaccgcgctggacaagctgatcgcaggcatccagcgctgcctggtcgagcaggccagttgctttgaggatggcaagatcgccctgctggccgaagtggacaagctcgccgttaacattcaggccgtgcgccagaaggatgccgtgatcgctgaggtgcgcagcgccgagttctggcagcaacccagcatcggcaagctggaacatgcccgccaggaactgcgtagcatcatgaagtaccggcagaccgacaccgggcctggctatggcgtagacaccacgcgaaccgcggatggcaacgtccagggcgaagagcgtgtggtgtatatcgctggcgccaacgaagcgatgatctaccgccgccgcctcaaggacattcttgacggcatgctggccgccaatccaaccctgcagaaaatccacaagggcgagccgattgccgagccagaactgaagacgctcacctcgaccatcctcaccagccatccgggcgtcagcctggaagtgctcaacgagttctacggccgtaccgcggatcagctgcaccttaccgtgcgcgagatcattggcctggatgcgcaagccatcgaggagcatttcaagagcttcctccacgcccaccccagcctcaccgcccagcaggttcgcttcatgaacctgctgaagaactatatcgcgcaacacggcagcattgtcgtggagaaactctacgagccgccgttcgacagtatttcccacgagggtatcgatggcgtcttcgcccccgaggatgtcggcgagttggtcgccgtgctcaagcccttcctgcgcggggatgtcccgccaagcagtcactag

SEQ ID NO: 324635 - DNA, 1482 bp, Pseudomonas aeruginosa
gtgtcgaagaagccgcgggtattgacttgctgggtaggggggaacgatctcaaagctgttaacgacagcgaggtcgggccgattttgtcgaccctgcgggttgcgtcctttgatcgtgtcgagctgctttgctcttaccctgtcgagcgtgttgagccctatctggcatggctgcgcgagcgtgtcgatataccggtcgaggctcattacgaatctctgagctccccagtccacttcggggaaatctaccaggccgccaacaagcatctggagcgcttgtccgcttcccgcgctgatctttcgattctgctcagccctggtactcccgccatgcaggcagtgtggatactcctcggcaagacccgctacccggcaaccttctatcaatcctccctcgaacaaggcgtacagcaggttgaggtgccattcgaaatagcggccgagtacgtgcctgccgccaatagcatcactagcgccaagctactggagcttgcggggcaaaacattcctggcaacgcagccttcgacagcatagtcacgcggagtgaacgcatgatgatgcttaaggctcaagcgcaggtcttggcgcagaagcaggttccggtgttgatctacggtgaaaccggaaccgggaaggagctatttgcacgagctatccacaacgccggtccacgtgctggggcccgcttcattccggtcaactgcggggctattgcgcccgagctcatcgactccacattgttcggccatagaaaaggtgcattcaccggggcggtggagaatcgagatggcgtgttccagcaggcgcatggaggcactctatttctggatgaatttggtgagctgaagccggacgtgcaggttcgacttttgcgcgttctccaagaaggcacgttcacgccagtcggggggacgcaggagctaaaggttgatgtgcggttgatcacggctacccatcgaaatctgatgcaggaagtggctcatgggtgtttccgtgaggacttgttctaccgggtcgccgtcggggttcttcatctaccgcccctgcgagagcgtgaaggggatctgctcttgctggcagatgcgctgctagaagtcctcgctaagcaagatgcctcgctgactggtaagaaactttccgctgaagcaaaaaaacttattctgaggcatccctggcgtggcaacgtccgggagcttcagtccacattgcttcgatctgccttgtggtgccagggcagtgctatcggcgcggaggatattgagcaggcgctgttccaacttcccttggagcaagtcgacgtaatggcgcgtgatgtttcacaaggcattgatttacaagagattgtggctgaggttgcagggcattacctgcataaggcgctcactctcaccgggcacaacaagactcgcgccgccagcctgttaggcctcaaaagccagcagacgctgagcaattggatggacaaatacggcatcgagtaa

SEQ ID NO: 324636 - DNA, 987 bp, Pseudomonas aeruginosa
atgacgttcgctagctggtgcgatcaactgctggggcagggtatacgcttgccggttgcccgcttcgatgagtcggttgcaggacaaacgaggatcagcaatctcgctgccggcagcgagctggccaaaagcataaagtcacgggaaagacagctactaaccgtgatcaaagctgcacagcaagagctggccgatctgaagcaactccagagatatggggcctcggctgagcaagagcctggtttcgcacgagctcttcatcactggtaccgggaaacaaccgcccctttgcatcgcattctttgggagatcaaggaaattgaaggagcgatcttcgactacccaggacagctgaacagaaactatcgccagcaaatagtcgaagtcattctgactgcactgaactccctagagtccttcggcatttggaccgacgtggtcttacgagatgggtcgctgcgcgcccccgctgcgccaccgatcaccatgcgccacagccaaccccttgaggatgaaacaggcggagcagaatgcttcgactttgttgtagagggcctgcaagccgacgtactcgaagtcgtaaacgagttcctaaaccctgggcaaatgctcccccccataagcaaggatgcgcgcttcaactgcaatgtcagcgtctccgtcagccgacggaatcccttgagcgaggatgagcttttccacctgtcctgcttcctgcataagctattcgaggccatggccaggtccggagaccaccgtccacgaggcacattgcgcgagaaggttatcctttgcattctgctgtcgtttacggcgccatgtacgccgacccgggcccgactcccagaaatgctgtgtctgcaagatatcgtctctagcgagtatggggcgcctccctctgacggtaaaagtacggacctgaatatctctgcaggaagaatcgtggagcatctgattcgcgtgctgcgcgctcagaatcattgctga

SEQ ID NO: 324637 - DNA, 1530 bp, Pseudomonas aeruginosa
atgtcattcctgcgggattttcgccgagtagtcgcgcgcgtggtatttcgtctcctggccgacaggctgccaaagcccagaagcgcgaaagaaagcctgcacattctcgtaccccgttgggatgccaaactgggtgactcgatcgtttcgtctttcttctttcgtgaggctcgcagactcaatgcccgggtgaccgtgctgacggtcgaagagcttgcccagatgcacgcgctggactttggtgtggatcaggtcgtgatcacaaacgccaatcctggagtgctcgaacttctccacctagcgcagcagcttggacaggtcgatgtcgtggtgcatctggtagggagaatccagcctgcggagatcctgtttctgcgattgctgcgcccggcccgcgtgtactccttcgatgaccgtttacgctgcgtcaatcgcaagttcggtgaaacaactgccggtctcgacatggccgagcgctaccgacgcgtgcttatggacttgggtgcacgcatggtcgataggaagtacatcgttccccttcctgacacgatgccgaacgccacctccgccccgagaatcctattcaatccctacgccagccgcccagacaaaagcttagccttcgaccgatccgtgagtttgctgcacgccatcgccgatgcttatccaacccggtctgtcggcatcctatgcagccccgagacccaagaagatgcgctgcgtatggaagtcgcggcggctagacgcaacgtgcgcgtcgtccatgggttggcatcccccaaggatgccgccgggtacatccgctgcgcacaggtcgtggtcagtgtcgacacggcaatcgttcacatggcggtcggcctagaaacaaagctggtggcaatctacccagccatggctggacaagccaacccgtggctgcccccaccttctcctttgactcgggtcgtctatagccagcaacacactggtcagattcggcgcaccggcaagaaggacatgaatgcgttctcaatagaagctctgttggacaaccttcacgagttgttggccactacacccaaaactgagcaactccattcgctcagagcgcggatagtgcccggtctgggcgtcgcgcagggaaccctcgctcgccagttgccactgatcagcaaggacttccccgaggtcgcagactgtcaccccgggaccataaacttggagctcgaatgtcctctcgaagtggcgcagcccgaccatcgcacagctccgctcgcctggaccccgagcggacggacaactgaagtattcgacctggtacgcattgagctcgagttcggcccattaccaacgcgcgtgcccgcatggttgtacgttgcccacgcctcccctcaccgcggcacaccgactgttcatgaggtgatagcccagcagttaaacctgagcgaggtccgtgagtgtcagattcatctgcgcgcaagcgctgtaacgctgacacccccagatcaactaacggcgcccatcagccgctcgctctctcctagccaatag

SEQ ID NO: 324638 - DNA, 168 bp, Pseudomonas aeruginosa
atgctcaagctctacaacacctactttcggcgtacggccaagcgtatggagtctattgaagagtttctctctggcggtaccttgctggccaaattgttcctgcacatagaggctgatcgtggctattggctaggagagagcgagcggctgatgggcgccgttagttga

SEQ ID NO: 324639 - DNA, 1125 bp, Pseudomonas aeruginosa
atgatgacccccgaaaaatcactgctttggtccgaggtgcttaagaggccggttgatgtccaattggcgatgtttcgtcaggcttccgctcagccctgtgctgatgatgtgaagacaggtttccgcgcgttcgccgccgacctgtttgcacgtaaactggtcagcatggccgagtatgtttcgatttttggcggcactgcccttaactgccttacacctgccgggtcggggttattccgcgacatggccacgggcaccgatgccacagcattggccgggatctacagccgtgcaaaatacggcagtgtgggtgatatccagtatctcgcacgacaattgatcgactacctctgtggcgagctggataggtcagattcgcaatggtcatgcctgttccggaacgccaaggcctgtggtgacaacgtggtgatgatgaccactggttggcgtaacgtgccgtccacggcgaacgtgctctatgagatcgtggtcgaggaggtcaacgtcaaattggcgcatttggcgttgccgaccatcatcaacgtcaagctacccaggattgcgccaccctgcgaggactacgccagcctcagcaccgaggagcgggagcacgtcaatctggttcaggaccacgtcattccggctgaaaacttctatcgttggagcggtgtgcatgtgatcttcggcgacgatgtgttggttaccggatctactgccgacaaagtgctttatgaatccatgaataacggtgcaaagtcgttccgcgcaatctatccggtggcgatcgatccccgggtggcgctgggcgacgcctcggttgaggatcggctgaatagtgtggtggtcgagcaacggctggacgatacagttgcggagctgctgtctgcgcgggactaccaacctatcttgcgcactcttcgcctgttgttcggggagggaaaccgagagtctctcgccgctttcttaccgaaggtgcctgcaccgacctggttgcgcttgtacaagtctgccttgggaaatgagtttctaggtcaggtgcaatgcgcaccctccttggtgttgctccgggattacctgacagatgccgggttgctgagtgctgatggcagagcgattcatccgtga

SEQ ID NO: 324640 - DNA, 867 bp, Pseudomonas aeruginosa
atgatcgactcacacagccacacctcttattcgaagcatgcaaccggcaccgtcgatgaattggttcgcgcctcgatcgctgccggcgtgaccatcctaaccatcaccgaccacgcgccattccccgtggatacggacaatcgtctgctcgcgtccgaacttgatcgctatttcgccgacatcgagcgggcgcggaagatctaccaggggcagatcaccatcctgtgcggcctggaactcgactacatgcctggcaccgatgccttcaatcgcgagctgcttactcgttacccgatggacttcgtaatcggctcgattcattacgtggaaattccagacgaaaccatggtgaaggtatgggagctgccgcgcctggccgggcagacgttcctggaccgctacttcgccaacctcgaagggctgttggacagtgggctgttcgatgccgtagggcacgccgacactctgctgcgtggcgtaccggaagacattttcctgcgccgtttcgaacctttgctggcaccgctcacccgaagcggtattgccttcgagctcaatgcctcaggccttcgaaagtcgagcctggatcctgcaacggggagggaggttcagggcttgtggtcttatccgtctcgggaattggtggcgcagctcatcgcacacgaagtgcccttcacggttgggtccgatacccatgacccgagtgacgccggctgtggcattgccgaactgctcacggccctgcggcctttggggctgaaacgcattagttactacgagaggcgccgacgaatcgatgtcgccctcgacagcctgccgttgctgggcacgccagcaactttgacagaaggacttgaacggccttga

SEQ ID NO: 324641 - DNA, 1029 bp, Pseudomonas aeruginosa
atggatctccaaggtcatctgctttacatcgacatcacccagatttgtggaatcggctgtgccttctgtatgtacgccgacaagcacaaggcgggcatcagcatggagctatcaacgttggcgcgggaaaacctcgcccggttgatcaatgccccagaggtcaagcgcatctccgtcagtggcgaaggcgagccgctcaacaacgccaaagtgttccacgagatcctcggattgtccgaaggtggcaagtgcttcgaattcatcactagtgggttctacccacatgacaagatggcggacttctatgacgccaccaatcgcatcgtctcgggcaatggcgacacctgtaacatccgcctgagcgccgacagccaccatatcgagaaggtcaaatggcgggctcatggcttcagtctggactatctgaggcgccggcggccgtccgggctgagcttctcgttccgttcgatcgacaccgatcgcgacttcactcgcgagtatctgaagtccgagctggctcgctggggagtagaggcaaccatcgagccgcggagtgtgctggaagacgtcctggttgcgggtggtgagtgcttcggcatcgactacaagaacctggtgcaccccgctcctggaatcgccccgggttatctagacatgcaggggtacatcgaggcgatcgagtccaaagtcaacaaacgcttcactttcggcagtctgaacaagccgccgcaggctaacggtttggatgtcacggtgaagcctagtggtgacttgtacttgtacggtatcgagaaccagcgcctaggcaacatccactttgatcgggtcgactggcaacggttggtcgcccacgtgcgggagacaccgttgacccgagcactctatacgcaccccttgaccgagttgctggcgcgcctggagagcaccgacctgctgcgttcgatcattgccaaggcgaacaacccctactggctggtgaaggagctggcaggtcatgccgggttgctcgaacaatgggaggttgcatga

SEQ ID NO: 324642 - DNA, 954 bp, Pseudomonas aeruginosa
atggctgagctaaatgtgatcttcgatgttccggaggcgattgccgaggggctgaaaaacggtgtttacgaacgtatcggtggcgtcatccgcagagtaggtgacaagcagatcgtgatgtggttgcaggaaggtgttctgctggaacgcgatacggccgagcaactgctcaaacagggggccgagcaggtccagttgctgcgccagcaggctgagcagctgcagctgctcggtgtacagcagcagatgatcatggggctgcaggtggccaatctggccgttagtgtcgctggctttgcgctaacgctttacaagttacagggtatcgagaacaagcttaaacacatggatggcaagctcgatgacatccggcagggtgtggagtggctggatgccagacagatgattggccgactggcccctctgcatgcctccctgcagcatctacgcgaagccgggctgtatcgcaacaccacactgatgcatcagcaactgggtattgccagcagccagctcgcagagagccacagttattttggcgggctgctgcagcatgtgggtgagcgtgcgcttgagtatctacagcctggtgagtttggggccgcttaccgtgggtgggtgatgtcggctcaggggcgggtacaggtgctggctcggctaggtgaaatggatgtggctgcgcagctcgccaatgacttcaaggagcgtcacgctgggttcggtcggcagctgcagcagagcctgagcaatccagcgctgcgcctcagggcgggtcggcagggcgagaccaatcatgctcgtttgctgaatatcgctgagcaggctgtcggtgcgcacgagatcatccgcggtaacgtaatgcagttggagttcatgcgcgatgagcaactggatctaccggttctcaatagcccggcaggatatcaagggttggcgttctgccgagtgggctga

SEQ ID NO: 324643 - DNA, 771 bp, Pseudomonas aeruginosa
gtgactagcaacgatatcagcaatacccgtcagcttctggagcgtgtcagcaacgatgatctggagcctctggtggaatacatcctcaaggcccgaaccgagtccttgtcgaagcaagtggacttcaagcgctggcacccggaacaccgccgttatgccagtgcaatccttgatgagctgcgtttgttcggtggcaacagtttcgccaacctgtggcgcaagagcgggccttcctacaccgaggtggtgcgagatgttgccggtaagctcaaggtcaagggtgttggctcgatggagctcatcgagctggaggaggcgatggtgcagtcgatcctacgtcaggcgttggagaagtcgtcgggcgaggatcgtcgcgagctggaagagattctgcgcgatgcgggactcgacaagaccaagatgacggctctgctgaatggttcggcactgagtgggctggtggtgccggccgtagcacggatgatcctctatcgcacttcgacggtaatcgtgaattcgatggcccagcagttgcttgggcacgggctgcgcagtgcggtggtcgctgggggaacctttgccggcggtcgtgccgtcgccgcgctggctgggccggtcggctgggtcatagccggtgtctggaccgccgtggatctggcagggcctgcctaccgggtcaccattccttgcgtattgcatatcgccatgctgcgtctcaaggctcgtgccgaggcagcgaccgatttcatgaatggagctttcgatggctga

SEQ ID NO: 324644 - DNA, 144 bp, Pseudomonas aeruginosa
atgaaccctacgatctccccgttggagttcctgctgaccaacgttatctgtttcgccgctggtgccgtcgtggttgtcgcgctgcagatggcgggcaaagcggcctatgccgcagggaaacgcagctcaaatgctcatgcgtga

SEQ ID NO: 324645 - DNA, 810 bp, Pseudomonas aeruginosa
atggcaatcattcacgacgccgacttagcggacgtgctattgagcgcaagctcagacgatatcaggctgctgatcgacgtcatcacggacaacggcaacggacggatctccttgtcctcctcggtgtgccgccaactgagcgcggcgaaggagggtgtggtcggcgagttcgagcgcggcatggtcgccgaagaactcatgcgttttggaggcaactcgttgatgaacctgttccggggcggcagcggcgtgccttacaaggaactgctgagcgatgttgcctctcacgtgggtgtctcgaaggaaagtacgggcgactgcgcacgcatggaaatggccatcatcaccaaggtgttcgaacagtcgattggccgcatgagcgaggaagacaaggcgacctttttcgaatcactggggacaagctacagatctggcatggggccggttgcgctggcagcactgatagccagcctgagcgcttccggtatgacctcctatggattggccgcaatggtggccagcgcaacgatgagcagcctggtcggccggggtgtcgcgcttgctgggggagcaaccttgggcaggggactgtcggtgctcacagggcccgttggctgggcgatcgccggcatctggacggccttcgacttggccagccctgcttaccgggtgacgctgccgtgcgttatccagatcggtcacatgcgccagaaaatgctgctcaagcccgaatgccccggctgccgcgcatcggtcagcccaggcagcaacttctgtggcaattgcggtacgcggctggtcgatcgctga

SEQ ID NO: 324646 - DNA, 630 bp, Pseudomonas aeruginosa
atggatagaagctcgccagatggaccccttatgccgttggggcggtacttcagtgacaacctcagcgccgtgctggcggttgctggcaaggagcgtgagaaccgcacggtaggctcgccagggccgatgaccgcaacccagattcaccggaaaacgggcgtcgcccgcagcacgctacgtgcactgaagtcacagcgcggcgaaagtgccgccaatccggacctcgacacgctcgatcgcctcgccgctgcattgggtgttcctcctgctttcctgctcatgcggccgcaggactggttcgcgctgggccaagcactgggcgccagcggtgactatctggccgccgccatgaaactgcatagcgccggccaactggacaacggaagcccggtcgagaaggtgttgcgcgaatgcaaggttcaccctgatgcccgaccgatgggtgttggttcatctccagaggttgcacgtgccaacgcaagggatgaatggcgccggcgtagctgcctcaagttcggtgccctgatgcttcgtccaggtcgtgcccaccaatctcgtgttgcactcgccgcgatagcaggtgcgttggtgagcgccagcacgccgaacgatccgaacatcgacgactaa

SEQ ID NO: 324647 - DNA, 2838 bp, Pseudomonas aeruginosa
atgaagcccctcaaactctcccacgttcctggttgctgggtcagtcagactctacccagcggccagggcgaacgccggggtatcgtcaaaatggccattgctaaagaagccgaagatcagcttcaggttcactggttcagtccggagaagaaactggcctatgtcgatgcatctgccgtgcgctcaggctttcaaaatggcatggacgtagtcgacgaaacacctggtagcggtgttcgctcactagggcagggcgtgatcatgcagcaacgtaccttggcgggaagcgagcaagtccttgtcgactttcctgagcgaggcgaacgccattggctgccctatcagtacctgcgtcaggtgaagggcgttaagcatcggtttgtcactgccagtaaaggcgaagcggtcgatgcggaacgcatgcgactgcgcatgctcgcccatgccatcaaggtatggaatgaaaacacgggggccctttctcacctagagattgaaccgctacctcatcagattcacttggtacaccacattatcgcctccggcaactacaactggttgatcgctgacgatgtgggccttgggaaaaccattgagaccggaatgctcctgcatgcgctacggcaacgagacctgatcaaacgcatcttgctggttacccccgccggcctgaccaagcagtggcaggaagagctgtaccacaagttcaagatcgaagactttgaaatctatggtgaggactttttcatcaacgaacctcgccaatggaagatgcacgactgtgtcattggctccatggatcgactcaagcaggagggtcacttggagagcctgctccaggctgagccctgggatctggtgatatttgacgaaggccatcgactcagccgtcgccagtacggccagaagctggacagctctgagcgctatgacctggcgaaaagcctacgtagtcaaaccgagcacatgcttttgctaagtgcgacccctcaccagggcatgcaagacaagtttgtcgcgctgctggaactgcttcgccccgagcgacgcaccgacctcatggctctcaacatcaagccagaaatcctacatgacatggtgttccgcaatcacaaggcggatgtaacggatgcagaagggaacttcatcttccaaggcaaaattaccagtgccttgcaggtgcccagcagtaaggaatccatcgaattcgataaaacccttcaggactatctgcgcaaaggctatgacgcgggtgaagcactggggcgaaccggtaacgccattggtttcgtgatgaccgtctaccgcaagctggcagcctccagcgcggcggctattcaccgggcgttgtgcaaccgccttcagcgcctgctcgacgatgaggccaacggactctcggatgaagagcccagagaccaacgttatctgggtgaatgggaagaacagttcaccagtgatgcccgcgagttcttcgctggtgaagtgcagctgcttaaagacttgattgccgaagcagcagcactgaaagcaaacgacctcaaactaaagctgtttatcgaggacatcatcggcaagatccacgctgccaatgccgatgagaaggtgctgatctttaccgaataccgcaccactcaaaactatctgcgcgaagcacttgctgaccactatggcagcgaccaggtcgagctcatcaatggctccatgcaacatgctgagcgacgcgaggccatcaagcgcttcgaggagcaaggcggctttctgatttcgaccgaagcaggtggggaaggcatcaacctccagagcaaatgccacgtcatggtcaactatgacctgccctggaacccaatgcgcctcgtacaacgcattggccgcctgtatcgctatggccagaaaaagaaggttgttgtgttcaacatccagcaaaccgacagcctggatcagaacatcgtcgacctaatgtatgagcgcatcgacagcgtggttaccgacctcgccgagattcagcggcatgagttcaacgaaggcttgaaggatgaaatcctaggccagctggccgagctaattgacgtagaagacatcctgcaagaggcaacaaaactcggcatagaccgcacccgtgagcgcatcgacgaagcgctgaagcaggcgcgtactgctgctgctaaacaacgagagctgtttgcccatgccgccaccagcgaccccaatgaactgcgcgatgagctcgaaattactgtcgatcatctctacagcttcgtccttgggatgttcgatcaattgggcattgaggtcgctgagcgcagccacaaagagcggcttttgcgtatcagattgtccgagcaggtgatgcgcgacatggggctatccccgaaggcctcgcggcgtatggatgtgaccttggatcgcatgctggcagccaatcgcccagacacccacatgctcgacctcaactccaagctgatgcagtacctgctgggcaaagcctgcgagtacgactttggcggtctggctgcaatgctcaaagcaccagaactagaagagggtgctctgcttggagccatgctgcgctggcaaggccctcagggaaaacggatgcggcaagagtttgtagccattcaggtgaacgatggcaaagccaagctgaaccctgcaaaggccagccaatggctgctgacacctgccgagcacagcccccagagccccgatactgatacctccaaattgctgttcaaagtcgctgaagaaatggctaaccagcgactggctaatgccagtaaccgctatctaatacccgagaatttggactgggcctccgcaggatggacacacatccactag

SEQ ID NO: 324648 - DNA, 2217 bp, Pseudomonas aeruginosa
atggaaatggattgggaagcgctgttagacgaactgtggagctatgccgcatcggatccaaatgagctggagacgaagattcgcgcgtgcttgaaaggtcattcctcagaaggtctgcttcaagcagttgcgcttctaatttcccaagggcagcacgccaccgcccgaacgcttctcagtgagttccttaaaagccaccaggcagcagcaggtatcggccgccgtcttgagctcattctgcatttcaagaaaagtcgcgccccccaacccctttcgcttaagagcaagcaacacaacaaagagactctgctacaagacgtcaatcacctcgtcgccgctggcaaattgcaagcggctgagtcactcctgcttgaggctatcgatacaagcgaagagcctgactttctgaacctactcagccgcgtgtacatgctgcaacgccgccctattgacggggccaaggcaatgcaacgtgcactactgctaaaacgccaacaagaggcttttgtagagccagatctagattcagaagacgacttaccgacagctagcgacctggcatttctaaatgactcagccacgtcattggcgacactggaactcccatcggtgcccagtgcccagacctcgactgtggcagtcgacaacgagctcagtttcattcaacaggcttctgcccagctccctcccttaaaccaggacggttggtgggaaaaccatgttgaacccgcctctattgaaacgactgaactcaccgatgctggtgaggagaccgacgctcttgatgcagccccggccattacagaagatgtggtggaacaggtagatgaagacgagacctcttcaccaactcctaaaaagccccttctcaaacttggcttgccaagaaaacccactgagcccggcgaatcgaaggccagcgtcaaagtattcaataaatcgggacgacctctaagaatcatccctacatcaccgttgagcccaccggggccagacactgatgagctacccgagccgccggatactgctccagtatccgaagaacctgtcatcccctccgaggttcatgacgagatcctcgacgagtacgatgatgatcttcctcaagatgaacttgagctggacgtacctagtccggtgcaaatgggcctggggcttgaagaccctgaagatgacatcgacttcgatcatgacctgcatgatctgaccatcatcgagctgggcaaagaacacgacggggacaccaacgccgctctggatgacttccgtgatctagacgatgactacgctgcctatgcctttgacccggatgaagtcttcgacaatgaggagccgtcagcagccgaatccactgattggctggcagacaagctttcccgtgaagatcgcgcacttcagaaagctgcggaactgattggaaaagccaactggccactcagcacactgcccttggttcagcagatttttgtcatgagcggctggggggcaactcgtcttgcattggagagagagatcgaaaaggggctcactcctgaggagctgatccttgctgcgcacatcaaagtgatctgggccgaaaacgatatctactggatcgccttcgataaaaccggcagtagtcgcctgtcctactacgttctgtcctggccgacagcgctgctgatcgtgcgctcctttgagtcgcttccccaggtagaagagatcgaggtcttcctcgaaaacctatttgcgtcctggtacgaaaacagcacattacgccgcgcgtttaaagcctttgcacgctacctatggttcaggtttgccaacctggaaggttgcttgcccgccagccagcactttgatttccatgatcctcgcgagctaccagctgaggaatacggtgatctgggactttgcgacacgctagaaatcgagaagaccgagcgcctgcgggaatttggtgttttccagacaaagcatccccaggagcccagttgctacttcagtgacaagccctatgtcagagaagaagagccaagccttaatgcctcagggaaaagaaagcaggtgaaggctgatcctgcagacacagaacctctttcagatatcgaggatgacaccgcaggtatcgacggtgttgaagaggattcggctgtgcctcaatggtcagctgcaccgctcgcatctgccttgcacacacagaatatcgaccaaccttcgccaagcattgagccgtaa

SEQ ID NO: 324649 - DNA, 774 bp, Pseudomonas aeruginosa
atgtcgacagtgcaggccatcagaaccgtcctcttttacctgctgctgtccgccagcgcgttcgtctggggcaccctcagcttcttcatcgcgccgatcctgccgttccgcgcccgctaccgcttcgtggtacagaactggtgccgcttcgcgatctggctgacccgcgtggtcgccggcatccgctacgaggtgcgcggactggagaacatcccggaaaagccctgcgtgatcctctccaagcaccagagcacctgggaaaccttcttcctctccggcttcttcgagccactcagccaggtactcaagcgcgagctgctctacgtgccgttcttcggctgggccctggccctgctcaagcccatcgccatcgaccgcagccagcccaagctggccctcaagcaactggccaagcagggcgacgagtgcctgaagaaaggcgcctgggtgctgatcttcccggaaggcacgcgtattccggtggggcagatgggcaagttctcccgcggcggcaccgccctggcggtcaacgccgggctaccggtactgccgatcgcccacaacgccgggcagtattggcccaaggccggctgggccaagtacccgggcaccatccaggtggtgatcggcccggccatgcacgccgaaggcgaaggcccgcgcgccatcgccgagctaaaccagcgcgccgaagcctgggtcagcgagaccatggccgagatcagccccatccagcagcgggtcagccatccggagccgtcggtggtctcgtga

SEQ ID NO: 324650 - DNA, 537 bp, Pseudomonas aeruginosa
atgtcccgttccctgctgattctcgaccgcgatggagtcatcaacctcgactccgacgattacatcaagaccctcgacgagtggatccccatccccagctcgatcgaggccatcgcccgcctgagccaggccggctggaccgtcgcggtggctaccaaccagtccggcatcgcccgtggctattacgacctggcagtgctcgaggccatgcatgcgcgcttgctcgaactggtcgcggagcagggcggcgaggtcggcctcatcgtctattgtccgcatggaccggacgacggttgcgactgccgcaagccgaagccgggtatgctgcggcagatcggcgagcactacggggtcgatctgtcgggtatctggttcgtcggcgacagcatcggtgacctggaggcggcgcgggccgtcgattgtcagccggtattggtaaagaccggaaaaggtgtacgtacgctgggcaagcccttgccagagggcaccctgatattcgacgatctggcggcagtcgccagcgcattacttcagtaa

SEQ ID NO: 324651 - DNA, 1707 bp, Pseudomonas aeruginosa
gtgaaacgcctgaaaaagacactgcacctttcaagcttgtccctcgcttccctggctctttcttccgccgccctggcggccgctccggtcatgctcgaccagggcaaggaatggaccgaaagccaccgccaggacttctacagccgcgaccagggctcgcaggtgatgcccctgccctggctcaaggcgttgcgacagccggatggaacgcctttcctcgccgacagcctggcccgctacggctatttgcccaaccccaaggcgcccgcggaaggcctgccggtgggcttcaccgtagccggcacgggcgcccggcagatggtcggcatgacctgttcggcctgccatacccggcagatcgaggtgaagggcactgcctatcggatcgacggcggtccggcgatcgtcgacttccaggcattcctcgccgacctcgatcggtccgtgggaccgctgaccagcgatgacgccgccttcgacgccttcgccaagcagatcctcggggccaatccgcctcccggtgcgcgcgacgctctgctcgcggcggtgaaggaatggtacgagccctatcacacgctgatcgagcgcgcgctgcccaaggacacctggggaccggcgcggctggacgcggtatcgatgatcttcaaccgccttaccgggctggatatcggcaccgcgccgccctacctgattcccgacaacatcaaggcggcggatgcgccggtgcgctatccgttcctgtggaacgcggcgcggcagaacaagacccagtggcccggcttcgccgccaacggcaacgacctgctcggcctggcgcgcaatgtcggcgaggtctacggggtgttcgccaccttccacccgcagaagagcaagttccacctgctgggcatggactacctgaagatcaactcggccaacttccacggtctgggcaagctggaagacctgatcaagaagatcggcccgccgaagtggccctgggcggtggacaagcacctggccaggaaaggcgcgctgatcttcgcccgcaagaccgacgaaggtggctgcgtggagtgccacggcatccggatcaaggacctggtgctttgggacactccgctgagggacgtcggcagcgacagccgccagcacgccatcctcgatggccaggtgcagaccggcgtgatggagggcgcgcggatgccgttcggccagccgctgaaggcgaccgacggagccttcgatgtactcgccgtagcggtggccggttcgatcctgcagcacttcgtgccgatcctcggtgagaagcacgatgccaaggcggcggcggtcaagccggaaagcgtgatgaccgacgaaacccggcaactgctgaccgccttccagaagccggtgcgtacccaggccgacccctacccctacgagtcgcgggtcctgcaggggatctgggcggcggcgccgtacctgcacaacggctcggtgccgaccctggaagagttgctgaagccggccgcggagcgggtggaatccttcccggtgggctcggcctacgacgtggacaaggtcggcctcgccgcccagcagacccaattcggcagctatgtgctgaagaccaccggctgcgagcagcgtgattccggcaacagccgctgcggccatgagtacggcaccagcctgtcggccgaggagaagcgtgcgctgctggagtatctgaaggtcctgtag

SEQ ID NO: 324652 - DNA, 2058 bp, Pseudomonas aeruginosa
atgatgagcgccaaggatttcctggtcgaactgggcaccgaagagctgccgccaaaagccctcaacagcctcggcgaagccttcctcagcggtatcgagaagggcctcaaggctgccggtctgagctatgccgctgcgcgtttctatgcggcgccgcgccgtctcgccgtgctggtcgagcaactcgccgtgcagcagcccgaccgtaccgtcaacctagacggtccgccgctacaggccgccttcgacgccagcggtaacccgacccaggccgccctgggcttcgccaagaagtgcggcgtggatctgcagcagatcgacaagagcggtccgaagctgcgcttcagccagaccatcgccggccaaccggccgccggcctgctgcctggcatcgtcgaggcctcgttgaacgaactgccgattcccaagcggatgcgctgggcagctcgccgcgaggagttcgtgcgtccgacccaatggctggtgatgctgttcggcgacgatgtggtcgagtgcgagatcctcgcccagaaagccgggcgcgaatcccgtggccaccgcttccacaatccggacaatgtgcgtatttccagcccggcagcgtatctggaagacctgcgcggcgctcatgtgctggccgatttcgccgagcgccgcgagctgatcgccaagcgcgtggccgaactggccgccgagcaacagggcagcgccatcgtgccgccgagcctgctcgacgaagtgactgcactggtcgagtggccggtgccgctggtctgctccttcgaggagcgcttcctcgaggtcccgcaggaagccctgatcaccaccatgcaggacaaccagaaatacttctgcctgctggacgccaacggcaagctgctgccgcgcttcatcaccgtcgccaacgtcgagagcaaggcgccggagaacatcgtcagcggtaacgagaaggtagttcgcccgcgcctcaccgacgccgagttcttcttcaagcaggacaagaagcagccgctcgaaagcttcaatgagcgcctgcgcaacgtagtgttccaggcccagctcggcaccgtgttcgagaaggcccagcgcgtctccggcctggccgcctacatcgccgaacgtataggcggcaatgcgcagaacgccgcgcgcgccggcatcctgtccaagtgtgacctggcgaccgagatggtcggcgagttccccgaaatgcagggcatcgccggctactactacgccacccacggcggcgaagcggaagacgtcgccctggccctcaacgagcagtacatgccgcgcggcgccggcgccgagctaccctcgaccctgaccggcgccgccgtggcggtggccgacaagctcgataccctggtcggtatcttcggcatcggcatgcttcccaccggcagcaaggacccctacgcgctgcgccgcgctgcgctgggcgtgctgcgcatcctcatcgagaagcagctcgacctggacctggtagccgcggtcaacgccgccgtcgagcaatacggcgacaaggtcaaggccgccggcctggccgagcaggtgctggacttcgtgttcgaccgcctgcgcgcgcgctacgaggacgaaggcgtggacgtggccgtgtaccagtcggtgcgcgcgctcaagccaagctcgccgctggacttcgaccagcgcgtacaggccgtccaggccttccgccagttgcctgaagccgaggccctggccgcggcgaacaaacgggtgtcgaatattctcgccaagtccgaggacgaggttccgccgaacgtggatgccagcctgctggtggaagccgccgagaaggccctgggcagcgccgtggcgaacgccgaaagcgaagtcgcgccgctggcagcggcacgcgactatcgcgccgcgctggcccgcctggcggccttgcgcgagccggtggatacgttcttcgccgatgtgatggtcaatgtcgacgacgcggcggtgcgcgccaaccgctatgcgctgctggccaagctgcgcgggtcgttcctcggggtggcggacatctcgctgctcggctga

SEQ ID NO: 324653 - DNA, 1590 bp, Pseudomonas aeruginosa
atgaacgccaacaacaaagcgctaccagaaacaacagatgtattgatcgtgggcaatggtccggtgggtgcagcattagctgcgctgctcggccgttatggcgtacagacccttgtgatcgacaaggtccatgacgtcctgctgatgccccgcgccattgccctcgacaacgaggcactgcgtatcctgcagctggccggcctggcggaagacgccttcgagaaaatagtgatccccgaagtgcgcatgcactgccccatggtcggccagttcggccgcgccaacactgcgggcagcctcgacggccaccccaagctggtgaccttctaccagcccgacctggaaggtgcgctgcgcgtccagtctcggcgcttcgccaacgtggcgagccgcggggggtgggagctggaaagtctgcagcaggacgacgacggcgtgctcgcccggctgcgcagcgaactcggccaaagccatagcgtacgtgcccgttacctgatcggcgccgatggcgccagctccagggtgcgcggcctgatcggccaggaatttgaaggccacagctacgccgaggactggctgatcgtcgatgcctgcgggcgcgagcggcaggccatcgaccatgtcgagttcatctgcgatcaccgccgccccaccccgcacatgccggccccgggtggccgggaacgctgggagttcatgctgcagcccggcgagacgcgcgagcagatggaagacgccgagcgcatcggccaactgctggaacgctggatcgagcccagccagctgaacatcgagcgcaaggccgtgtaccgcttccacgcacgctgctgtgaacgcttccagaatggccgggtgttcctgatcggcgatgcggcccacatcaccccgcccttcgtcggccagggcctggtagccggcctgcgcgacgccgccaacctggcctggaaactggcctgggtgctgcagggccgtgccgcaccggcgatcctcgacagctacgacagcgaacgccggccgcatgcccgggagatgatcgacctggccaagttcatgggccgcctgatcatgccacgcaacgcctggctggcactgttcgggcatggcctgatgcgcgcgctcagcctgatcccccctgcccggcggcacttcgaagagctcgatatcaagccgcggagcatcttcaagcgcggactctttatgcgccagccctggcgcggccgagttcagcgcggcgggttgctgccccagggcctggtgcgcacggtcgacggcagcatccggctcagcgacgatgtgctgggggataacctaaccctgattggcttgggtacggatccagttgcatggctgcagcccggcacacggcagcgctgggaagccgtcggtggcagctatctgcatgtcggactgcatggccagctcggcggcgctgctactcccttcgtcgaggatatcggccagtgcctgctaccggttgccccgcggggctcgctactggtggtccgccccgatcgcacgctgatgcacgacggtgctgccaagcaggccgacacgcttatcgccgactgcctgaaactgctcggacactga

SEQ ID NO: 324654 - DNA, 642 bp, Pseudomonas aeruginosa
atgagcagagcagagcaacccgatgctgcacccgcaccgctgagccgcggtcacaagaagcgcgagcgcacgcgccgcggcctgattgatgccgctgtgcgcctgttcgcccgaaaggaagtgggcgagatcgcgctgctcgatgtggccagcgaggcggaggtggccagcggcaccatctacaactatttccggacccgcgatgaagtggttgaggcggtcgggctcgctctggccaatgagttttccgagtcgatttcgcagcacagcgtcggtatccagagcggcgccctacgcctggccatcggcgtgcgcatgtttatccggcatgccatggccgatccggactgggcaagcgcggtgatacgggtggtgcacttcgatcgcgcgatgcgctcgaagatcgccaactatgtgcttgccgacctgcgcgccggtgcggaagaaggcgccctcacctacagcgacgaatgcatcgcgcttgacctggtggtgtcctgcacgctcggcgccatgcgcagcgtcgtggaaggccgcagcgccagtgggcacgacacccaggtcgccgagatggtcctcaaggccctgggcgcctccgccgcgaaagcgcgcaagctggcccagcaggagctgccgggctga

SEQ ID NO: 324655 - DNA, 1230 bp, Pseudomonas aeruginosa
atgagcaagctttttcagcccctgtccctgcccaacggggccgtcattcccaaccgcatagccaaagcggccatggaggaaaacctcgccgatgccaaccatgccccgagcgaggcgttgatccggctgtatgaggcctgggcggaagggggcgccggactgatcatcaccggcaatgtcatggtcgatcgccatgccctcaccggcccagcaggggtggtgctggaaggcgaagggcagttggagcgctttgccgcctgggccacagcctgtcgcagccacggcgcgcaggcctggctgcagatcaatcaccccggtcgtcaactaatggctagcatggggcagccggccctggggccttcggccattgcggtcgacatccccggtttttccaagcactttgcccggcccagggcgcttgatgactgcgagatcgagaggctgatccagcgctatgtcgttacggcagtgctggctgagcgagcgggattcaccggggtgcagatccatgccgcacacggatatctgttcagtcagttcctttctccactctccaaccggcgcagtgaccactggggcggttgcctggaaaatcgggcgcggatactgctgcgcaccgtcgaggccgtgcgtgcccgtgtcgcgccgcagttctgcgtggcggtcaagctcaactcggcagacttccagcgcggcggattcgacgcggcggatgccgcggcggtggtgcgcatgctgaacgaccacgcggtggacctggtggaactctccggtggcagttacgagagcccggccatgcaggggcagacctgcgatggccgtacgctggcgcgcgaggcctacttcctggagttcgccgagcacattggcgaagtcgcgcagatgccgatcatgatcaccggcggagtgcgccgccgagcggtggccgagcgcgctctggcggggcgcgtgtcgatggtcggaatggccaccgccctggcgatcgatcccaggttgccggcgcgctggcaggcgggggaggacattgcggtgcagccggtggtcgtgaactggaagaacaaggcgttcgccgccgcggccacccaggcggtggttaagcagcagttggtgctgctggggcggggcagaccgagcaagccgcagatgtcgcccctgctggccctagtcggcagtcagctgaaggcgcgccagcagacgcggcgttatcgccgctggctggccaacggctga

SEQ ID NO: 324656 - DNA, 615 bp, Pseudomonas aeruginosa
ttggcacagctcaaccaggctcagcgccgcatccacaaggcagcaatacgcctcttcgccgagaagggcgtcacccaactgaacatcagcgacctagcccaggaggcgggcgttgcacgcggtaccatctacaacaacgtggagaccatggagcagctgttcgagcaggtcgccagccagctgagcatggagatgcaccagcggatcagcaggagcttcatcggcctcgaagaccccgcggaacgactagccaacggcattcgcttcttcgttcggcgcacccacgaagaaccccattggggcgcctttctcaaccgctttgcgttgagcgatgcttcgatgcgcgagatgttctatagccaggccaccgccgatgtcctcaaaggcttcggggctggccgctaccgtttcccccagacgcacctggccagcgtcatttcgctgatcgccagtgccacgctgggggccatgttcctcgtgatcgaaggcatcaagacctggcgcgaagcgggcagtgaaactgccgagctggtcctacgcgcgctcggcgtccccgaagaggaagcgcgagaactggcgaccaccgagctgccccccctacccgctctggactga

SEQ ID NO: 324657 - DNA, 1092 bp, Pseudomonas aeruginosa
atggcacaacaaaccacaacagccatgctcgccaccgcccagcctgcgcggtatccgcagccaacggtacaggcgcaggccctcgctcacttgatcttcgaacgaccagacctggagctggccgagcgtttcctcatcgacttcggcctgagatcggcccgccgcgacgccgacaccctgtatctgcgcggcaccggcccggcgccctactgctaccgagtgcatcgtgccgagcacgcacgctttctgggcttcggcctgagcctggcctcctggggcgatctcgaacgcatcgcccgtgtgcctggggcctccgtcatcgagccgctggacggcccaggtggcggagagcgggtgcgcctgaccgatccatctggtttcctggtggaagccatccatggccagcagccggtcagctccattgcgcatcgcgccgcgctgccactcaatctggttgacgtggcacaccgcatcaatgagacccaacggccgcctgtcgctccgcctgaagtcatcaagctgggccatgtggtactggaggtggccgactatcaagccacctgcgcctggtatacgcgtcacttcggtttcatccccagcgacgtgcaggtgctgccggacggctcgcctgctgtcactttcctgcgtctgaacctgggcgacactccagccgatcaccataccctggcgatcgcccaaggcttcatggcgacttacagccacagcgcttttgaggtggtcgacgcagacgccgtcggcatgggccagcgtgtgctgcgcgagagcggttggaagcacgcttggggcatcggtcggcacatccttggcagccagattttcgactactggcaggatccttggggcgataaacacgagcactactgcgatggcgatctattcactgcggatcaccccaccggagtgcatgcagtcagccccgaggcgatgtcgcagtggggccagcgaatgcccaagagctttaccaaacccgcgctcaacctagccagcctaagggggctgctgcacaacctgcggcgcagccccgacctgaccctgcgcaagctgatcacgctggcgcggatgttcggctag

SEQ ID NO: 324658 - DNA, 957 bp, Pseudomonas aeruginosa
atgcctgtccacgtagtccgcttcgagcaccagaaccaagtccaatggggcgtgatccgcaagggtcgcatcatgcgcattcccggcgactacgccacaaccggcgagctaatccgccagacacgggcagcggaactggcagcgttgcctgatggagaactaatgctcgacgaggtgaagctgctctcgcccgtgacccagaaccagcagttcgtctgtcagggcgccaactaccggcaacacatgatcgagtcgggcatggaccccgacgtgaagaacttcaacatgattttcaccaaggcagccagttgcatagtcccggcggacagcgagctgatcaagccgcgcgcagtgcgctttctcgactacgagatcgagctgggcctagtgctcaagcgcgagatcaatggaaagcagatagtggccgatgcgaacctgcatgagttcgtcgccggcgtcgtgatagtcaacgactactcggctcgcgacgtccagattccgcagatgcagttctacaagggcaagagcttccgaacctttggcccggtcggcccctatctctgcctgttcgaagccaaggacatcggctatctgcagaagctgcagttgcgcctgacggtgaacggccagacacgccagaatgacagcaccgccaacctggtttacggccctgcggagaccctgaccgagctgtccggtgtgcatgacttcgctccgggtgatctgatcgccaccggtactccggcaggctgcgcactgtccataccttcgccggccaagcagcgtatcgccgcgctattgccggaaacggtgaaatggaaggccttcatgaaggctcaggagggacgcagcagctactacctgaaaaaaggcgacgtggtcgaggccagcatccgtagcgcggacggcgtgatcgacctgggcgtacaacgcaatgtcgtggtggagcaagcctga

SEQ ID NO: 324659 - DNA, 1947 bp, Pseudomonas aeruginosa
atggccgtcagcagctatctggatattcgcgccatcgaacaggttcctctgcgcgagcgcgggctggccgccaatacctatgcagccctgcagcattgcgcgttggcgaacgcggaggccccggcgctcagcttcgtgctggatgctcggcggcaccagcgtacccacgactggagctatgccgagctgttcgccgacatcacccgggcagcgaacgccttccacgaactcggcatagggccgggcgatgtggtcgcctttctgctgccgaaccttccggaaacccacttcacaatctggggcggcgaggcggccggtatcgtcatggcaatcaaccccctgctcgaggcgccgcagatcgccgagctgctgcgcgcggcgagggccaagttggtggtgactttgtcaccgaccccgggcagcgacctatgggaaaaactggccagccagctggatagcctgcccgatgtgcgggatgtggtctgggccaatatggccccctatgtcccgatgcttccggccctggccctgcgcggcatggccctgcgtgagcgacttcggcagcgccggtggcgcatccatgacctgcgcgcgctgatgcgtcgtcaaccgggcaatcgcctgatcagcggccgacagattcgcgcggacgagccctcctcgtatttctgcacaggcggaaccaccggcctgccgaagatcgccatgcgcacccacggatcggaggtcttcaacgcctgggcgatggcggccaacatgcaaccacgcaagaagggccaagtcatcttctgcggcctgccgctgtttcatgtgaacgggcagctggtcaccgggctgatgccctggacccagggtgaccgggtgatcataggcaccccgcagggctaccgcggcgaaggcgtgatcgcgaacttctgggccatggtccagcacttcggcatcaacttcttttccggcgtgcccaccgtgtactccgcgctactgcagcaaccggtggccggccacaacatctctagcctgcaatacgccctgtgtggtgcagcgccgatgccggtagagctgttccgtgagttcgaacagcggatcggcgtgcgcatcctcgagggctatggcctgaccgagggcgcctgcgtgtcgtccaccaacccaccgggcggcgagcggcggatcggctccatcggcctgcgtctggcctaccaggacatgcgcgcgatcattctcgacgacgccggcaactaccagcgcgacgcgcaaacggacgaggttggggtcatcgccattcgcggcccgaacgtcttcgcgggctacctggagcctatgcacaacaaaggcctatggatcgatatcagggaccagcgctggctcaacaccggcgatctgggtcgccaggacgcgcaaggctacttctggctcacggggcgcaagaaggagctgatcatccgcggcggccacaacattgatcccaagcagatcgaagaagccttgcaggcgcatccggcggtggcactggtcgcagccgtgggcagtccggacgcgcatgccggcgaggtaccggtcgcctatgtgcagctgaatccgggtgcgagctgcaacccgcaggcattgcaggccttcgccacccagcacatcgccgaacgggccgcagtgccgaagcgtattgaggtcctcgatgcattgccggtgacgccggtgggcaagatcttcaagccagccctgcagcagcgtgaaatcgcccgggtggtacgccaggaagccgcggcactcggtctcgccgatctcgccatagaggtcgtccaggacgcccgccgcgggctgctcgcccagatctccgctggcacacaccaagtatctctggctcaggccctggggcgttatagcttccagatcgaatggttcgattccccctcaggagaccaaccgatgcccagaccgaacgccatcagctaa

SEQ ID NO: 324660 - DNA, 411 bp, Pseudomonas aeruginosa
atgggggcggcattacgctggtacgtcgccgagctggacagcgaattcgccgcctacttcatcaactaccacagccggcagccctacttcagcacgcaaagcgcgacctcagttggcgacctgagcacctccaagtacttcatcgagtacccagaggatattcgcctctacggcctgagcttcagcaccatgctcaacaccggcaccacgctggccggagagatcagctatcgtcccaacatgccggtgcagatcagcccggtggatctcatcgcaacctcttcaggcgtttcggcactgagcccggtgctgtcgcaacggcatggacatcgacggctattccggcagcactcgcacaagatgcctgctgccgatcttcggtaccgcctctgcacggagcccactgcatga

SEQ ID NO: 324661 - DNA, 1200 bp, Pseudomonas aeruginosa
atgcgcaaaggcgccgagctcgctcagacgctgccgccggagtgggtcgagcgcctcaatcaggcgctgttctcttcaccggaagatgccaagctgctggaggacccggtcatcctcgcggcgtgccggcgcgccaaccgcgcagagttgctgcattgggcgaacgccaatctgcagcgccccggagaaccggtgcaaccctacgtctcggccgacatggtggacacggccagggaactcgcccgcagagggctgtccgagctgctgatgaatgtcgcgaggtcgacacagaacaccgcctgggagctatggatgaagatggccttcaacctgacgcaggatcccagggtgcttgaggaattcctggaggtctcgtcgcggtccatctcggagttcatcgacagcaacatgcgtgtggtgacccagatcatcctcgaagaaaagagcgcccaggcccatgacgacccgatcgacaaacgaagcctggtcagtcggctgctcgagggcagggatgtggatacggagcaattcggcaggcggctgggctacagccttttccagaagcactacgccggcctggtctggtgcgaaagcccggacgccgagatccgccttctggaggatgtggcgcgtaccctggcgcaactcacgggcacggcggcgccgttgatcgtattcgccggccccgcgaccctgtgggtctggagccatgcggcgaaaccgctggacctgaacctgctgcaaggcatcgcactgcggttttcagggattcgcgcggcaatcggctcgccgggcacgggagtcaatggcttccgtcgctcgcatctggaggccctgacgacgcaaaggctgatgggccgcctggcgggcgcacccgccgttgccaccatcgaccaggtgaggatggtgtcgctgatgacccaggacgaccgcgcggccaggcagttcgtcttgagcaccctggggcggctggcgacggagccttcggtgcttcagcgctcgctgcacgccttcctggccaatggctgcaatgtcacccagaccgcagaagcgctgggcacgcatcgcaacacattgctgcgccggctggagcgtgcccaggacctgttgcccgtccggcttgccgatcatcgcattcagatcgccgcggcccttgaactggtgatctggagtactcccctgatcgatgatgataaataa

SEQ ID NO: 324662 - DNA, 1659 bp, Pseudomonas aeruginosa
atgaagaagctccttcccctggcgttgtcgctgcactccggcctgctgttggcctcgcccgcgttggacgctggccagcgccagccgctcaacctgcatgccatcggcatgttcatggtgttcgtgctgttcaccctgtgcatcacctggtgggcggcgcgacggacccattcgacggcggatttctatagcgccggtggcggtatccggggctggcagaacggcctggcgctggccggcgactacatgtccgcctccacgctgctgggaatcaccgcgctcatctacagctccgggatggatggctacatctatctcatcgccttcttcgcgggctggccggtactgctgctattgatgaccgagcggctgcgcaacctgggccgcttcaccttcgccgacatcacctcgtaccgtctcgaccagggcaaggtgcgcaccatggccgccatcggatcgctgaccgtggtgtgtttctacctggtggcgcagatggtcggggccgggcagttgatcaggctgctgttcggcctggactaccagatcgccctggtgatcgtcggtgcgctgatgatgctgtatgtgaccttcggcggtatggtggcaaccacctgggtgcaaatcgtcaaggcattcctgctgctggtcggcggctcgctggtgctgttcctggcgatgcgcgaattcgacttcagctatgacaggctggtcagccaggcgatggatagccatgccctgggcgaacgcctgctggcccctggtggcttgctggccgacccgttgaccgcgctatcgctgagcctggggctggtgttcggcaccgccgggctgccgcacatcctgatgcgtttcttcaccgtcggcgatgcccgggaggcgcgcaagtcggtgctctacgccaccgggttcatcggctacttcttcaatgtcattttcctgctgggcctggcgtcgatcgtgatcgtcagccagcagccccggttcttcgagggcggggaagcgggaggcaagctgctgggcgggggcaacatggtggtcatgcacctggcccaggcagtgggaggcaacctgctgctgggcttcctctccgccgtgaccttcgccaccatcctggccgtggtgtcaggcctggccctggccggggcgtccgccatcgcccatgacctgtatgcgcgggtgatcatgaagggcgcggccagcgaggcgcaggagctgcgggtaaccaagctggcaaccctgggccttggcttggtggcgatagccctgggcatcgtgttcgagaacatcaacgtggccttcatggtcgccctggcctttggcatcgccgcttcggccaacttcccggtgctgttcctgtcgatgttctggtcggggctgaccacccgtggcgcgttggccggtggctacgtcgggttgttcagcgccatgggcttcgtggttttctccaggctggtgtgggtggatgtgttgcacttcgccgagccgctgttcccctatacccagcctgcgctgttctccatgccgttggcgttcctggtggcgtatggcgtttcccgcctggaccggaccaagcgggccatggcggaaagggcagccttcgccgaccagtacgtacgaggccagaccggccttggcgccagcggagccatagaccactga

SEQ ID NO: 324663 - DNA, 708 bp, Pseudomonas aeruginosa
atggactgccctaccctcagcaaggtattgctcgtcgaagacgaccagaagctcgcccgcctgatcgccagtttcctttcccagcatggtttcgaagtgcgccaggtgcatcgcggtgatgccgcgttcgccgccttcctcgacttcaagccgcaagtggtggttctcgacctcatgctccccggacagaatggtctgcaggtgtgccgggagatccgccgggtcgcgaacctgccgatcctcatactcaccgcccaggaggacgatctcgatcacatcctcggcctggagtccggcgccgacgactacgtgatcaagccgatcgagccaccggtgctgctcgcccgcctgcgcgccctgatgcgccggcacgcgccccttcccgcctccccggaaagcctgacattcggcaagctgaacatcgaccgacggcggcgcgaagcggaactcgaaggcctcggcatcgaactgaccacgatggagttcgagctgctctggctgctggccagccaggcaggggaaatactttcccgcgacgagatcctcaaccagatccgcggcaacggtttcgacggcctgaaccgcagcgtcgacgtctgcatcagcaagctgcgcaataaactgaaggacaatccgcgcgaaccggtccggatcaagaccgtctggggcaagggctacctgttcaacccgctgggctgggagctctga

SEQ ID NO: 324664 - DNA, 342 bp, Pseudomonas aeruginosa
atgcctaggcaagggcgagtggttttaccgaattatccgcttcacgtggtccagcggggacacaatcggcaagtggtattcgccgaggacgaggactaccagcgttacctctccgatctacgggacctcaaggatgcctttggtatcaaggtctacgcattttgcctgatgaccaaccatgtccatctgctcttggcgcctggtgattcgctgtctggcttggcgcaactgatgaaaacgctggcggcgcgcacgacacgatatcggaatcgcttggagggccgttccggaacgttgtgggaaagtcgctataactggcgtgttgccggtacatcgaactga

SEQ ID NO: 324665 - DNA, 1374 bp, Pseudomonas aeruginosa
atgcatattcaatcatctcagcagaacccgtctttcgtggctgagttgagccaggccgtggccgggcgcctgggacaggtcgaggcccgccaggtggccactccccgggaggcgcaacaactggcccagcgccaggaagcaccgaagggcgagggcctgctctcccgcctgggggccgccctcgcgcgtcccttcgtggcgatcatcgagtggctgggcaaactgctggggagccgtgcccacgcctccacccaggcgccgctctcccgtcaggacgcgccgcctgccgccagtctctcggccgccgagatcaagcagatgatgctgcaaaaggcactgcccctgaccttgggcggacttggcaaggcgagcgagctggcgactttgacagcggagagactggcgaaggatcacacgcgcctggccagcggcgacggcgccctgcgctcgctggccaccgccctggtcgggattcgcgatggcagccggatcgaggcttcccgtacccaggctgcccgcctgctcgaacagagcgttggggggatcgcgctgcaacagtgggggaccgcgggcggtgccgccagccagcatgtactcagcgcaagcccggagcaactgcgcgaaatcgccgtccaactgcatgcggtaatggacaaggtcgccctgttgcgccacgcggtagagagcgaggtaaagggcgagcctgtcgacaaggcgctggcggatggcctggtggagcacttcgggctggaggcggagcagtacctaggcgaacacccggacgggccgtacagcgatgccgaggtgatggcgctcggtctctataccaacggcgagtaccagcacctgaatcgttccctgcgtcaggggcgagagctggatgctggccaggcgttgatcgaccagggcatgtctgccgcgttcgaaaagagcggaccggctgaacaggtcgtgaagaccttccgcggcacccagggcagggatgccttcgaggcggtgaaagagggccaggtcggccacgacgccggctatctctccacctcccgggaccccagcgttgccaggagcttcgcgggccagggcacgataaccaccctgttcggcagatccgggatcgatgtcagcgagatatcgatcgagggcgatgagcaggagatcctctacgacaaggggaccgacatgcgcgtactgctcagcgccaaggatgggcagggtgtgacccgtcgggtgctcgaagaggccacgctgggggaacggagcggccacggcgagggactgctcgatgccctggacctggcaaccgggacggatcgttcaggcaagccccaggaacaggacctgcgcctgagaatgcgcggcctcgacctggcctga

SEQ ID NO: 324666 - DNA, 1713 bp, Pseudomonas aeruginosa
atgtttgagaaagccattcttccgctcgccctcggcgcctgcctggcatttgccgcgccggcctgggccgaaggcgactcgccggacaatcccaagccgctggccgacgacgtcgccctgccgctgccgtgtggcggcgagatggtcttccggcatgtctacgtactcgccgaaggcgccctcgacgatcgcgaggtcaacctcggctacgccttcaacgaaggcgaggcgggctaccagcagtcgttcatctccggctaccggcgcgactacgtgaacggccagttcagcctcgccgacctggcaccggcctggcagcagaagctctccgccagcctgccgaagcctgccgccggcaccccgctgaagccgatgctgtacttcatcggcaagtacgaggtgaccgcccgccagtacgccgcggtgatgagccaggcggccgcgctctccggccagggcgaggcgccggcctgcgacgtgccggacgggatggccgcgcggctgcccaaggtcaacctctcgcgcttcgacgccgaacgcttcggcgcggtgtacagcgcctggctgctgaagaaccacccggaactgctgccggtcagcggccgcggcaagaatcccgaggacggcggcatcggcttcgtccgcctgcccaccgaggtcgagtgggagttcgccgcgcgcggcggccaggcggtaagccgccaggaactggaaggccggctgttcccgcgcaaggtcgagggcagcgaccaggaaggcccgctgggcgactgggcggtgtacaaccaggtcgccggcggcaccgggcaggccgcgcgactgttgccggtagggatgaagcggccgaacccgctgggcctgttcgacgtgatcggcaatgccgcggagatggtccaggagtccttccaactggtccacgccggtcgccggcagggcacatatggcggtttcgtggtgaagggcgggaactatctcgaaggcgagatgactctattcaccgggatgcgccgcgaatacccgctgttcgccgccgacggcagcgaacagcgcaacgagaccaccggtttccgtgtcgccatcggcgcgctgtccgcgccgcgctcgcgctatcccgagctgttcgcccagtggcagaaggaaggccgactagcggcattgaccgatgccatcgatgacgctcaagatcccaccaagcaattggacggaatcattgccgccacccgcgacccgcagatgcaggcgcagttggcccagataaacgaggaactcaagcgtaacgtttcgttgatcgcccggcagcgcgaagaggccgccggaaacctgatacagtcggcggcactggtcgccgagacgatcaacaactacaacatacgcctgaccaacctcaagaaggacagggagaaagccgtggcagccagggatcaggcgaccgcccagctctatgccggcgccatcgccaacgggcgcagcgccctcgatggcgcattggccatctacatcgacaacctcgccaccggcacccgttacaccgacgcggtgatccaggcgcagttccagcgcatccaggaagaactcaatcgcaacccggttctgggcaagagcctggtcaagcgcgcgaccctgttcgtcaaacacgtcggagattatcgccagcagcaccgggccgagccggaggcggtattgaaggaattgctcgcgtccagcgggcgttga

SEQ ID NO: 324667 - DNA, 1758 bp, Pseudomonas aeruginosa
gtgccggccttctcggtgctctacgtgtacgcccgcaagcaggtcggcggcagcccctggctgcgcgtcggcgcctccagcaacggcgagggcgacggctggctgccggccagcgcggtgagcgactggaagcagagcctggtgctgaagttcaccgaacgctccggccgcgcgccggtgatgttcctcaacagcgccgagcaggtcgagcgcctgctcggcgatacccgcgcagcgcgcgacaccctgacccaggcggtggatcacaagggcgatccgcaggtggtcgcggtcgagcccaacgaccgggcgatcccccaggaccagttctacctgctgccgatcttcgactcgaaggaaagcttcgacgccgacggccagccggcgcagttgctggaggtcgcctcgatcgaccccggcggcagcgccgcggcaccccaggcgccgggccaggccgggcagggcggcgccagcggcgcggcgagcgacaccttccgcaccggcatcgtcctggtggtggacacctcggtgtcgatgcagccctacatcgaccgcgtgcgcgaggtgatcgacggcctgcagcggcagatcggcgagcgcggcgacctggacaaggtcagcttcggcctggtcggtttccgcaacaacaccgacaagacccccggcctggaatacgtcagcaagaccctggtgccgctgcaaccgggcaacgacgcgcagcgcttcgccgagttgagcagccaggtgcgcgccaccgacgtctccagccactcgttcaacgaagacgccttcgccgggatcatgcaggcggtcgacgaaatggactggtcgccctacgccgggcgcgtggtgctgctggtcaccgacgccggcgcgctgcgcaagaacgacccgctcgggcgcacccagatgaacgaggccgaggtccgccaggcggcgctgcgcaagggcgtgaagatctatgccctgcacctgcgcaccccggccgggaagaacaaccacggctacgccgagcagcagtaccgcagcctcaccgccgacgccaacccgaagatcgccgacctctacatcccggtggccggcggcgaggtgaacgccttcggcaacacggtgaaggagatcggcacggtgttcgccgacctggtccacgacgccggcaaccgcaagccgcaggcgccgcgcttcgacgccgcgccaagcgtggcgagcaagtcggcggccatcggctacgccatgcagatggaattcctcggtcgccgcgacccggtgcgcgcgccgcaggtcgtcaccgcctggaccgccgaccgtgacctgaccaacccggcgctgccggcgttccaggtctgcgtgctgctgagcaagctgcaactcaacgaactgcaacagtcgctgaaactgatcgtcgacgcggccaagcgcacccagacctcgcccaaggacttcttccaggaaatcgccagcgccagcgcctacatgagccgcgacccggcgcaactggtgaagggcagcaacctggcgcagagcggcgtgctcggcgaatacctggaaggcctgccgtaccgcagcaagtcgctgaacatgacccaggacctctggctgtcgctgagcgtcgccgaacagcaggacttcatcgacgaactggagtcgaagatccgcctctacgaaaccttccacaacgacgtcgccaactgggtccggttcggcgacgccgacgccggcgacgcgctgtaccgcgtgccgctgtcgacgctgccatga

SEQ ID NO: 324668 - DNA, 213 bp, Pseudomonas aeruginosa
atgaagcgaaacgccaacccggcggcgaccgttgctgcctggaattccgcataccccgtcggcaccgaggtcgactaccgattccatcgcgccgcggcaccgaagcgcacccggacgacaaccgaagcccaggtgctcggcggacacactgctgtcgtctggctcgccggagtgtccggttgcgttgccctttcccactgcgagccggcctga

SEQ ID NO: 324669 - DNA, 369 bp, Pseudomonas aeruginosa
atgctgatcctcacccgccgagtcggcgaaaccctgcatatcggcgacaacatcaccgtcacggtcctcggcagccaaggcgaccaggtgcgtctcggcatcaccgccccggacgacgtcgctattcaccgctccgagatctaccagcagatcggcaacgtccggccggtgccgccggcggagctggtcgaggcctggaaccgagagcacccggcgccagcgctgatcgagtaccgcccgtaccgaggggccgaaccacagcgcacccgcaccgtcggccgggccagcgtgtcgcttggcggggcggcggttatctggatcgaaggccagtcggcgccggtggcgttgcgggcctgcacggcaatatga

SEQ ID NO: 324670 - DNA, 249 bp, Pseudomonas aeruginosa
atgcgacgtgtcatgactatgaaggtgacgtgcgacaggaatggtcggcgcacgggcttggaagatagtggcgaagcactcttccaccagtggggggtcgacttcgaagagttcgagactggggcgggcaactacaccgtggctgtcattgagcgccccggaggcaccgttgaactcctgccggttcaccatatccggttcctcgacacggcgccggacttccccgatacggaggacctcaccatgtag

SEQ ID NO: 324671 - DNA, 153 bp, Pseudomonas aeruginosa
atgtggacataccgcgagcgccgcaaccgcgcggctttcagcaacgcccagcacacctgggacttcgccagagacccgctctgggaccagccggagccggaaccggagcacgaggacgaagagcaggaggacgacgatggcctgggcgaatga

SEQ ID NO: 324672 - DNA, 222 bp, Pseudomonas aeruginosa
atggcctgggcgaatgagcgcgccgagggcgtgatcgaggaagcgatcgtcgcaatgcgtcggtcggtgatcccgcgccacgaccagttggtatggcgcggccagatcgagatggcctacacgctggacgccatcggcacccggcaatacgacgacatgcgccgccggctcgacgccgcagcggatgcgagacagcaagaactgaggagcatcgacctatga

SEQ ID NO: 324673 - DNA, 210 bp, Pseudomonas aeruginosa
atgaccacccgccccgttcgctcgatcatcgacgaccagctcgacgatatcgaagagtttgccggaaagagcatccgccaggccgtcgagttggccaaccgtcacggctacaacaacccgttcttcgccgacatatgcggcgacctctgcgttctgcgcttccggcgtagctcccgccttcacgcgacaaccaccctcaccctgaaatga

SEQ ID NO: 324674 - DNA, 498 bp, Pseudomonas aeruginosa
atgactgcaactctcgcatcggtcggcgcgctcgaccgcaccaagtaccttggcggccaacagagtaagcgcgttccactgctcaacgagggcttggttcgccatctctacgaatcgggcatgacgctcgaagaagtatccgccgagatcggatgtacctgccgtgcccttcggctcttcatgatccgttgcggcatagagcggcgcatagctgcgaagcgagatcagcgcggagcgaagaacagtagctggcggggcgaggcggtcaagtacaagccggcccacaacagggtctatgccgcgcggggccgccccatgaagtgcgagcactgcgggaccaccgacccaaaggccaggttcgagtgggccaacgttagtggaaggcaccacgacccaaacgactacatccgtctttgcagatcatgccattgcaagtacgacggcctcttgaagaacctcggagattacgcctgtgtccctcctcaaaatcgcacctga

SEQ ID NO: 324675 - DNA, 909 bp, Pseudomonas aeruginosa
gtgtccctcctcaaaatcgcacctgaacatcatgacaggagcaagctgctaggcggcagcgatgtcgccggcatcctcggcatcagtccctggcgcactccgttggacgtgtacctagataaggtccagccgcgcaccggtgccgtcgacccggcgaagcagaagattttcacccgtggccagcggatggagccctacgtcatcgacctgctggccgaagagaccggcctgaagatcgtcggccgcggtaaccgctaccgcgaccagcagcacgatttcatggccgccgagatcgacgccgaggccgccagcggcgaaaacatcgagatcaagacggtcagcccgttcaaggcaaaggactggggtgaggttcagaccgatgccattccagtccactacaccgcccaggccatgcacggcctgatggtcaccggccgccaggtctgcatcttcggcgtgctgatcggcggcgacgacttccgcgtgtaccgcgtcgagcgggacgacgaaaccatcgcggcgattcgcgagaaggaggtcgagttctggggacgcatccagcgcctggatccgcccgaagcaaccgctgtcagcgacatcctccggctgttcgagcgtgacgccggaaccagcatcgaggccgatggcaaggtcgtggaggtgttcaaccgcctgcgcgaactgaaagccaaggccaagggcctggagtacgagatcgagtccgcagaggagcgcatcaagctcttcatgcaggaccacgcccaactcacggtcaacggcaagtcggtactgacgtggaagtcccagaccaccaaccgcttcgaccaatccgccttcaaggaagctcaccccgcgctgttcgagcagttcaagaagaccagcgaatcccgcgttttccgcctcaagtaa

SEQ ID NO: 324676 - DNA, 900 bp, Pseudomonas aeruginosa
atgtccgcaaccgccctgaaagccgccgcgaccggcaatgtcgccaacaatggccagccgaaaacgctggcccacctgatgactgacccgaagatcaaagcccagatggccctggcgcttccgaagcacatgaccgccgaccgactcgcgcgcatcgcgctgaccgagatccgcaaagtaccggccctggcgaaatgcaatcaggagagtttcctcggcgccgtgatgcaatgcgcgcagctcggcctggaaccgggtaacgctctcggccatgcctacctgctgccgttcggcaacggcaaggcgaaagatggcctgtcgaacgtccagttgatcatcggctaccgcgggatgattgaccttgcccggcgctccggccagatcgtttcgctcaccgcgcgcaccgtgcaccagaacgaccagttcagctatcgctacggcctcgacgaagacgtccagcacgttccgggagaaggtgaacgcggcgtcatgacccacgtctacgcggtcgccaagctgaaggacggcggcgtgcaattcgaggtcatgagcaaggccgacgtcgacaaagtacgcgccaccagcaaggcatccggaaacgggccttgggtcacccactacgaagagatggccaagaagaccgtcatccgccggctgttcaagtacctgccggtcagcatcgagttgcagaccgcagtcaccctggacgaacgcgccgacgccggattggaccaggacaacgcgtccatcctcaccggcgaatacagcgttgttgacgaccagtctcaggaccaggtcccggacggcgtgaacaccgagacgggcgaaatcaccgaacccgccccgggccagcagtcggacaccggcgacaccggcgacgacgggctcaatctcgagtaa

SEQ ID NO: 324677 - DNA, 201 bp, Pseudomonas aeruginosa
atgcccagccgaaccatcgaagagcagttcgaccgtgtcgaggagttcaatagcctcctcggcgcggcggagctgaatgccgccaccacctgggaagaagagttcaccgccgacctgcgcgccaacttccagcgctacggcccgcggatgttcctcagtgagtcccagcacaccaccctcgaacgcatcgccaaccagtag

SEQ ID NO: 324678 - DNA, 768 bp, Pseudomonas aeruginosa
atgagccagaacaacgccgccttcctccacatgaccgccgacacgctcggcaagagcctgctgcagggcctgatccaggaaatccgcatcctgccggacgtgtggcagaagctgtccgaagccaagcagaccgatgtgatcgagcgcctggagcagcaggtacgcaacgccgccaccatcgcggtgcacaccatcgccggcgccgagcgcgagaccgtctacggcaagctcgaatccatcgcggccaaggacaagatgaaggccgtcatcgtggtgaatcactccagcccgaacaagcacgaccttctggacgcggtgaacgaggactgcctgctgatcatcggcggcgccgctgagttcctcgacggcatgaaggacgtgaaggcggatccggaccagaacccgctggacctgaacggcggcgaccatgacatggaagaccccggcgcctggggcggtatgcaaccagcagacgacagcgacgtcgtcgatgccgagttccaagaactgccgcaactcaccgtcgagcgcttcgccggccacaccctgggcgagatcgccatcggcgtcgccaccaagaaggacgtgttcgacgcggcctggctgcaatcgcgcttcgctctcaccaccgaggaagccgagcgcgtcattctccaactgctggaccagggcgtcatcgtgctcgagcaggagaacgaggaatcccgcgagttgaacacttaccgcgtcgtcaagaagccgggggatatcgccctcgacctggagtga

SEQ ID NO: 324679 - DNA, 1743 bp, Pseudomonas aeruginosa
atgcgcatcacgaaactcgaaatcaccaacttccaagggctgcgtcatgcggcccttgatgtttctgcgccagtgcttctggtggccggccataacggcgccggcaagagttcgctgctggacgccatcgccatggccttcaacggccagccgcgccgcgtctcactgaagaaggagatggacaagctggtaaccgagggcgccaagaagggcgaggcccgcgtcgagtggctggacgaggccggcgaggtgcaggcctgcggggtcgcgctgcccagcggcaaaggctccccgctcgccgactcgccgttcctgccatacgtgctcgacgccagcctgtttgccgctctggacgccaaagatcgccgccgggtgctgttcgacctgaccggcgccagcgccagcccggccgaggtcggcaagcgcctgaaggccaagggcatcgacctggcgctgttcgagaaggtgaagcccctgctccgttccgggttctccgccatggtcggccaggcaaaggactacgccagcgaagcgcgcggcgcctggaaagcggtcaccggcgagaactacggcagcgagaaggccattgactgggcgccggaactggtggccaccgcggtgaccaacgaccaggtcgaggaagcccgtaacgccctgcaggcgctcgaggacgatctggctgaagcccagcagaccttgggcgccagcaagcaggcccgccaggccgccgacggccgcgcccagcgcatagccaatctgcgcgagctggtagacctggagccgcgccgccgcaacaagctgagcacggacgagcagaaccaggacgagtggtccgagaaggtcatggccgccgagctggcctcgtccggcagcgtgccgcaccagccgctgacctgcccccactgtcagggcgcggtcgacctgcaggccggtgctctggtggtgcatcagccgcctgagaagatcgctgacgccgaggcagccaagcgtctgccggaataccgcgagtatctggccagtgctcagcgcgccgtggcgaacagccagcgggacctggacgagtgcctggccgccgccgagcagatcaaggccctggaaaccgagtccgccgacgcgcccagcgccgaagcgatcgccaacggcgagcaggctatcaacgaactgcggcaggcccgcgacgcgagccgcgcgaagctggtggcccttcaggaagccatggaagcggctgcccagcgtgaggcctcgatcgcgaaagcgcaggccgcgcaccgggatgtggtggcgtggaccggcatggccgacgcgctgtcgccgaccggaatcccggctgagatcctggccgacgcgatcggaccggtgaacgaactgctgcagcgcctatccggcacagccggctggtcgccggtacagatcagcgccgacatcgatgtcacgttcggcggtcgactgtacggcctgctgtccgagtccgaacgctggcggtgcgacgcgacgctggccctgaccatcgcgacgatctccggcctgcgcctggcgctgctggatcgcctcgatgtgttggacctgccgagtcgtagccaggccctgacactgctgcgtgccgtgaccatggacaaggaaatcgattcggtgatcgtcgccggcacgctcaaggaggcgatggcgaagacgccgacctggctacaagcggtctggatcgacgccgggcaactcgccgaccagcagcaacaggctgcggcctga

SEQ ID NO: 324680 - DNA, 2631 bp, Pseudomonas aeruginosa
atgaccgcctatgaagacttcttgcgagccaaggtccgcctcgccgagccgaaaggcttcgaggtgaagccatcggccttccatcccctgctcaaaccgcaccagcgagccatcgccacctggctggtgcgccaaggccgcgcggcctgtttcgcggccttcggcctgggcaagtcggtaatgcagcttgaagtggcgcgcgtcacccgcgaactggccggaggctacgcgctcatcaccatcccgctgggtgtgcgccaggagttctaccgagacgccgcgatgctcggcatcaccgtccggttcatccgaagtttcgacgaggtagacgaccccaacaccatctacctgaccaattacgagaccgtccgcgatggcaagctcgaccctcgacggttcagtgtggccagtttggacgaagccagttgcctgcgcggcttcggcggcagcaagacgttccgcgagttcatggccctgttcgcgggtgacgatcgcgccgccggcatccgcggcgatggcgtacggtaccggtacgtggccacggccacgccgagcccgaacgaatacatcgagctgctggcgtactcggcgttcctcggcgtgatggatgtcggccaggccaagaccaggttcttcaaacgcaactcggagaaggccgaccaactcaccatccatgcccacaaggagggcgagttctggatgtgggtggcgtcctgggcgatcttcgttcagcgccccagcgacctcgggttcagtgacgaaggctacgccctaccggaactggacatccgctggcacgaagtaccgtctgaccactcgcacgccggccacgagcgcaatggccagggacgcctgcttcgtaataccgctattggcgtgcaggacgccgccgccgagaaacgcgagagcctgcccgcccggatcgccaaactgatggagatccgcgccgaggccccagatgctcaccggatcatctggcatgacctcgaggcggaacgccacgcgatcgaggccgccgtccccactgccgtaagcgtctacggctcccaggatctggaagagcgcgagcgcgcgatcgtccagttcagcgacggcgagttccaggagctggccgccaaaccggtgattgccggcagcggctgcaacttccagcgccactgctcttgggccatctacctgggcatcggcttcaagttcaacgacttcatccagtccattcaccgcctgcaccgcttcctgcagaccggccgcgtgcgcatcgacctgatctacaccgaggccgagcgcgacatccgccgccagttggaacggaagtggcagcagcacaacaccatggttcagcgcatgaccgagatcatcaagcaatacggcctgtccatcgccgccatggcgcagacactcacccgctccatgggtgtggaacgcatcgagatcaagggcaaggactacaccatcgtcaacaatgacactgtgctcgaaacccgccgcatggaaaacaacagcgtcggcttgaccatcaccagtatccccttcagtacccagtacgagtactcgccgaactacgccgacttcgggcacaccgacgataacgcgcatttcttccagcagatggactatctgatcccggaaatgctgcgcgtgaccattcccgggcgcctggcttgcatccacgtgaaggatcgtatcgttcctggcggcatgaccggcctcggcttccagaccgtctatccgttccacatggaagtgacccgcgccttcgtcaagcacggctgggcctacatgggcatgaagaccatcgtcaccgacgtggttcgcgagaacgcccagacctaccgcctctcgtggacggaacagtgcaaggacggcaccaagatgggtgtcggcatgcccgagtacctgctgatcttccgcaagccccccaccgacaactccaacgcctacggcgacattccggtggtcaaggccaagcccctgtgcatcgacgaagacggccagatcgtccctttcgccatggacaagaagctcaccgtcacccgcggcaacggctacagccgggcacgctggcagttggacgcccacgggttcacccgaagcagcggcaaccgtccgctgaccgaagaggacttcgaaggcatcccgcacgacgtgatgttcaagctgtaccgcgactacagcctgtccaccgtctacgacttcgagcaccacgtccgcatcggcgaatcgctggaggtcaccgggaagctgcccaccggcttcatgctgctgccaccgcagtcctggcacccggacgtgtggaccgacgtcgcccgcatgcggacgctcaacgcccagcagtacagcaaggggcaggaaatgcacctgtgcccgctgcagttcgacatcgtcgaccgggccatcgtgcagtactccatggaaggagacctggtcttcgatcccttcggcgggatcatgaccgtcccgtactgcgcgctgaagctcaagcgcagggcccgtgcccacgaactgaactcccgctacttcctggacggtgcgggctattgcaagtctgccgaggaagagatggccatgcccgacctgttcgccctgctcgaggccgatgctgacatcatccataaggaacccgccgcatga

SEQ ID NO: 324681 - DNA, 1779 bp, Pseudomonas aeruginosa
atgatcaagcgcactctctaccacttccacttctgctgcggcctgggcggcggtgccgccggtttcaaccgggcgcgcccgcgggtcggcaacgtcgaggccgaatgggtctgcctcggcgggatcgacgtggacccggccggattgcgcgacttcgagcgcctggccggcgtcccgggcaccctgctggacctgttcacccgcgaccaatacatccgcttccatggaacggagccgcccgccggttggagggaggcaaccccggaggacatccgacgcgccgccggcgggcgccgaccggatgccgtgttcatcagctcgccctgcaaaggcgccagcggcctgctgtcggagaagatgagcctgaccccgaagtaccaggcgctgaacgagttgacgctgcgctgcatctggctcatgggcgaggcatgggctgatgacccggtgccgctgatcgtcttcgagaacgtcccgcgcctagccagccgcggccggcacctgctggaccagatcaacagcctgctcggcggcttcggctacgccgtggcggaaacaactcacgactgcggcgaactgggcggcctggcccagtcgcgcaagcgcttcctgcttgtcgcgcggcacgtcgagaaagtgccccccttcctgtacgagccagagaagaaatcgctccgcgccgtcggcgacatcctcggccgcatgccgcttcccggtgatatcgatgccgccggcccgatgcaccgtgtgccgtccctgcagtggaagacctgggttcgcctggcactggtgcgagccggcagcgactggcgcagcctgaacgacctcgccgtcgaggacggctacctgcgcgatctgatcatcgtcccgaaataccgggctggctacatgggcgtgcacggttggaacgacagcacgggcatcatcgccggtcgcagcagccccacgaacggcgcattctctgtcgcggacccgcgcgcgccggcaaacgccctgcaataccagcagtacggcgtgcgccgctggaccgacacctcgggcgccatcatcggcgtcaagtcgcccggccaaggcacgtactccgtcgccgatccccgcggccagagtttcggcaagtacccggtcaccgactgggacggcccagccggcaccgtgattgcggccagtactaccggccagggtgcatttgctgtcgcggacccgcgccaccgtggccctgccaaacactctaacgagttccgcatcgtgccttgggaccgccacgcacaagcggtcaccagtgcccatggcacaggccagtgcgtcgaagacccgcgcgtgctcagccggacgaagggagacccgtatctcactggcggccactacggcgtggttgggttcgaccaatccgccggcgcggtgtcggccagtgcgcggcacgacaacggtcgatggagcgtggccgatccgcgcatgccgaaggcgaacgaccggctgacctgcatcatccagtcgctggatggcacctggcaccggcccttcaccaccctggagctggccgcgctgcagagcctggtggacccggaagaacagttgatcctcgacggcctgagcgacagcgactggcgcgagcgcatcggcaacgccgtaccgccggccgcggccgaggccatcgccggcgtgatgggtacaacgctgctgctggccgaggccggcgaaaccttcatgctcagcaatacgccgatctgggtgcgcccggttgcggtggcgctgagcgtcgcgcaacaggaggtaaacccgtga

SEQ ID NO: 324682 - DNA, 444 bp, Pseudomonas aeruginosa
gtgaacaccgaacagttcattcgcaacgcggccgcgcgcgggctttcccgccgcgcaacgatgcaggcccttggcctgggccgctggaagttcgacctgatcatcggagccatggggcccatcgagtgggccaagaacggcacgacgctcggcaaccgcctggcctacgaagcgtcgcgcggcaggttcacgccggcgcaggccgcagcgctggagcgcgcgcacgaacgctggagcgagagccgacgcttcaccgtcgacggcgtgaccgggaccatcgccgagctggtggagcacttccagagcccggtccacgcaacgaccgtccgccgccgcgtcgccgccggcatgagcctgcgcgacgcacttctctccccgcgccagcagcccaagcccgggcgccggcatccctggaaccgttcgcagaagcaggtgcagccatga

SEQ ID NO: 324683 - DNA, 678 bp, Pseudomonas aeruginosa
atgaaagaacgtccgatcctgttcactggaccgatggtccgcgccatcctggaaggtaggaagacggtcacgcggcgagtgatgaagccgcagcccgacttcctcggctcaatggtcgatcccaatacgccattcaaggcgcttgatgccggcctgcacgcacgcatcatctgcccctacggcgagcccggcgaccggttgtgggtgcgggagacctggcacgttggcaagcctcacgataagaccgcgccagcggacatccttgcgccgctgctcgccgaaggtcgaggcatcaccgtcctctacaccgccggcggctggcagagcgtcgggcctgcaggacgcgaggagccgatttacccagatgaccaaccgctgccggactgggctggaaaaggtcggcccagcatccacatgccccgttgggcctgccgcatcctactggagatcaccgcggtgcgcgtcgagcgcctgcaggacatcagcgaggtccaggcgcgagccgaaggtatcaccgacgggggatgctcgaactgcggaaaccatgagccctgtgggtgtgaatgcccggcgccaagcgcagttgactcgttcgttcacctctggcgctccaccggcggcaactgggaatccaacccctgggtctgggtggtcgagttcaagcgggtgacgccatga

SEQ ID NO: 324684 - DNA, 762 bp, Pseudomonas aeruginosa
atgaccagatccaatgcgccgctggtgcagagcgaggccgaactctgcgcggcgttcatcgacgagttcaaccgagtccccggctggacctgctacccggagactgccgggttcgacatcctggtggtccatgaggatggccggcagatcggcgtagaggccaaattgcagttgaacgccaaggtagccgaccagatcctgccgcagtactggcaagaccggtacggtgcgccagggccagatcaccgcctggtcattgtcgggcggatcaccgaggccagcgccggcatcaagcgcctgcttgaaatgtgcggcatcgcagtactcgctccgtcccgcggacaccgtcggcgcgacggcaagttcgtcgacttccccgagttccacttgcgctactggctccagcactccagtggaccgcaactgttcgactggaaccccgcggaacgctgccatgtcccgatcgtggtccccgacgtgcccgccggcgttccggcgccgctgcgcctcaccgagtggaaagaaggcgcgctgaaggtgatcgccacgcttcgccgccagggcttcatcaccacgaagcagatcgccgaatgcggcgtcagcgcgacgaactggacacgatcctggctcgacaagggcgccgagcgcggcacgtgggttgagtctgcccgcatgccagcgttcgaccagcagcaccccgaggccttcaccaagatccagcaggcgctggacaagagcgcccagcccaccctcttcacctga

SEQ ID NO: 324685 - DNA, 402 bp, Pseudomonas aeruginosa
atgcccaactactaccccaagggcgggcgctgccgcgcctgcgcctcgcgtcacgacgactgcagttcccttcccttcgaaaccatgccggtgcgccgccgcgaccaggagcagaccatgagtgagccattccaaaagaccttcgaccagacaggcaccttcgaggcgctgtacgcatgccaacagtggctatcagccaacggttacagctacagcagcacttgtcgcgacggaccagtgggcgtgatgaagggcgactacggaatcgcgaaatggaggaacctcacccgggaggagcgcgcggaattgcacggtaccgtcgacggtgatttccgcgaaggccctctggtgttgcggctgaaggctggcttcggccctcaggcaagcggagtggcagcatga

SEQ ID NO: 324686 - DNA, 507 bp, Pseudomonas aeruginosa
atgaccgagcccgccaccgactactcaatcaccgcagccgacgccaaggaactggccggcgccgtgcttctgccggcggacctgcgccgccaggtgctggagaagatggccgcccagcgcgacccggccaccatgctcgacctgttcgcccaggtgctgggcatggccaacgccgtcgccgagaactgccgagcgatggtcgagttgatcctcatcgagcgcggcgaacatccgcacaccgcggagcaggcgaacctcccgacgatgttcggagcgctgcagggcgttgtcctggccgcaacggtgaaccctcgcggcacgtgcgccggctgcgcctatcgactcggcaccccggcgaacacctcgccggtcaccacctccgatgccatctactgccggcaggaactcagccggttctactgccacgccgacctggacgaccagggcaacccagtccgcacctgcgtcggccacgccaaagccatgaagcaagacgccacgaaatga

SEQ ID NO: 324687 - DNA, 2364 bp, Pseudomonas aeruginosa
atgtcctctacccaacaccaactgatcgagcagtgcgccacccgcctacgcggcatcgtcgaagccctggacaacatccacgacagcacccagcaccgctccccgcaccgctggtcgacggacctcgacgaggttcattcctcagccgagagcctgctggccatgatcaaggaccaggcgccgccgtccgaagaccagttgatcgccgcaggcctcagctacccgctcgccaaggaagatgccgtgcagctctggtacgccggcttcaggtccgaagtggtcactgtgctcgaggcctgggaggcaatcggccacgatatcggcatgaacccgagcaagggcgaactgctggattccctgcgcaacatggcggcgatttgcaatgcgcacggcaatgacatgccagcccagtcggcaatcgaccagcgccaggtcatcgcagacgccatcaccggcgcgctagcgttcggcgcccaggccagccagccgccggcggaggatcactggcttcgtccgttctacgacatcggccgcgccgagggacaacgcacccaggaactggcaatgctggttcgcatgctggccgcttccctgaagcggcatgccccggaaagcaacctggtggcgcgcgccaccaactacctggccgccaagggcttggccggcacaccgcttcgtgacccgccggcaccggtagagcaggcaggcggggatgagcgggcggcgttcgaggcgtgggctacgcatttaccgatggatcggcagccgctacgaccagacctctatatgccgcaaactcaatgggcgtgggaagcgtggcagttccgcgccgccctggcgcaaccctcccagtctcagtatgaagccagcttcgaagagtggctggccaacgaactcgagggcgaggacggccagcctgttccggctgcggtctgcgacattaccctcgcccgccgagcattcaaccactggcccaagctggaacagccagccaaggtaggtggcgtccgcttcagcgctggcgtgtcgtcgcggctggtagtcgaagccgcccagcggctgaacgagttcgagtccactccggagaaagaggcggagcgcatcgagcggctccaggcgtttcgcgagcagctcgacccgctcaacctcgccccgcatgcggaagcgttcaacgaagctcccgatgaagcactcaggcctgagcaggcagaggcggagcggccggaggggccaaccgaggacgagcttgaagcagccgggctcggctacccgctgcacaaggaagaagcggtaaagctctggtattccgggttccgctccgaggtgatcaccgttctggaggcgtgggaagccatcggccacgacatcggtatgaacccggacaaaggcgaactgctggattcgctgcgctacatgctggaaaagtgcgaggcacatgacgccgccctggccagggtcgcagagctggagaggcagcagccggtggcatggatgcacgatcagccaaaccgcgtcgatgtcatccatcgagacgtcaaggatctgctacagcgcgtgccgggcagtagtagaggaatctatcgcccactcgatgtcagcgagcattacacgattccactctacgccgcccctgtagcccaggctcagcacagcgtgccggaaatatctggcatcggtcgcgatgccgaacatcccagagctgtagtgctgtatctgcgtaacgaacccagcgaggaagatatgcgagcaattcagaactttttgcgcgccatatccgccgacgtgctcacccaggctcagcacagcgcgggctacgccgaggccagaatgtgcgcgaactgccggcacatcggcatcaacgacgccgccgactacgccgcttgccatgactgcaattggactggaccagaaccggatgaggacaagtgcccagggtgcgcgggtgagaactgcatggcggcagcttgcccggagtgtggttgtcgttacgacctggtcgcggaggcgaacatcactgccccggctgggcaagtgccgcaggcgtggctcgacgtccaggccgagcgccgccggcagatcaccgccgagggctggacgccggagcacgacgacgagcacgccgatggacagatggcccgcgccgccgcctgctacgccctggccggctccagcgctccgaacgatggaaccgccgccctgctggtgtcgctggcatggccctgggatgaacagtggtggaagccgagtaccgcacgacgcgacctggtaaaggcctgcgccctggcgctggccgagatcgaacgtctcgaccgggcatgcatatcgcaaagtccccagccgggagccaccacggcctcttcctga

SEQ ID NO: 324688 - DNA, 237 bp, Pseudomonas aeruginosa
atggaaaccccatctgagttcctctcgaaggaggagttggaggccatgatcggcgccaagtcatcgaaaaaacaggtcgagtggctggcatctcatggctggaagtacgaattgaatgctgcgcagcgacccgtcgtcgggcggatctatgcccgcctgcggctggccggagtgaaaccgaacggaacggtcgctgtacaggaaccgtggacgctggatctgtcgaaggtgagttga

SEQ ID NO: 324689 - DNA, 990 bp, Pseudomonas aeruginosa
ttgtgggttggatactactacgacggccgcggcgaggatggaaagaggaaggaaatcccgctcggcaccgacctggacctggcaaagctggagtgggcgcggctggatgccagtccggctccgaagaccctgcgcaaatggggtgacgtgttcgaccggtacgaaaaagagatcatccccgggaaagcgccacgcacccagaaagacaacctcctctcgctgacgcaactgcgaaaggcgttttcagaagcgccggtcgaggcgctcaccccccaagtgctggcacagtaccgggacaagcggtccgcgaaggttcgggcgaacagggagctctccctcttctcccacattttcaacatcgccagggagtgggggatcgtcacgactgaaaacccggtgaagggggttcgcaagaaccgcgagacgccgcgcgacttctacgccagggccgaggtctggaacgcggtatacggcgcggctccaccggaactccgcgacgcaatggacctcgcctatctcaccgcccagcggccgagcgacgtactgatcattcgggaggcggacattcaggatgggcacctgcagatcgcccagggcaagacgtcgaagaagttgcgcatcatgctcgatgtcgacggcagcccgacggcgcttggagaactcgttgcgcggctgtgcgagcagcggcgccagcgcggcgtagccggcccgtacctgatcactacgcccgatgggcgccggatgacatcctccatgctgcgcattcgctttgacgaggcacggtcggccgccgccggcgcggcgcttgaggacctcgacgagacgctggccaccgcaatccgtcagttccagttccgggacatccgcccgaaagcagcctcagaaattgctgacttgggccgggcatccaggctgcttggacacaccgacaagcgcatcaccgagaccgtctatcgtcgcgtcggcgagatcgtggagccaacgaagtaa

SEQ ID NO: 324690 - DNA, 876 bp, Pseudomonas aeruginosa
atgtcatcgttccaaggtatctgggtcccactggtcacgccgttccgccatggcgagatcgacttcgccgcgctgccgcgcctgctcgaccacctgctgaatgccggtgtcgccggggtcgtggtctgcggtaccaccggcgaagccgcggcgctcgaacacggcgaacagctgcaattgctcgacgccgtgctcgaacgggtggcgccggagcgcgtggcgatggggctggccggcaacaaccaggcgcaactgctggccttccagcgcgaagtgctagagcgtccgatcgccggcctgctggtgccggcgccctactacatccgcccctcccaggaggcgctggtgcgcttcttccatggggtcgccgacgcgtccagcgtgccgctgatcgtctacgacattccctatcgcaccggtgtgcgcatggaactggaaaccctgcgacggatcgtcgaccacccgcgcatcgccgcgatcaaggactgcggcggcagcctggaaaacaccctggcattgctggcagacggccaggtggcggtgctcgccggcgaagacctgcaaatgttcaacgccttctgcctgggcgccagcggtgccatcgccgcctccgcgcacctgcacccacagcgcttcgtcgcgcttcaccggcaggtcgtcgagggccggctggaagcggcccgggccaacttcttcgcgctgttgccgttgatccgtgcggccttcgccgaacccaacccggcgccggtcaaggccggcctggcgcgccagggactgatcggcgacgagctgcgcgcgcccttgctgggctgcggcgcggcactggcggaacggctcgggagcttgctcgcggagatcccggcgcggctcgcctag

SEQ ID NO: 324691 - DNA, 390 bp, Pseudomonas aeruginosa
gtgagcggactcgcgcagcgctccgacgacccgtggctggcggcgctgccggccgcggtgctctacggcgcctgggcggcctatgccaaccaggacggcggcctggccgggatgggcgtcgccgccctgctccagggcgccgcgagtctcctggcgacgcgcttcggcctgtacctgttgcaatgtctcggccgccgccacggccttgcgcaacgccaggcgcccctgctggtggtgctcctgctgaccgcgccgatggccgcgctgcactggctctcgggcacgccgcatccattggcgagcgtggcgccatcgttcgtcatcggctggctctacttcgccctctgggcgcgccgccgcccgggccgccggcaagccagcggcgcctag

SEQ ID NO: 324692 - DNA, 1170 bp, Pseudomonas aeruginosa; identical to SEQ ID NO: 323278

SEQ ID NO: 324693 - DNA, 447 bp, Pseudomonas aeruginosa
atgcagcgaatcattaaggaccgccaggtggtcgacgaccgctggcacttgctgcccaaggacgcgaccctggaaagcgtacccaacagcgacgacgtgatcatcccgctggccctgtggctcgagcacggcccggccctgcgcggccgcgacggcggcctgggggtctggctggacgcggacgaggagccggaaagcatcgccggcgacctcgacaggttccaagtgatcgcagtgaacttccccgcctttaccgatggccgcggcttcagcagcgcgcgcctgctgcgcgagcgctacggctacaagggcgagatccgcgcgatcggcgacgtgctgcgcgccgaccgcagcccggaagacgccctggccagcctggacgacttcagcgaggtctaccagacctcggtggagcagccgctaccgctgttccgccgccgcggctga

SEQ ID NO: 324694 - DNA, 291 bp, Pseudomonas aeruginosa
atggccgccagtccctactatctacgccaaacccacgccccggactgcggctgctctgtgtgctggtccgcaaggcaggtcatcccattgcacagcccgtcgccgtgtccggactgccggccccctgggctgccctatctggaagatggccgctggctctgccgtccccgttccttctgcgcgaaacacgacccgtcccggcgtccgccgaagtactggcacgttgtgtacgacagcgggaagcccacgccctttgtgcccgtgcgcgaagcattccaactggagggctga

SEQ ID NO: 324695 - DNA, 267 bp, Pseudomonas aeruginosa
atgataaaagaccgccttataaccttgtttaacaaggagcggacaagcgtctggtttgaaaagcagaccgggattgatcgctatcggtggggcaatgtccgaaacgggaaagccagaatcaccgacgccgagatcgaggcggtgatacagatttttccgcagtacgcgctttggctggtgacgggcaacatcgcccctgaaagcgggcagaccagcccagactatgacgaggcaaatcgaaacttggccagtccaaacgcgggatag

SEQ ID NO: 324696 - DNA, 795 bp, Pseudomonas aeruginosa
atgcctaaaacagcacaagtgatcgcagccgtgtatgacgaagaccacgacgccggaagggtcgtcggacggtcactcaaaagccttcgtgaagcagtcggattgacccagctacagatggctcgaaagcttggcgtaggccaggcagctatttccaaaattgaagcccgaggtgatgtgcagatttcttctttgaagaaatatgttgacgcactaggagcatcgctacggatagaggcagcattcaaagcagatagcgagatatctactcgccttcgagaagagctggcattagaagagcactcagatagacagctggtgctaccaatatttagtagtgatgagatatttcttgaagaatctaaagatttaatcctgagcattcatccgcaatactccgataagattctggcaggtaaaaaaactgttgagttgagaagaagattcccattgacgacagctaaggggacaaaggtttatatttattcaacatctcctgttagagctatagttggttcggcggaaattgcaggaataataaagctcccaataaaggacatgtggaagaaatattcaaagtgtgcattcatcaaaaaacaggcttttgaatcttactttgaggggctaagtgaaggttttgcgctggagttaaagaatgcacaagcttttgataagcctattgagcttttggagttaagggagcgctttaactttactccgcctcaatcattcatttacgcaaagcaggaaatgcgcagagcactcatggatgagcagacaagcctatctaattga

SEQ ID NO: 324697 - DNA, 1539 bp, Pseudomonas aeruginosa
atgagcagacaagcctatctaattgatactaatgtaatcattggcctagaagacaataaagctgttcagccagcttttgcagctttcatgaagctagccacaaagcacaaggttgacttctatattcatgaggccgcaagagatgacatcgcacgcgataaggatgtccagcggcgcgaaatatccctaagtaaattagagaaatttagctgtatcaataaggttcgcggatttaacgcgcacgtattaggcgacgagtttgggcagatacggaagccgaatgacatagtcgatgtgacgttgcttcatgctctgcacatcggtactgctgacttccttgtaactcaggacagagggctacacgagagagccaggcgccattcatcagagctagggcgcagggtactccatgtcgcggatgctgtagagcttctcaagacgacatttgagcctatagaaagcccagtaagatttgttgaggaagtggctgcgcatactattcctctgagtgacagcatattcgctagcctaagagaggattatccgccatttgatcagtggtggaaagataagtgtgttcgcgaacatcgaacatgctggatcatttcaagtgaccagaaccaaaatatagcaggcttggttgtcagaaaagacgaaagccctgagaacactgacgctacgcttcctgcaaagaaaatcctgaagatatgcacatttaaggtacgccctgaaagtcgtggctttaagctcggagagcttcttttaaagaaggtgttctggtttgcgcaaaaaaactcgtacgatctagtttatgtgactacatatgatggtcaggctgctcttatagatttgcttgaatattatggctttcagcatacggctaccaagccagatggtgagttgatatatgaaaagactttctcccaagatgttctagttcgcaatagcggagaagacctttttaagactgcgcggttaaattatcctcgttttgtgacggatcaagatgtaagggcttttgggatacccattaaagagggttatcacgatatcctttatccggacttgaaatctgactatcaaggagatttgtttgaaaatgctggattggtaggcccgcagcgaccaggaaatactattcggaaagtatatctttgtcgtgctaaatcaaatttgggggagccaggctcgcttttgtttttctacaagggaaaatccaagcacgacccatctcaggcgtttactaccattggcattcttgaggaggttgcaaccgcaagttcaacaaaagagcttatgaagctagcaggtggccgttcggtttacagcgaaaaacaactagaagactgggccgcttctagtcataaccctataaaggttattaattatctgttggcgtgctatatagatcctcctgttggaatgattgagctccaagaaatgaatgtgtttactggtcatccacctcaatctatttttgaaattaaagtaaatattgatcgcctgcttgcgagatccggagtcggatttaaggtctaa

SEQ ID NO: 324698 - DNA, 777 bp, Pseudomonas aeruginosa
atggaccatcgcggtgacgatgatgaaggcgccgtagaaccagttgccgacgtagatgtgcttcaccttgcgacgggcgatggtgccgaagaacaggtaggcatagaccacccagacgatcgccatccacagcgccagcggccattccatctcggcgtattccttggaggtggtatagcccagcgggtagctgacgatcatccccacgatcgccgcctgccagccccagaacacgaagcgcgccagggcatcggagatcagccgcacgccgctggtgcgctgcaccacgtagaaggaggtggcgaacaacgcgctgccgccgaaggcgaagatcaccaggctggtgtggatcgggcggatgcggccgaagctggtccagggcaggtcgaggttgagcgccggccagaccagttgggcggcgatgaacacccccaggcccatgccgaggatgccccagaccagggtcatcaaggtgaactggcggacgacgtcgtagttgtagccgtccggatcttttctgctatccgtatcgttcatggtcgctggcacgccgggccccggggtccggccggctggcgagcaggcgcgaccctcgggtcctcgttgggttatcggtattcttctgggtatcccgttgccgggtcgatggagtgcggaggtcggatcttcgtctggaaggctcggaacagacggctcatggcactggtggccattctaggaggggagctttattcgtctccaacgaataatgttgctattacagtgcaaaattattga

SEQ ID NO: 324699 - DNA, 9456 bp, Pseudomonas aeruginosa
atgccgctgagtccgaacggcaagctggatcgcaaggcgctaccggcgcctgaagtaagcgtggcgcaggcaggctacagcgcaccgcgcaacgcagtggagcgaaccctggcggaaatctggcaggacctgctgggcgtcgagcgggtcggcctggacgacaacttcttcagcctcggcggcgactcgatcgtctcgatccaggtagtcagccgtgcgcgccaggccggattgcaactgagcccgcgcgacctgttccagcaccagaacatccgcagcctggccctggcggccaaggcgggtgcggcgacggcggaacaggggccggcaagcggcgaggtggcgctggcgccggtacagcgctggttcttcgagcgggcgattcccaaccgccagcactggaaccagtctctcttgttgcaggcgcgccagccgctcgacggcgaccggctggggcgtgccctggaacgcctgcaggcgcagcacgatgccctgcgcctgcgtttccgcgaagagcgcggcgcctggcaccaggcctacgccgagcaggccggcgagccgctgtggcgccggcaggcggggtccgaggaggcgttgctggcgctttgcgaagaagcccagcgcagcctcgacctcgaacaggggccgctgctgcgtgcgctgctggtggacatggccgacggcagccagcgcctgctgctggtcatccaccacctggcggtggacggggtgtcctggcgcatcctgctggaagacctgcagcgtctctatgccgacctcgacgccgatctcgggccgcgtagcagttcctaccaggcctggagccggcacctgcacgaacaggccggcgcgcgcctggacgaactcgactactggcaggcgcaactgcacgacgctccgcatgcgctgccatgcgaaaacccgcacggcgccctggaaaaccgccatgagcgcaagctcgtcctgaccctggacgccgagcgtacccggcagttgctgcaggaagccccggcggcctaccggacccaggtcaacgacctgctgctgaccgccctggcccgcgcgacctgccgctggagcggcgacgccagcgtgctggtgcagctcgaagggcacggccgcgaggacctcggcgaggccatcgacctgagccgcacggtgggctggttcaccagcctgttcccgctgcgcctgaccccggccgcggacctcggcgagtcgctgaaggcgatcaaggagcaactgcgcggcgtgccggacaagggcgtcggctacggcctgctgcgctacctggctggagaggaggctgcgacccgcctggccgcactgccgcagccgcggatcaccttcaattacctgggccggttcgaccgtcagttcgatggagcagcgctgctggtaccggccacggaaagcgccggcgccgcccaggatccgtgcgccccgctggccaactggttgagcatcgaaggccaggtctacggcggcgagctgagcctgcactggagcttcagccgggaaatgttcgccgaggcgaccgtccagcgcctggtcgatgactacgcgcgggagctgcacgcgctgatcgagcattgctgccaggagggcaacgtcggcgccacgccgtcggacttccctctcgcgacgttgcgccaggagcagttggatcgcctgcctctggcgcggatcgaggacatctacccgctgtcgccgatgcagcacggcatgctgttccactcgctctacgagcaggcttccggcgattacctgaaccagctccgagtcgacgtccatggactcgatcccgcgcgcttccgcgccgcctggcaggcggcgctggacagtcatgacatcctgcgcgccggcttcctctggcagggcgatctggagcagccgctccaggtgatccacaaacacctcgaactgccgttcgccgagcatgactggcgtggtcgcgaagcgctcgccgaggctctcgacgagctggccgcgagcgaacgccggcggggtttcgagctggagcaggcgcccttgctgcggctggtcctggtgcgtatggacgaagagcgctaccacctggtctacacccaccaccacatcctgctggatggctggagcagcgcgcagctgctcggcgaggtgctcgctcgctacaccggcgaacaggccgagcgcacgggtgggcgctaccgcgactacatcacctggctgcaggcacaggacaagcgcgtcagcgaagcattctggaaagaacaactggcggaactgctggagccgacacgcctggcccaggcggtcgccgccgagcgcgagcaggtcggcagcggccagttccagcgcagcctgccgccggcacgcaccgcgcgcctgaagacgttcgcccagcggcacgcggtgaccctcaataccctggtgcaggccgcctggtcgctactgctgcaacgctacaccgggcaggatacggtggtcttcggcgccaccgtcgccggccgtcccgccgaactggccgggatcgaaaggcagatcggcctgttcatcaataccctgccggtggtcgccacaccgcaaccgggcatgcgcctcaccgactggttgcaggaggtgcaggcgcgcagcctggcgctgcgcgagcaggagcacacgccgctgttcgagatccagcgttgggccgggctcggcgaggcgctgttcgacagcctgctggtattcgagaactaccctgtggccgaagccctggaaaaggggtcgccaggcggcgtgcgcttcggcccggtgagcaatcatgaacagaccaactacccgctgaccgtcgccctgggcgtcggcgacagtctgtcgctgcaatacagctatgaccgtcaggcgttttccgatgccgcggtcgagcagttggaccggcacctgctgaacttgctcgaaggcttcgtcgacaacgccgaacggactctggtcgagctgagcctgctggatgccgaggagcgcgcgctgatcgattcgctgtggaaccgcagcgagtcgggcttccccgcttcgccgctgatccaccagcgggtggcggagcgcgcacgcctggccccggacgcgccggcggtgctgttcgacgaccaggtgctgagcttcgccgagctggacagccgggccaatcgcctggcacatgcgctgatcgcccgcggcgtcggtcccgaggtgcgggtggcgatcgccatgcagcgcagtgcggaaatcatgattgccttcctcgccgtgctgaagtccggcggcgcctacgtgcccctggacatcgagtacccgcgcgaacgcctgctgtacatgatgcaggacagccgcgcgcacctgctgctgacccagagccacctgctcgaccgactgccgattcccgacgggctgtcctgcctgtgtctggaccgcgaacaggagtgggccggtttccccgcccatgatccagaggtggcgctgcatggcgacaacctggcctatgtgatctacacctccggctccaccggcatgcccaagggcgtggcagtgtcccacggcccgctggcggcgcacatcgtggctaccggcgagcgctacgagatgaccccggcggactgcgagctgcacttcatgtcgttcgccttcgacggctcccatgaaggctggatgcacccgttgatcaacggtgcgcgggtgctgatccgcgacgacagcctgtggctgccggagcagacctacgcgcagatgcatcgccacggcgtcaccgtcgcggtgttcccgccggtctatctgcagcaactggccgagcacgccgagcgcgacggcaacccgccggcggcccgggtctactgcttcggcggcgacgcggtggcgcaggccagctacgacctggcctggcgcgcgctacgcccgcaatacctgttcaacggctacggaccgaccgaaacggtggtcaccccgctgctctggaaagcccgcccggacgacccctgtggcgccgcctacatgccgataggtacgctgctgggcaatcgcagtggctacatcctcgatgcccagttgaacctgctgccggtcggtgtggccggtgagctgtaccttggcggggaaggcgtggcgcgcggttacctggagcgtccggcactgaccgccgaacgtttcgtgccggatcccttcggcgcgcccggcagccgcctgtatcgcagcggtgacctgacccgtgggcgggcggatggcgtggtggactacctgggacgggtagaccaccaggtgaagatccgcggtttccgtatcgagctgggcgagatcgaggcacgcctgcgcgagcaggcggcggtgcgcgaggcggtggtggtcgcccaggcgggtgccagcggccagcaactggtcggctacgtggtcccgcaggatccggcgctggtcgaggatgccggtgcccaggcggcctgccgcgacgccttgcgcaaggcgctgaaggagcgcttgcccgagtatatgttgccggcgcatctgctgttcctggcgtgcatgccgctgacccccaacggcaagctggatcgaaaggccctgcccaagcccagtgccgaccagcagcaacgcgactaccaggcaccgcgcagcgaagtggaaagacaactggcgacgatctgggcggaggtgctgaagctggagcaggtcggcctggccgacaacttcttcgagatcggcggcgattccatcatttccctgcaggtggtcagccgtgcgcgccagctcggcatccatttcactccgaagatgctcttcgaggcgcagaccatcggtgccctggctccgctggccgagagcggtacgcaggtgctggcgatcgaccagggaccggtgaccggcgtcacgccgttgctgccgatccagcagggtttcttcgccgaagaggtcgccgagcgccactggtggaaccagtcggtactcctggaagcccgcgagccgctcgatgcccggcaccttgagcaggccctgcggggcgtgctggcgcaccacgatgcgttgcgcctgtccttcacccgcgaggcggccggctggacggcgcgccaccggggtgtggaagagggcgctgcggcgctgctccgcgtcgctcgggtcgccgacctggcggcgctgcgggcgcttgccgacgaagtccagcgcagtctcgacctggccgatgggccgttgttgcgcgccctgctggcgactttcgacgacggcagccagcgcctgctgctggttatccaccatctggtagtggatggcgtgtcctggcgtattctcttcgaagacctgcagaccgcctaccggcagttgctggcgggtcaggccgtcgagctaccggccaagaccagcgccttcagggattgggccgagcgcctgcgggcgtttgccggtgacggcggcctggatggcgaactggcgtactggcaagggcaattgcagggcgcctccagcgacctgccgtgcctcgacccgctgggcgaccagagcaaccgccatgcccgttcggtcagttgcggactggacgccgaggcgacccggcaattgctgcaggaagcgccggccgcctaccgcacccaggtcaacgacctgctgttgaccgcgctggcgcgggtgatctgccgctggaccgggcaggtcgatgcgttgatccagttggaagggcatggccgcgaagaactcttcgccgagatcgacctgacgcgcacggtgggctggttcaccagcctgttcccgctacgcctgacgccggccgagggcatcgccgcatcgatcaagggcatcaaggagcaactgcgcgcggtgccgaacaagggcatcggcttcggcgccctgcgctacctgggcagcgcggcgagccaggcagccctggccgggttgccggtgccgcgcatcaccttcaactacctcggccagttcgacggcagcttcgccatggacgagggcgcactgttcgttccggccggcgagcgcgccggcgacgaccagagcccggacgcgccgctggccaactggctggcgctgaacggacgcatctatggcggcgaactgcgcatcgactggagcttcagtggcgagcgcttcgaaaccaccagcatccagcgcctggccgacgcctatcgcgacgaactgctggcgctgattgcccactgccgagtggccgagggccagggtctgacgccctcggacttcccgctggcgcgccttgaccaggcgcgtctcgaccaattgccgctggcgccctgcgaagtcgaggacctctacccgctatcgccgatgcagcagggcatgctgttccacagtctgtaccaggaggccggcgattacatcaatcaactgcgggtcgacatcgacggtctgcatccggagagcttccgcgcggcctggcaggcggcgttggacgagcacgatgtgttgcgcagcgggttcctctggcagggcgccttcgagacgccgctgcaggtggtgcgcaagcgtgtcgaagtgccgttcagcgtacttgactggcgcggtcgcgaggacctggcggcggccctcgacgagctggccgccggcgaaggccgactgggcttcgacctgagcgaggcgccgctgctgcgcctggtgctggtgcgcacggacgaagagcgctaccacctgatctacaccaatcaccatatcctgatggacggctggagcaactcgcagctgctcggcgaggtactgcagcgctaccgtggcgagacgccgccgcgctccggcggccgctatcgcgactacatcgcctggttgcagcgccaggacgccgcgctcgccgaggccttctggctgccgcgcctgcgccaactggacgagccgacccgcctggggcagtcgatcgtccaggccaggcagcgcggcaagggctacgcggaacggttgcgcgagcttgatggcgagcagacccggcgcctggccgagctggcccgcgagcagaagatcaccgtcaacaccctggtccaggccgcctggctgatgttgctgcaacgctataccggacaggacagcgtggccttcggcgctactgtcgccggtcgcccggcggaactgaacggtatcgaggagcagatcggcctgttcatcaataccctgccggtcatcgctaccccgcttccgcagcagagcctggcgtcgtggctgcaggcggtgcagggcgagaacctggccctgcgcgaattcgaacacacgccgctgtacgacatccagcgctgggccgggcagggcggcgaggcgctgttcgacaatatcctggtgttcgagaactaccccgtttcgcagatgctccagcagcaggcctcgcaaggcctggctttcggtgccgtgggcaaccacgagcagaccaactacccgttgaccctcagcgtaagcctggggcagcgcctggaactgcagttcgcctatgaccgcgagcatttcgacgacgccagcgtggcgcgcctggatcgtcacctgacgcacctgctggcgcagatggtcgagcgtccggccagcacctgcctggccgagttccagctgctggaagcagcggagcggcgccaggcgatcttcgactgggggcgcaacccgggacgctatccggacgagcgcagcgtcgagcagctgttcgccagccgcgcggcgatggagcccgagcgggtggcattgctcttcgaggagcgccagctgagctacggcgagctcaacgcccaggccaaccgcctggcccaccgcctgatcgagctgggcgtggggcctgacgtgctggttgggatcgccgtcgagcgcgggctggaaatgatcgtcagcctgctggcggtgctcaaggccggcggcgcctacgtaccgctggacccggaatatccgcaggagcgcctcggctacatgatcgaggacagcggcatcgccctgttgctcagccagagccacctgctgcaacgcctgccagcggcctctgggatcgcctgcctggcgctcgaccaggcgtgggactggcaggaccgtccggcgagcgacccgcagttgcgggcgcatccgcagaacctcgcctacgtgatgttcacctccggttccaccggccgtcccaagggcgtcggcatcagccgagagagcctgtcgcggcatacccacgtttcgctggagttcttcggcatcgggccggacgaccgggtgctgcaattctccaccttcaatttcgacggcttcgtcgagcagctctacccaccgctcgcctgtggcgcctcggtggtgctgcgcggcaccgagatctgggacagcgagacgctgtaccgggagatcgtcgagcgacgcatcaccacggtggacctgactaccgcctactggaacatgctggccaaggacttcgccaaccagggcgtgcgcgactacggcgcgctccgtcaggtccacgccgggggcgaggcgatgccgccggaaagcctggtggcatggaaggccgccgggctggagcatgtgcgcctgctcaacacctacggccccaccgaggcgaccgtcacggtcaccaccctggattgcgcgccctacgtcgacggcagcaaggcgatcccggcgaccatgccgatcggcaaggtgctgccgggccgcgctatctatctgctggacgatgccgggcaaccggcgccggtcggggcggtcggcgagctggtgatcggcgccgagctgctggcgcgtggctatttcaagcgtcccgacctgacggccgcacgcttcattcccgatccgttcgacgagcagggcggcggccgcctgtaccgcaccggcgatctggcacgctacggcgccgacggggtgatcgagtacgtcggccgggtcgaccatcaagtcaaggtccgtggcttccgcatcgaactgggcgagatcgaggcctgcctcggcgagcacccggcggtgcgcgaggccctggtcatcgccgtcgagggtgctgccggggcgcagctggtggcctatctggtgccgcaagcggaagcgctggctagcgccacgctggaggtacaggccgcgctgcgcaacgagctgaaggccctgctgcgcgacagcctccccgaatacatggtgccggcgcacctgctgttcctcgaacgcctgccgctgagccccaacggcaaggtcgaccgcaaggctctgccggcgcctgacgccagtctcctccaggaggcctacgtggcgccgcgcagcgagctggaatgccaggtcgcggcgatctggcaggaggtgctgaaactccagcgggttggcctcgacgaccatttcttcgaactcggcgggcactcgctgctggccatcaacgtgatttcgcgcattcaactggagctgggcatgaagctcaccccccaactgttgttccaattcccgaccctggggcttttcgtcagcaatctggaaaaggccggtgggcaggtcgacacatcgaaactgaacaagctggaagccctgcttgatgaaatggaggaagtttga

SEQ ID NO: 324700 - DNA, 711 bp, Pseudomonas aeruginosa
atgtggcagccgacggctggtccatgcgggtactggtggaggaactcattgccctgtacggcgcgcgccggcaaggcgtcgaggcgacgctgcccgatttgccgatccagtatgcggactatgcgatctggcaacgacactggctggaagccggcgaacgcgagcgccagctggagtactggatggcgcggctgggcggagggcagagcgtgctcgaactgccgactgaccgccagcgcccggcgctgccgagctaccgtggcgcgcgccatgaactgcagttgccgcaggcgttgggccgacagttgcaggcgctggcgcagcgcgaagggacgacgttgttcatgctcctgctggcctcgttccaggcgctcctgcatcgctacagcggccaggacgagatccgcgtcggcgtgccggtggccaaccgcaaccgggtcgagaccgagcggctcatcggcttcttcgtcaacacccaggtgctgcgcgccgatctcgatacgcagatgccgttccttgaccttctacagcagacccgtgtcgccgcgctcggcgcccagtcacatcaggacctgccgttcgagcaactggtcgaggctttgcagccggagcgcagtctcagccacagcccgctgttccaggccatgtacaaccaccagaacctgggttccgcaggtcgccagtcgctggcggcgcagttgccggggctga

SEQ ID NO: 324701 - DNA, 2223 bp, Pseudomonas aeruginosa
gtggggcgcgcacagcgcgcaattcgacctgaccctggacacctacgaatcggaacagggcgtgcacgccgaattcacctatgccaccgacctgttcgaggctgcgaccgtggagcgcctggcacgtcactggcgcaacctgctagaggccgtcgtcgccgagccgcggagacgcctcggcgacctaccgctgctcgacgccgaggagcgcgccacgctgctgcaacgcagccgtctgccggcgagcgaatatcccgccgggcagggtgtgcatcgcctgttcgaggcccaggccgggctgaccccggacgcgccggccttgctgttcggcgaggaacgcctgagctacgccgaactcaatgcgttggccaaccgcctcgcctggcgtctgcgcgaggagggtgtcggcagcgatgtactggtcggtatcgcgctggagcgcggcgtacccatggtggtggccctgctggcggtgctcaaggccggtggcgcctatgtgccgctggatccgcagtatcccgcggaccgcttgcagtacatgatcgacgacagcggactgcgcctgttgctcagccagcaaagcgtgctggcgcgcctgccgcagtcggatgggctgcaaagcctgctgctcgacgacctggagcgactggtgcacggctacccggcggaaaacccggacctgccggaggcgcccgacagtctctgctacgcgatctacacctccggttccaccggccagccgaaaggcgtgatggtccgccatcgagccttgaccaacttcgtctgcagcatcgcccggcaaccgggcatgctggcgcgggaccgtctgctgtcggtgaccaccttctccttcgatatcttcggcctggagctatacgtaccgctggcgcgtggcgccagcatgctgctcgccagccgcgagcaggcccaggatcccgaggccctgctcgatctggtcgagcggcagggcgtcacggtattgcaagcgaccccggcgacctggcggatgctgtgcgacagcgagcgtgtcgacctgctgcgtggctgcaccctgctgtgcggtggcgaggcgctggcggaggacctggcggcgcgtatgcgcggattgtcggcatcgacctggaatctctacgggccgaccgagacgacgatctggtcggcacggttctgcctcggcgaagaggcccggccgttcctcggcgggccgctggaaaacaccggtctgtacatcctcgacagcgaaatgaacccatgtccgcccggcgtcgccggcgaactgctgatcggcggcgacggcctggcgcgtggctaccatcgccgccccggcctgaccgccgaacgcttcctgcccgacccgttcgccgccgacggttcgcgcctgtaccgcaccggcgacctggctcgctaccgcgccgatggggtcatcgaataccttggacggatcgaccatcaggtgaagatccggggattccgcatcgaactcggcgaaatcgagacgcgcctgctggagcaggacagcgtgcgcgaggcggtggtcgtcgcccagccgggggtggccgggccgtccctggtggcctacctggtgcccaccgaggccgcgctggtcgacgccgagtcggcgcgccagcaggaactgcgcagtgcattgaagaacagcctgctggcggttctcccggactacatggtgccggcgcacatgctgttgctggagaacctgccgctgacgccgaacggcaagatcaaccgcaaggcgctgccgctgccggacgcgagcgcggtccgggacgcccatgtcgcgcccgagggcgagctggaacgggccatggcggcgatctggagcgaggtcctcaagctcggccacatcggtcgggacgacaacttcttcgagctgggcggccactcgctgctggtgacccaagtggtttccagggtacgccgccgcctcgacctgcaggtgccgctgcgtaccctgttcgagcacagcaccctgcgcgcctatgcgcaggccgtggcgcagttggcgccggccgcccagggcgggatcgtccgatgcgccagggactcatcgccgcagctgtcgttcgcccaggaacgccagtggttcatctggcgcctggatccgcacagcgcggcctacaacatcccggtggcgttgcgtctgaagggaccgctgcggcgcgatgccctgcagggtgccctggacctgctggtgcagcgccatga

SEQ ID NO: 324702 - DNA, 606 bp, Pseudomonas aeruginosa
atgcaggagtgcctggaacgaggccagcagcagcatgaacagcgtgccctgctcggcctgggccagccgccgcagggcttcggcgagttccgccggcaacgggatgccgatgcgccggccgcgatggctctgctgctgcgggcgcggccggtcgctgggcaactccagcaacggctgctcgccgcccaggcgggaaacccagtagcccagttgacgctcacgctcgccgccatccatccattggcgttgccaggccgcaaagtcggcgtactggatcggcaactccgccagcgcggggggctcatcatgccgaagcgcggcgtagacgcggatcagttcgtccaccaggacctgcatcgaccagccatcggcgatgatgtggtgaagagtcagcaccagcacgcattcgtccgtcgccagcggcaacagcaggacccgcagcagcggtccgcgttgcaggtcgaacggccgatgggcctcggtttccaccagccccttcaggtcttcgccggccaccggcggtcgtcgctcctcgatggctatcggcagcgtcgggtggatgacctgccgcggtgcgccatcgtgttcgacgaaggtggtgcgtag

SEQ ID NO: 324703 - DNA, 327 bp, Pseudomonas aeruginosa
gtggccggcgatgcgctcggcgctcgacgcgtcgaagagatcggtggcataggtcagttcggcaagcaggccattggaggattcgtaggtatccagggtcaggtcgaactgcgcggtctgcacgtcccaggccaggtcctcgacctcgagttcgcccagggaggcgaaacgcgaaccgcgatgatcgtcgcgctggtggttgtacatcacctggaacaacggcgcatggctgaggctgcgttccggctgcaacgcatccaccagttgctcgaacggcaggtcctgatgaccctgcgcttccaccaccgcccgccggacctgccgtag

SEQ ID NO: 324704 - DNA, 2079 bp, Pseudomonas aeruginosa
gtgcagttcgagggtctctccggcgctcaccagcagcgtcagcggatagtgcgtctgctcctggttgctaagcgcgtcgatccgcatgtccgccggtgtctcttccgccagcgctgcggaaaccgggtagttctcgaataccaggatgttgtcgaacagggcctcgccgacctgcccggcccaacgctggatgtcatacaacggcgtgtgctcgaactcgcgcagcgccaggttttcaccctgcaccgcctgcagccagtcgccaatcggctgctccggacacgggctggcgaccaccggcagcgtgttgatgaacaggccgatctgctcctcgatcccgcgcaactccgccggacgaccggatacggtggcaccgaaggccacggtgtcctgcccggtgaagcgttgcagcagtatcagccaggccgcctggaccagggtattgagcgtcaccttctgctcacgggcgaactctgccaggcgctggctcgtggtgacgtccagctgccgatagcgatcggcatggccctcggcaccccgcaccccgtgggcgaacgccggaaccagcagggtcggctcgcccagccgctgaaggcgctgcttccagaacgcctcggtgcgacccgcatcctggcgttgcagccaggcgatgtagtcgcgatagcgcccatccgagcgcgacggcgtctcgccgcggtagcgctgcaagacttcgccgagcaactgcgagttgctccagccgtccatcagaatgtggtgattggtgtagatcaggtggtgccggcgttcgccggtacgcaccagcaccagccgcagcagcggcgcctcggcgagttcgaagccgagcccggcctcgccggcggcgagggcatcgagcgcctcggcgaggtccgcgcggtcgcgccagtcgtgcacgctgaacggcacctcgacgcgcttgcgcaccagttgcagcggtttttccagcgcgccctgccagaggaacccgctgcgcaggacttcgtgggcatccagcgccgcctgccaggcctcgcggaagcgttggggatccaggccttccacgtccagacgcatctggttgatgtagtcgccgctgttctgctggtacaggctgtggaacagcataccctgctgcatcggcgacagcggatagagatcctccacctcgcccgccgccaggggcaaagcgtccagttgccgctggtcgagcccggccagggggaagtccgaaggggtcacgccttcgacatcggcggcgcaacaatgctcgatcagcgccagcagctcgtcgcgataggcatcggccaggcgaaggatgctcgcctcgctgaaacgcgcggcgctgaagctccagtcgataccgagccggccggcatagacctggccgttgagactcagccagttgtccagcggcgcgtcgctgtcgcgctcgctgccggccgcatcggcgctgggacggaacagcgcggaggaatcggcggagaagctgccgtcgaactgtcccaggtagttgaaggtgatgcgcggactcggcagggccgccagcgccgcccgatcctcggcgctgccgaggtaacgcagggcgccgaaacccagccccttgtgcggaatcgcgcgcagttgctccttgatccgtttgatcgaagcgcccagctccgccaccggcgacaggcgcagcgggaacaggctggtgaaccagcctaccgtgcgggtcaggtcgatgtcctcgaacagctcctcgcgcccgtgtccttcgagctggatgagggtatccgcctggccggtccagcgaccgatgacccgcgccagggcggtgagcagcagatcgttgacctgggtccggtaggccgccggcgcttcctgcaacaaccggcgcgtggcctcttcggtcagctcggtacgtgccgaacggacatgccggaccgattgcgcaccctcgcgatcatcgcagggcagttcggtggatacgccttcgagctgcgccagccagtagccgcgctcgccctccaggccgccgtcgcgggcatgcgcctgcaagcgttcggcccacgccttgaaggcgctggtcttggcgggtag

SEQ ID NO: 324705 - DNA, 747 bp, Pseudomonas aeruginosa
atgcctcatttcggcgcacctgcgctgctcctgctgcagttgctcgcggccctgccagcgacggccgtggagaccgacgcgacgccattgcgcttctcggtgatggaaagctggagcatgccgttggtccgcctgcaacggggccagccgatcgacggcatcgtctacgacatcacccgctcccttgcccggcaggtcggccgcaaggcgctctaccacccctacccgcgcgggcgcatcgagcaggcgatgaacgctggcgaaatcgatgtccgctgctacatcagccccgcctggctcagccacgacttccccggctatcgctggagcgtcgcgctgctggtgcaacgcgacatcctggtcgcccgcgaaggcttcgcgccgattcccgaggcgctgccggcccagcgtatcggtaccgtccttggctacagttatccccgcttgcaagcgctgttcgacatcggccgactgcgccgcgacgatgcgcgcacccaggatctggtgctggaaaagctgcgcgccggccgctaccgctacgcggtcagccatcaactgtcgctgcactggagcaaccgccaggcgccggggcagccgccactccaggaagccgcgcagctcgaagagacggcggtgagctgcatggtgcgggactccgcagaggttccggtggaagcgatactgaagacgttcgaggaaatgaagcgcagcggagagatcgaggagatactgcagcgctaccgataa

SEQ ID NO: 324706 - DNA, 1743 bp, Pseudomonas aeruginosa
atgaagcaacggattcccaccctcctcgccggcgcctgcctggccatccctctgcacgccctcggcgccgccgacctgctggtggtcaacgccaggatcttcaccgccaatccgcagcaacccttcgccgaggccctggcggtggaggacgggcggatcctcgcggtcggcgacgaggccgggctgcgcgccctggccgatggcgacagccaggtcgtcgatctcggcggcaagcgcctgatgcccggcctgatcgacacccattcgcacgcggtgttcggcggcctggagctggccggcgcggacatgggcaacgaacaggtcggcctcgacgaactggaacggcgcctgcgcgcctggcgcgacaacggcaaggcgcgacatggcgacatgctcaatgtcagcggcatgcataccgcctactggagccaggtcaaggacttccgcgcgcgcttcgaccacggcgaatgggccgaccagccgctggccttcatcggcagcgaccaccacaccggctgggccaacgccgccatgctgaaacgcgccggcatcgacgccgcgcgggtccgcgccctgcccgaggaacagcgcaacaccatcggccacgacgccgacgccacccccaacggcttcctcgccgatgctggtctcgacgcggtgctcgcggtactgccggcgccgagcgcggaacagatgctagaagccggacgcagcgcggtgcgctacagcaactcgctgggcctgaccgcatggatggacccggccgccaatggctcgccgggcgacgccctgttcagcctcaggcccgacgagaacaccgtcggcgtgctaccggtctaccagcggctggccaagggcggcgaactcagcgcccacgtcgccgccctcctggtcgccaacccacgcagccggccggccgacctcgaggtgctggacaaggtgcgccagcgcttcctcggcagccccaacctgaccctgccgggaatcaaggtgttcgccgacggcgtaccggaatacccggcgcagaccgccgcgctcctcgagccctaccgcaacagcaggaagacgggcgaactgctgatcgacccggcgcacttcggcgaactggtcagcgccgccgacgcccgcggctggctggtccacgtccacgccatcggcgaccgcgcggtgcgcgaggcgctgaacggcatgcagcaggcgcggcgcgaccgcgacagcggcatcgcccattcgatcacccacctgcaactggtcaatcccaaggaattcgagcgcttcaggccgctcggcgtgatcgcctcgatgcagctgtactgggccgccgccgacgaaaccacggtggacctgatgaagccctacatcagcgccttcgcctaccgctaccagtacccggcgcactccctgctgagcaagggcgcgaccatcgccggggccagcgactggccggtgtccagcctgtcgccgtggaaggccatccagcaggcggtgacccgcaagggcccgcagggcgtgctcaatgccggcgaacgcctggaccgccagaccatgttctacgcctacacccgcgacgctgcgcggaccatcggcctggagcgccggatcggcagcctggagccgggcaagcaggcggacttcatcgtccttgaccgcgacgtgttcgaggtgccggagacgcaactgggcgaaaccaaagtgctgaagacctggttcgccggcaagccggtgtattccagcgagggctga

SEQ ID NO: 324707 - DNA, 852 bp, Pseudomonas aeruginosa
atgcgatccgacctgcacgaggccaaccggctgtcgtggaacgccgccacccgggcgcacaacagccacaaggccgaccaggccgccttcttccgcaacggcggttccacgctctatcccgaggaactgcaactgctcggccatctcgacggcctgcgcctgctgcatctgcaatgcaacgccggacaggacagcctgagcctggcgcgccttggcgcccgcgtcaccggggtctacatcgccgacagcgccatcgacttcgcccgccagctgtcccgcgacagcggcatcgccgccgacttccagcgcgacgacatcctccgctggctgcccgtcgccgccacccgcggcgaacgcttcgaacgggtcttcgcctcctacggcacgctggtctggctctccgacctcaagcgctgggccgacggcatcgcccaggtactggttcccggcgggcgcttcgtcctggtggagttccaccctttcgccctgtacttcgacccacactggcaaccggcctacgactacttcagccgcgagccgatcgccgagagcggcgtcagcgactatgtcgccgagtccggcgccagcctggcgccctccggctaccgcgccggcgtcgagaacttcagcaaccctcatcccagctacgagttccagtggggcctggccgatgtgatcggcgccctgctcggcgccggcctgcaactcgaacggctggaggaatacccctacgccaacggctgggccggcttcgacggcatgcgcgacggcggcggcggacgcatgctgccgcccgccgatcgtccgcgcctgccgctgatgtacggcctcagcgcaaggaaaccacgatga

SEQ ID NO: 324708 - DNA, 1068 bp, Pseudomonas aeruginosa
atgagttcgcagttgatcggcgtgctggcagcttcgacgcagggcgatgcggacgccaagagcttgcagacgggagcctgggtggcggggaatgccacccaacacaactacctcagtcattggcaggaggagaagaagcggcaggaggtcgatggctgcaaagacaaacagctctgcaaaaccggaatagaagccaaatgggcaattatttcggcccagcaggatgtcggtatcgtcgtaggtgttggaggaggcatcggtctttcgacagctgaaaccgcagtgggtgtttatgagctggtcaagaactggagggaaacctatgcagctctggagcagttggccacttcgccagagttccggcagcagtttggcgataactacctgaaggggctggaggagcgcgccgcattcttgacccaggcatacgaggatgccggctggcaaggttcggtcacagctggtgtcgagggcggtaggttcgctgcggaacttgttggcgttctgacggcagtgaaaggtggcgcgcagataaccgccaagctgccaacagcagccaagaacctggtcaacgcgattgcggagtcacctgtttccggtagtatgagttcgcagctcggggcagtgggggacttgggtcggctgggtgggggtgcaaaagggactactcccactgtaactgccgaagggcgtattggtaactctgtatttaccgacgttaaccaaactgccaggcctgccgctcaagcgaatcccaatcagccgactttgattgcggaccgagtggatgcaaagattgcggttaatggaaaacctcacccgaatggaaatatggcggatgctcatgccgaaattggagttattcagcaagcatataatgcagggaaaaccactggtgcagatatggccttgaaggttgaaggtaaagctgtttgcagctattgccgtggtgatatcgcggcagcggcagaaaaggctggtttgaactctctacagataaacgaagtgactacaggaaaaactctatattggaagcctggtatgcggtctttgagggagcttgaatga

SEQ ID NO: 324709 - DNA, 1398 bp, Pseudomonas aeruginosa
atggacgacaacaagaacaaggtcctgcggttgcgcgatgtggtgctctacacggtctcggcgatgctcttcatggaccagatcgccctggcttcctccctcggtccgtcgagcctgttctggtggctctacgtgctggtcctgctgttcctgccgatggccatgatgacctccgagctgggcaccgccttccccgccaacggcggcgtctaccactgggtgcgcagcgccttcggcttccgctggggggcccgggtgtcatggatgtactgggtcaacaacgcactgtggatgccttcggtctacaccctgttcggcagcatgctcggcgccttctatttccccgagctgagcctctggggcaagatcgccatcggcatagccctggcgctgctcaccgcggcgttcaacgtggtcgcgctgcgcctgggcaagtggctgccgaacctcggcgcgctgctcaagctgctcgcggtgctcgccctgggcgtcggcggcctgcacttcggctggaaccatggcttcgccaacgacttcagcctggactccatcgtcccgtcctcgccgggccagatggccgcgctgggagtgatggtctatggcatcatggggaccgagctggcctgttgcagcgccgcggagatgcgcaacgcgcgccgcgacatcccgcgcgcggtgctgatctccgggctgatcgtcggcgccttcaacatcttcggcaccctcggcgtgctggccgcggtaccggccgaggaaaccgacgtcacccggatcttcgcccataccctctacaacatctacggccacgacggcgccggcgggatgctcgccgacctggtcggcgccttcgtcctgttcaccctcttcaccaacatggtcacctggagcatgggcaccaaccgtgccgcggtggaagcggccaaggccggcgagctgccggcgctgttcggcgtggtccattcgcgccacggcacgccgatcggctcggcggtgctggcctcggcggtgagcatcgtcctgctgctgctctacggcctggtggcgcacactgccgaggaactgttctggaccctgctgtcgatcttcgccatggttttcatgatgccctatgtgctgatgtgcctggccttcgtccgcctgcgccgcgccgacccgcgtccacggccctaccggatgccgctgggcgaccgcctggccagtctctgggcgctgttcgtcgcgctgcatgtgctggccggcatctgcctgttcgtcgtcacccccggcgcgccgatggactgggcctacgccggcaagatcgtcggcggcgtggcgctggccctggccgtgggcgaactgctgatccgccaggcggcgcgaaggcgcggcgtgatgtcactgcgcggtgcctacggttga

SEQ ID NO: 324710 - DNA, 723 bp, Pseudomonas aeruginosa
atgacgctgatcgccgccgcccagagctgcgcccaccccgccgacctgccacgcaacctcgacgaccacctgcgcctgatgcgtatcgcccaggcacggggcgtgcgcctgctggtgtttcccgaactgtcgctcaccggctacgaacccaccgctgccgccgccctcgcccagccggcggacacgcccctgctgcaaccgctgcgccagctcgccgagcaggcacggatgaccacggtggtcggcctgccgctgcgctcgccgaagcatgccaagccgctgatcgccgccctgatcctcggcgccgacggcagcctcggcgtctatgccaagcagcacctgcacgcgggcgaggaacgccacttctcagccggcgacggcggccccctgctggagatcgacggcctgccgatggcgttggcggtctgcgccgacttcagccaacccagccacccggcccacgccgcccgtgccggcgctcgcctctacatcgccagcgcgctgatcggagaaaacggctacccggccgactcggccctactggccggttatgcccgcgagcacggaatgggcgtgctgctggccaaccatggcgggccgacgggtggctggaaggcggcgggcaggagtgcgttttggaatgagcggggagcgctggtcagggagacgacggggacgggtgagacgctgcttctgctggaacggaccgagatagacgcttga

SEQ ID NO: 324711 - DNA, 471 bp, Pseudomonas aeruginosa
atggtcagcttcctccttatcttggcgagcacggccccaggcgagagcttcaacccgcaggtcggtcagataggactcttccggctgggagaggtagccggcgtccatgaggccatcgatcaacatcagggcgcggtcgaagggttcgctgggatgctccgccgcgtgcagcagatagccctcaaggaagctcagcaacgcgttaatcgggttgctcgacagaacgcgcgctacctcaacgccttcaaagctctgctcaacacggaagaccagttcggcattcagggaacgcatagaggccttggcagcctgttcaacccgagcgcgaagagctggaggcatccggagcttgaattgcggatcggtgcggctcatgccgtccactcctgttccaacagccagttgcgaagcagcgcgctattcaccatgcgcagctttccgagcttcacggacggcagcacgcctcgataa

SEQ ID NO: 324712 - DNA, 216 bp, Pseudomonas aeruginosa
atggaactggaagagcttaaccccagtgccctgatagggccgcaacaggatgtggagtccatcgaacggtgggcggagcgcaacggcattagctatggcactgcccgcgcctgggtttatcgaggcgtgctgccgtccgtgaagctcggaaagctgcgcatggtgaatagcgcgctgcttcgcaactggctgttggaacaggagtggacggcatga

SEQ ID NO: 324713 - DNA, 693 bp, Pseudomonas aeruginosa
atgaaagctgacaaggacgatgcaccagaatacttaaaaagaaagcggagccagagctttggcaaatggtcgctggcaattgctctagggctagggctttcagggttagccttacacatggcagaaaaccaattcctagcaaaaccacaggctggccagacctcctattctgaaaaccctactcagacctctaactataacattccagaaagtgagcccaaaaagacatcagaagagcttttttgggaaaatgttaatgcgcgcaatcatcaacagaacaagcctaagcaagctgtttataacgatagcaattacaggccacaaaagccggcaaacatctacacaccgccaacaacccatcgaatagtatccgcaccccagcaaacccagcaacgccaagtcaaccgagcaagccgcgagcgaacctctaaatggatcaaaagctggaatggtggtacaaactatctggcggaatggctatctgtaaacaattacatagatggctccagtgtctgcgcaaatcaccgacgcggatcaatcgacttccgcgaatgccgcaaggctgccaagcaatatttccatgaacagtgcagaatctggcgtgtgcgttatgacaatgaccgcaaagtaagcagtgatcgaatgaagacacgttactgcactgcggcgagcagcttcaacccaatgggatag

SEQ ID NO: 324714 - DNA, 1515 bp, Pseudomonas aeruginosa
atgcgccgccgagctaaccgtacctccgactcaatctccgtagcaccccataatagcgcaaagcgaagcgatctaattaatccggaattattcggcaacgaagcaggagatgatgaagatctagatgtactcaatagctatttcctagacaagccggaatttggtcgcttctattctccacacacacgacttgcctacgtcagatctagaaaaggggtaggaaaatcggcactactcaagcagacgctttttctgcgaaaagaagcaaacgcaggggaaatcttaatctacgtcaaggctgctgacctaatagcactgcaagacgttaaatcaagctcgcctgatgagttgttatatggctggcaacaacggatctgctcacagatcaatcttgagcttggctcaacattacgctatggatttactgatgactcaatgctattaatcgagtctgccgagatagctggatttcgaaacagaaatattgtaagcgctttatttgacagattaaaaataaaaggattgggcgctgaaattgatcgcacaaggctaactgctgtcgaccatcaagctgtgctcaaaagggtactcggaaaccaggaagttacggtgtggttatttgttgacgacgtggatgctacgttcgtcaatacagagcatgagcgactcaaagcaagcactttttttagtgcctgtcgaaacctggtcagctctgtaaaaggcctctgtattcgcgcatccgtgaggagtgatgtatggtccgtcttagcccagcacgatgaagctttagataaatgtgaacaatacatgctggatcttgcctggagtacgacagagagcgggagaattctagaaaataaaattatcagctatttttctcgctactacagcgatgacaccagattcacttctttgcagccggaaactgatggctacaaaatccgaaaaattgtgttcaatgaacctttccaatgggcaggtcgtcgcctggaatcgtatagaccaattcatatcttatcagctgggcgccctcgatgggccgctcaactttgcaagctcgctggtcgtgacgcttatgataagtcattccctcttatatcgattggacacatcagggcggtgttaaggaactatggacaattccgtgtaagcgacttgtacaaggagcatcgtcatcagtgcccaacgctccagaatataattgaatccttcagcggtggcgtttacagattcacaacaaacgagcttatcgatcatgtagtagagaagataataagaagagtcggcgttcctgtgattgacggaatcaattcagaaaaaggggctctttcagtagctcattttctgttcaggtgtggcttcattgctgcacgcgatgagactgatgttacgggattgggattcgttcgctatgaagagagaccaaatctactaacttcgaatattaatcttgatgatggaatgtcttgggaagtgcatccaagttaccgggaggtgttgcgcatcaataagtaa

SEQ ID NO: 324715 - DNA, 1200 bp, Pseudomonas aeruginosa
atgagctttccgggcaggaccggcgagttgctcgacctgcgcgagctggagcaactggtcgaccagttgagccgcctgccgtcgcgccaggcgcaactggagctggtgcccggcagcgaggtcggcggcagccgggtgcgtctcaagggcgagcgcgacaagccctggcgggtctccgccacgcgcaacaacgacggcgacgtcagcaccggcgagcagcagatgggcctgggcctggactgggacagcccgctgggcctggccgaccagctcaacctgcgcgccaaccgcgacgcggtgaccgaccgctggcgccattccgacagccagagcctgttctacagcctgccctggggctggtggaccttcacctacggctacagccagagcgactaccgcacgcgcaacgaggccagcggcttccccttcaagctcgatggcgacagccgcagccaccagttccgcgccgaacgcgtgctgcaccgcgacggtgtgagcaagaccgccatgagcctggggctcagccaccagcgcaccaacaactatgtcgaagacacccgcctggaagaccagagcacgcggatcaccgagacccagctcggcttcaaccatggccggcggatcggcagcggcttcgtcaacctcgacctcggctggcagcagggcatcggcgcccttggcgcgcagggtcgcggccacccgcaggcgggcgatccgaatgcgcgctacgacaagtacagcctgaccctcagctacctgcagccgttccagctatggggcgagcgcttcagcttcgacagcctggccaccgggcagaggagcgaggacgtgctgttcagcccgcagcgcatcagcctcggcggcaacagctcggtgcgcggcttcaaggaccagaccctgaccggcgacagcggcggctactggcgcaaccagttgcgctggcggcgcgcggtggagtgggcgccgctgcggccctggctgcaggaatacggcgtggccttcgcctacgacgtcggcgtgatccgccacgaccgctacaacgacggcgccagcgggcgcatgagcggcaacgccatcgaactggatgcccgcggccgctatttcgccgccagcgtcggcttcgcccgctcgctggagcggcccagcgccatcgagcggcgcgagcacccgatctatttccgggtcgacgcgttcttctga

SEQ ID NO: 324716 - DNA, 1074 bp, Pseudomonas aeruginosa
atgcgccgcctccagcgcgatgcgttcgcgcgccgccaggctctgccggttgaccagttcctccgcgctgcggatctcggcgctgccaccggcgtaggtcttgccgttcagctccacggcctgggccgcgatcttcaggtcgccctggctggaggcctgggccaggctcagcttgccgctggcgtcgatgcggatgtcgccgccgctggcggccatgtcgccggccagccgcacccccacgccctgctcggtgccgaccaggcggatcgccccggcgtacatcccgcccagcgccgagctgtcgatcgccagctgcggcttctcgctgccatcggcggcgcgcggcgtggcctgcaggctgtcggcctggacgtcgttgcggccggtgacgatgttgaggttcttcgcgtagagcttggcgttgagcttggcgctgcgggtgatcaggtcgaactgttcgaggttgccgacgttcagttcggcgccttcgacgacgatgtcgccgccgtccacctggaagcgctccaggcgctggccgtccatgatcggcttgccggtggtgagggtcgcgcgcggcgtgttgatgaagccgcagccctggcaggtgatgccgtgcgggttggcgacgatcacccgcgccgactgcccggccacctcggtgtagccggccagggtgctgcggttgccgccggtgacctggttgaggatcacctgcgccgcctggcccttgaggttggggttgccgaggatgatcccgccgagctgggtaccctgggtcttgccggtggcgttgttgaggatcagcccgttggcgccgacgttgtagtcgcggaaatggttgttcgacagcccggcgccgttgggcgtggcgatattgacgatgggcacgccgttgcccgcctggcccaggccggtgttgccgccggcggccttgtccagcgccagccccgccgccgcggcgacgatcgggttgaggaacaggatgccggccagggacagggcgatgcactggttcagcgggctgcggatgtccatatcgttactccttggcgggtaggggcccggcgaggttaa

SEQ ID NO: 324717 - DNA, 1476 bp, Pseudomonas aeruginosa
atgcggttgtcgccgcccagcgccgagacatggccctgctggttgcgcacgccttgcccggcgcggatttccagcgactgcgcctgggtgacgccggcgctgttgtcgaacagcccggtgaccagcttcagccaacccttggcgctgttgagcacgccgccggcgccgttgtcgaggctgccgctctgcaggtctaggttaccggcccggctgtccaggcggccgccctggttgtccagcgcgccaccgatacgcagctggttgtcgccctgggcctggagcgtgccctggcggttgtccaggctgccggcctgcacctcgagggcgccggcctggctgaagatcaggccgtcctgctggttgcgcagggcgccgccgcccaggcgcaggctcatgccggcctggctggcgagggtgccggaggcgctgttgtcgaggctgccggcgctgatctccagcagcccctggctgaccagcttgccgccgcggttgtcgacgctggcgctgcgcagcagcaggtcgccgccgctggccaggcgcgccgcgccggtgttgaccagggcgccgccgaggatggcgtcgagccggccctggctgatcaactggccgtcgctgttatccaggctggcgcccttgagcagcaggctgccgccgttgatccggccgccggcgttgttcagcagcgtatcgtcgcgctcgaagctcagcgcgcgctgcgccgagaccaggccgccctggccgttgtccagcttcccggcgatgctcagggtcacgtcgctttcgccggagacgatgccctgggcgttatccaggctggcggcgtcgatccgttgcgcgcccttgctgaccagcgcgccctggccgtggttgtccagcgcgccgccgaggctgatggccagctcgccgtccttgctcgaaagggtgccgccggcgctgttgtccaggctcccgcctgtcaccgtcaggccctgccatccggagagcaggccggcgccggcgttgcccagcgcgtcggcgtccaggcgcagtttcccggcgctgatgatgcgcccctgctggccgttgtcgatgcgcctggccagcagctcgaagccctgctggctggaaatctcgccgccctggcggttgtcgaggacgttcagccgctcgatgctcagcgggccgcgggcactgatcaggccgccctggttgtccaggtcgccgccccgcaggtcgagactgacgccgcgctcgccgatcagccggccctggcgttgcaccaggcgctcgaccgtcaggcgcaggtcgccccgggcggagatttcgccgccgtcggcggagtcgacgcgccctgccgtcagttccagttcgccgtcgctggtgagcaggccgccacggttgtccaggttggcggcgctcaggcgcagcgactgcttgccactgagggcgccgccacggttgtcgaggtcggcgctgctgacgtccaggacgccctga

SEQ ID NO: 324718 - DNA, 1758 bp, Pseudomonas aeruginosa
atggttgtcgaagacgagtgcagcgacatccagccctccgcttgcggaaagaacgccttggaggctgttgtccagtgcctgggcgatgcgcagggtcagggagtcgccgctgatcacgcggccaccccggttgctcagcgcggtcgcggcgagggtaaagcttcgatcgctggagatctcgccaccgccactgttgtccacgacacccagttgccgcagcagcaaggctccaggcgtggcgatcaggccctgagcacggttgaccagttctcccccgcgcagatcgagcgcgatggccgtatcgctgaccagcctgccgctgccctgctgatccagccccttcaggttggcatcgatcgcacccttggcagtgatccggccgttctggctgttgtccaccaggtccgcgaccagcgcgagcccggcaccgctgcctatgccgcccttctggctattgttgaggctgccagtacggatctccgcggcccccttggcgctgacgatgccgccctggctgttgtcgaggctggcgctgcgcaggacggcaccggcgtcggtgaccaccctgcccccctggttgttcaacgcaccctggctggaaagcgacagggtcccggcgctggagactgcaccgccctggttgtccagccgaccgctcttcacgctcaggcgtccctggctgctcaagctgcccgcctgattgcccaatacgccgtccagaatgacgtcgatgctatgctggctgctgagcaggccgccgttgccattgaacagttcggcgccattcaggcgcagcccatcacgactggcgagtaccccgccgtcctggttgagtacccgtggcgcgacgaggcgaagtccgctatcgccgatggccttgccgcctcggttgtccaactgctcggcgacgtccagtgtcacctggcccgggctggcgatttcgcccgcacggttgtcgatcctccgggcggaaacggtcatgttgccatcagcactgaccagaccgccgctgcggttgtcgaggctatcggcctcgagcatcagcgcaccctcgctgctcaattcgccacccgcctggttaaaggctgtcacgctggcgtgcaggtcacccctggccgcgatccgtcccctgacactgttcgctcgctcggcagtcagtttcagacgaccttcgctaagcaggtcgccgtcatcgttttccaaacgggacacgtcgatatcgacggcgcccttgctgccgatggagccactgcggttgtccagggcaagcgcccggatatccaggcctccggtgccggagagaacaccttcgaggctgttgtccagagcctgggcgatgcgcaacgtcagtacaccgccgctgcgcaggcggccaccctggttggtcagcgcggaggtggtgagtgtgaaggctcggtcgctggaaatttccccgccgctgttgtccaccatgccgagttggcgcaggagcaaggttccaggcgtggcgatcaggccctgagcgccattggccagggttccctcgttcaggtcgagtatgatgccggcattactgaccagccgccctttgccctgctgatcgagtcccttgatatttgcgtcgatcatgcctttggcagtgatccgaccttcctggctgttatccacctcagtagcaatcaggccgagcccgtcattgctgccaagattgcctttctggctgttgttcagaaccccggtatggatctccgccgcagcgttggcactgatgatccctga

SEQ ID NO: 324719 - DNA, 1140 bp, Pseudomonas aeruginosa
atgtctctgactgctgagcagtccggcattgccattgaacaattcggtaccactcaggcgcagcccatcgcggctggcgattactcccttgtcctggttgagcacgcgtggcgcggtgatgcccagaccactgtcagcaacgactttgccgccacggttgtccagttgctcagtgagattcagcgtcgccacgccctggctggcaatctcgccggcacggttgtccacctgccgggcatcgatgaccacacctcggttgccggcgatgcgaccagcgccgttgtcgactttgtcggcgtcgagggccagcgcgccctgagtcgtcagctcacccccgttctgcaccagcgcaccgagtttggcacgcagttcatccttggcgacgatacgccccttggagttgttcgcctcatcggccgccagcttcaggccgcgttcggcgatcagcgtgccagcgtcgttttccaggcgggtcacaccgatatcgatggcgcccttgctgccgatggagccactacggttgtccaggacgaatgcctggatatccagacctccggcgccggagacaatcccctcgaggctgttgtccagggcctgcgcgatacgcaaggtcagggctccaccgctgagcaggcgtccaccctggttgttcaacgcggaggtggcaagagtgaacgcgcggtcgctggagatttccccaccgctgttgtccaccacgccgagttggcgcagaagcaaggtgccaggcgtggcgatcaggccttgagcgcgattgaccaggcttcccttgttcagatcgagcgtgatgccggtatcgctgaccaggctgcccctgtcatgctggtccaacccttggagagccgcatcgatcgcacccttggcagcgatccggcccgcctggctgttgtctacccgagcggcgaccagggtgagtcccgcatcgctgccgatactggctttccggctgttgttcaggttgccggtacgaatctccacggcccccttgccactgatcgcaccggcctggctgttgtcgaggctggcgctgctcaagctaagtccggcgtcgctcgccagtctgccgccctgattgttcagggcgccctggctggtcactgccaatgcccctgcgctggatag

SEQ ID NO: 324720 - DNA, 1368 bp, Pseudomonas aeruginosa
atgcccgacgcgcccgcatccgccgccgaacgcctcgaacggctgccgctgagtccgtatcaccgactggtcttcgtgatcatcgcgctggcgttcttcttcgactcgatggacctggcgatgatgaccttcctgctcggctcgatcaaagccgagttcgggctcgactcggcgcaggccgggctgctggccagctcgagcttcttcggcatggtgatcggcgcggccctgtcgggcatgctcgccgaccgcttcgggcgcaagccggtattccaggccagcatcgtgctctggggcctggccagctacctgtgctccaccgccggcgacctcgacagcctgaccttctaccgggtattgctggggatcggcatggggatggagtttcccatcgcccagtcgctgctgtcggagatgatcccggccagccgccgcggcaagtacattgcgctgatggacggcttctggccgctgggcttcgtcgctgccggctgcctgtcctacttcctgctgccgctgaccggctggcgcagcattttcctggtgctggcgctgccggcggtgttcgtcctcgccatccgcttcctgattcccgagtcgccgcgctggctggagcaggccggccggcgcgaacaggcggaccgggtattgcgcgacatagaaacacgggtgatgcgttcgctgggcctgtccgaactgccgccgccgctgcgccagccgcagcgggaacgcagccgtccgggcttcttcagcgccttcgccgaactctggtcgccagcctaccggcgccgcaccctgaccgtctggggcctgtggttcttcgccctgctcggtttctacggcctgacctcctggctcagcacgctgctccagcaatccggcttcgccgtcacccagtcggtgtactacacggtgctgatttcgctggccgggatacccggcttcctctgcgcggcctggctggtggaaagctggggccgcaagccgagctgcgtgctgatgctcctcggcggcggcgcgatggcctacgcctacggccagaccgcggtgttcggcggcagcctggcactgctgatcggcttcggcctggccatgcagttcttcctgttcggcatgtgggcggtgctctacacctataccccggaactctatccgacctccgcgcgcgccaccggctcgggcttcgcctcggcggtcgggcggatcggctcgctgctcggcccgctggtcaccgggctggtcctgccgctcaccggccagggcggggtgttcaccctcggcgccctctgtttcggcgtcgccgccctggtggtctgggccttcggcatcgagacccgcgggcgcaccctggaggagcttgccggctga

SEQ ID NO: 324721 - DNA, 1341 bp, Pseudomonas aeruginosa
atgccgaggtttcccttgttcagccaatttcccctccacgaacgcctgctgaaggcactggaaagcctgtccttcagcgagccgacgccggtccaggccgcggccattcccaaggcgctggaggggcacgacctgcgggtcacggcgcagaccggcagcggcaagaccgcggccttcctgctgccgctgctgcaccgcctgctggccgaggacaagccgcgctccctggcgcgcgcgctgatcctcctgccgacccgcgagctggcccagcagaccctcaaggaagtcgagcgcttcgcccagttcaccttcatcaaggcctgcctgatcactggcggcgaggacttcaaggtgcagggcgcgcgcctgcgcaagaacccggagatcatcatcggcacccccggccgcctgctcgagcagcgcaacgccggcaacctgccgttgcaggacatcgaggtgctggtgctggacgaggccgaccgcatgctcgacatgggcttcgccgacgacgtgctggccctggccaatgcctgcccggccgagcgccagaccctgctgttctccgccacccacagcggcgccgggttgaacaaggtgatcgccgaggtgctgcgcgagccgcaagtgctgcgcctgaaccaggtcggcgagctgaacgagaatgtccgccagcaggtcatcaccgccgacgacgtggcgcacaaggaacagttgctgcaatggctgctgagcaacgagacctacaccaaggccatcgtcttcaccaatacccgggtctccgccgatcgcctgaccgggcggctgatcgccaaccagcacaaggtcttcgtcctgcatggcgagaaggaccagaaggaccgcaagctggccatcgagcgcctgaagcagggcgcggtgaagatcctcgtcgccaccgacgtcgccgcacgcggcctggacgtcgaaggcctggacctggtgatcaacttcgacatgccgcgcagcggcgacgagtacgtgcaccgcatcggccggaccggtcgcgccggcgccgagggcctggcgatctcgctgatctgccatggcgactggaacctgatgtcgagcgtcgaacgctacctcaagcagaacttcgaacgacgcaacatcaaggaactgaaggccgcctaccaggggccgaagaaactcaaggcgtcgggcaaggccgccggcagcaagaagaaaaagcaggacaggaagggcgccgccgccaagcccgcggccaagcgcaagcccgccgcgcggccgaaggccgggccgtcggcggtggtcagcgccgacggcatggcgccgctcaagcgcaagaagccgacggcggagtga

SEQ ID NO: 324722 - DNA, 1716 bp, Pseudomonas aeruginosa
atgctccagtccgtttcgcccaagcacgacctgcccctcaaacccgaaggccaagcggccaagccagaacgcaccggcacctgggcgccgttctcgatccaggccttccgcatcatctggatctgcaacctgttcgccaacctcggcacctgggcccagtcggtggccgccgcctgggtggtcaccgacgcccacgccagcccgctgatggtggcgatgatccaggtcgccgcggcactgccgctggtgctgctgtcgatcctctccggggtcatcgccgacaaccacgaccggcgcaagatcatgctctgggggctcagcttcgagatgaccggagcgatgttcgccaccctgctggccttcctcggctacctcgacccggtgctgctgatcatctccatcctctggatctccctcggcggctcggtgaccatcccggcctggcaggcggcggtcaacgagcaggtgccggcgcgcatggtcagcgacgcggtgctgctcaacagcgtcaactacaacgtcgcccgcgccgccggcccggccctcggcggcctgctgctgagcgcggtgggaccggcctgggtgttcctgttcaacagcttctgctacatggccctgatctgggcgatctggcagtggcggcgcgacgtgcccaagcgcagcctgccgccggaaggcatcctcgaaggcgtcaccgcggcgctgcgcttcacccagtactcaaccgtcacccgcctggtgatgatgcgctccttcgccttcggcctctccgccagcgcggtctgggccctgctgccgctgctggcgcaccgcaacccggacggcgacgcggcgatctacggctacatgctcggcgccctcggcctcggcgcgatcctcggcagcacccaggtctcgcgtctgcgccagcggatcggcagcagccggctgatcagcctggccggcttcaccctggcgctgatcctgctgaccctcggcctggtggacaacctctgggtcctgttcccggtgctgatcctcggtggcggctgctggatcggcgccctcgccacctacaactcggcggtgcagatcctcgtccccgactggatcaaggcgcgcgccctggcgctgtaccagaccgcgctgtacggtggcctggcgctgggttcgttcctctggggccatctcgccgagaccatgaccgtgcacggcgcgctgctggccgccggctgcctgctgctggcctcggtgatcctcctgtacaactcgcgcctgccggaaatggacgccgccagtatttcccgcgcgccggcgagcatgcccgggcagccgagcttcgtcttcaacacgcggcggggcatggtgctggtctccatcgaataccggattcccgccgagcgcacccgcgacttcgttcgcgccgcccagccgctgcgccgcctgcgcctgcgcaacggcgcggagcgctggtcgctgttccgcgacgtgagcaacccggaggtctggcaggaactgttcctggtggacaactggatccagcacctgcgcatgctcgaccgcatgaccctggccgacaagatcgtcatcgacaacgtcaccgccctgcatgccggcgacggtccgccgcagatccgccattgcgtgagctacgaggcgagcagctacgatacgccgctggtgaagagtgccacgccgccggccaacgacgaggcgggcgcgacggcggggagctga

SEQ ID NO: 324723 - DNA, 1326 bp, Pseudomonas aeruginosa
atgaagttgctgttgcgttgcctgctgctgggggcgtgggtcgtctcgccgagcctgtgggcctggtccaaccatacggtgggcagctacctggcattgcgcgagctggcggccatccgcgaggcgccggaagtcgaggtggagccgctggaggcgttcctcgccgccgagcgcggcggactggccgccctgctggacgagcaggaagcctacgcccgagcgcatatcggcaactacccggcgcgtccggacgccctgcgcttcgctgccgagggcgaggccggcgacttgcgtcaggcgttcctcgcggcgctgcgggtcaacccggagatccgcctggcgctggcgctccagccgcttcccgggcaggaccagccgcagcgcccgcacctcaagccacaggaggtgctggtgttccagaacctctcgccgtggaccgcctggcgtttcatccgcctggagcccggcgagcgagtcgcgcccctggcagtgctggccaccgccgccgacgaaccggactacggccacgacatcaacctgttcagcgacaaccccggcgaagccggccagcgctacggcttcggcacccagccattcggcgacccgcgcttcgagttcagctcccaggcgccgttccacatgggcttctatcacgaggcggcggtgatctacagcggcgcgccgttcctcgcccgggcctggccggaatggcgtgcctaccagtacttcggcctgtcccgcttcgccttcgccaacggtcatccctactggggctaccggttccttggctggggcatgcactacatccaggacatcacccagccctaccactccacgccgctgcccggtgccagcctggcggcgatgctacagatggagggcaaggcattgctcggctacccggaggaaaagcaggcggccatcgagcgtgtcgcgaaccgccataccgcggtggagaaataccagttcgactggctgcgccaactgctccgcgacggccgcccgcagccgatgctcgacgcctacgccgacacccgccgcgacggtgcctatccggcctattcgccgacctacttgcgcgaggtggtggccgccgagtcgaacgcccacgccgcggccttcgacgccgccatcggcgaatggctggccgcccgcccggcctccgccgcgcaggacttcagcgagagcaaccagccacgccccgaggcccacgacaatgcggggctgaacgcgcaactgatcgagctgatcgggcatttcggcgcgcatagccggaacatcgtcagggcggcgttggagacggaggagggtggggcgaaggagtga

SEQ ID NO: 324724 - DNA, 1266 bp, Pseudomonas aeruginosa
atggcgattgatgcatatgtgggcaagcctgggcacggtaaaagttatggcgttgtcgagcacgtaattatcccgtcactgaaacaagaccggcatgtagtgactaatattccgctcgaagtcgatatgttactgatggattttggcgggactattgaacaactgccggaagactggtttgagcgtgaagacttggccgactttgcgccgcctggttcggtcctggtcctcgacgaactctggcggcgctggccgaagggccagaaaaccaacgatgcgccgatggccgacaagaagctgttggccgagcatcgacaccgcgtagacaagaaaaaccggtcgatgcgggttgtgatggtgactcaggacctcgaccagctcgccagctgggccaccctgttggtcgaaacgacgtaccggatggtcaagaagtcgaagaccatgttccgggtcgatatctacaacggcgtggccaagggcgacagcccgccgaagtcgaagctgcttcgcagcacggccgggcgtttcaagcctgacgtttaccgttactacaagtcagctacgcagtctgaaacgggcggtgtgggcgatgagtcgaaggccgatacccgtggctcgttcttgcgatcctggggcttctgggggcttgttgggctgatcgtggtctgtttgtcggtcggcattcccggggtcgtccggttcttcacgccaccgcagcccaagcaagcgtcagcgccgactcccgcgactaaggtcgttgaacaggcgcagccagttgcggctcccgcggggcgtgcgatgcaagcggtctatggcacgtcgtcgaatgggccggtgccgtctgcgatctggcggattgccggctatgtgcatgccggcctgggccgggctgaggcgtggccgtcgaaggatggttacaacgcggagccggatcgaccgatcagcaagacgtcacgcgtggtgctggtgtccgaaggtggccgcacgcggttctggccgattgagaaatgccggttcttcgaacagacgcccgatttgtattgcgacatcgacggcgagcgtgtgacgttctggacgggccgaggggccgtatcgactgtgatggatgcgacaagcaccgcgagcggcggcagccagcgtagcgcagcgtccgccgcgaccggtgcgcaggtgcagaccccgcattcgtttcagccgcagcctcagcagcagggaacccgcgtgaccgttgttgctgatggcagccgctcaccccgcacgttgtga

SEQ ID NO: 324725 - DNA, 360 bp, Pseudomonas aeruginosa
atggaaggcattcttagtgctatcaaacaactgattcaaacggcgacagatttctttcagcgcgcacttaaggctatcgaagacttctttaagtgggcgcaagatgcgtttgattatttttgggagcttcttcctgttctacctgagtatgtgtttcacaagcttgtctccggtattgtgaagttcttccagtggctgccggtgccggatttctttgcgcaggcaggtaacgcgttccagtcaataccgccgtcggtggtgtatttcgccaatgcatttcagattggtccaggcgtgaccatggtcctgggcgcgtatctgctgcgattcatcctccggcgtatcccgattatcggttga

SEQ ID NO: 324726 - DNA, 1293 bp, Pseudomonas aeruginosa
atgcgcaggttgttattgttgttggtgctagtttcttcttctgtaagtgcggaagagtattattggtacatgggttattttgataagaaagtttcgtcgccctcggcgggttgcgatctttatttcactggtatatctcgcgatccagggcgggtttttgttatggagccttcgtcaaatccaagtgaggcgggcaaggttttctattgtgtggttcgttctggtgattgggttctttttaatacgactgtttatttgaagggggataagtgtcctgaaggcagtgatcttgatctgactacgggtgtcgccatgtgtaagcctccggagccggaaaagccgaatgactgcattgaaggattgtatgacttgttcagtagtccgccgtctccagttgttcaggttggcggcaggaatcaagttataagtagtccgccggcaggctgtaagaacgggtgcgcttattctgcggattcatcgaagactacgagttgttatttcgtcactggctcgacgaatgaggggttctgcaattactcgcttcgaagtactggcgccacgtgtccagccgacactaacaaccctggaatgaccgggccgtcgctgaacagtactccgccgactgacccgaatgaaccgccgtctgatccgaacgaccctggctgtccggctgggtatagctggtccggcacgacgtgcgtcaagacgccgactgaccccactgacccgacgaatccgggtgatggtggtggcgatgggggaaccggtggtggcggcactggcggtggtggtgatggtggcagcgatggcggtacgggtggcggcggtgatggcggtaccggtggcggtggcggtggcgatggtggcggcacgcctggaacgggtggtggcggcgatggtgatggcggtgggacgggtggcggcactggtggcggtgacggctcaggggagggcggtggtaccggtggcggcactggcctggaaggtggctgtaaggacgatagttgcgcgttcgtgaagaacaacccgtttggcacggacaaggttccgggctttgacgagtcgctgcaaaaggcttggacggatatcaagaaagccccgattggtcaggccctgggcaagatcacgtttccgaccgggggaagttgtccagttcagagcgttgaactgttcgggaagagtgtgatgttcgattcgcactgctccttgtgggctcagattgagccgatcttgaaagccgtgttcttggcgttttgggcgctgctgtctgttcgcgtgttcctgtctgcgtga

SEQ ID NO: 324727 - DNA, 231 bp, Pseudomonas aeruginosa
atgaaaaacctgaaaaaactgttcgttcgtggtggttccgccgttgcagtaggcgctgccctggtcgtctcgcaatccgcctcggccgctggctgggactacagctcgctgacctctgatgtcgatttctcgaccatcgcgaccggcgtcctggccgtcgctgcgctgctggccactgtgtatgccggcatcaagggcgctcgcatggtcctgggcttcctgcggagctga

SEQ ID NO: 324728 - DNA, 261 bp, Pseudomonas aeruginosa
atgcttgtcaaactccccgatgaatcccccgacttcgtagagaaactcaaggaacagaccggtgcgaccacggctgccggtgcctatcggttcgccgctgagcggtacgggtcgctgacctatcagctcaagcaagccatggacgaactggcgaggttgcagacccggtgcaacgtccagcagcagatcatcgacaacgcccgcgcttctgcctcttcgctgcttgaccacgtcgcccagggcgatcttctgcaaagctga

SEQ ID NO: 324729 - DNA, 207 bp, Pseudomonas aeruginosa
atgagacgagacatgcctacgaacatccgactgacccaagcagaacaagaggcgctgcggaaaaaagccgtcgaaatcaacaaggaactggtcaagaggggcatgcagccgatgaaggactcagagctggttcatgccttcctggagcgcgtcattacgtcgctggaggtcggagcctcgggcgcgattgtccagcgcgaagactga

SEQ ID NO: 324730 - DNA, 1401 bp, Pseudomonas aeruginosa
atgcatccgatgctcgaccgaatccacatgttcatccgcttccgcccggagcacgtccagatgatcggcaagcccgagtccccgaccctggtcgttgacctggagtcgttgggggtgcgcatgcggtcttcgggcggcgtgctcaggcgtgaggacggggaggggtacgacgtggaggggctttcccatgcctgggagtcgctgccgtcgagctacacgcccatggccttcaaggtgttccatcagtccctgggcaagcgccttgatcctggtgtggagctgaaagcgtctccggccaagctgctccaggggcacaacgtcttcgggccgacctcaatccgcatgggggctgaggtcatgttgaagtggctggctggcacctatccggacctgtattcgaagctcgatgtgctgtcgattgaggtctacgccctggactgcacgttctcggcacgcatgccgaatgaacagaccgccctccaggtcatccagttcatgcgcggggtcagcaatggccagacccgcaaccggggtgacgactacgagaccacggcctactggggttcgaaagaggggcgtctgcgcaagatcaaggcgtatctgaaggggccagagttccggcgtcagttggacgaaattctcaaggctgctcgcggtgccacggtcgatccggaaccgcgccaggacctggataacgctcatgtccgcgcctggaagctgcacaagcgcgagcgccacatgcccatgtcgagcctttctgctgcgcggacgctgcgggtcatgcaggaccctcggctccaggagttcgcgcggcttcttcttcgcctcgaggcgaccgtcatgcatcgctggttggagcggcggaatctgccgacgaacctgtgggagctatgtgactaccaggaggcgcttcgtgaccaggagcgctgtttcattcaggagtgttggagagcggtaactgctgagctgttcgcggcctttgagggtatgaccatgaagcgaatcgacgatgacaaagtgctggccgcactgatcgagaagtacacgaaagtagggaagggcaggtggaccaaggcccgcgccgacaaggcaacgggagcgatcatccctgctgtgttcgtgccgggcaagcccagcgatgcctacgcccggaacctgttccgtacatatcgcagccttaaggactacgggtgggaagagaccatggcgtcgatgaatcgcgccagtttctacaaccacgtgcgtgacctacaggcggccggcatttccaaggcgatgctccagaacctgagtgagtacgacaacacccgcaacgtggtgccgatcctgcggttgctggaggtggatttctcggcgcagtaccccgactggtacgtcgagccgaccgtggaggccgcgtga

SEQ ID NO: 324731 - DNA, 189 bp, Pseudomonas aeruginosa
atgttctccattgcctatcgccagggctttcagcaggcccggcgtgggggatatgccaatccctatccggtgggtaccgcacagcacaacgacttcgaacaaggctactggcaggcccgcaagcgcggtatcgagccgctttctcgcatggcggcggcgctgctggcagcgcggagggcgcgcaagtga

SEQ ID NO: 324732 - DNA, 345 bp, Pseudomonas aeruginosa
atgctcgctctcatcggcctgtgccagggctattactccgatactcgcaacgtcaataccgccaacggtccttcgcagattgttgaacactcggtgctcgtccaggttgagcaaaccaataagttcggcatgccggaaaccaaggttgtccaggtccgtatttcgaaacggcatatggatggcgggctcaataatgtctggaagatggagaagggcaagacggtgtccgtcccggtatttatccaggcctgggcgagtaagtccggtaacgccggattcgattattggctgtcgggcgacggcatgccgttgaaacttcaaaccgttcaggagaaagccgcttaa

SEQ ID NO: 324733 - DNA, 930 bp, Pseudomonas aeruginosa
atgctcttcgttggcagccgcgaccaggcccacatcgcgacccgcctcgaatgtcacgtcgcgacgagcgtcgatgcggctgcccacgacgctgatatcgcgtccggcgctgacgctgatatcgcgccccgccacgacttcggcgcccatctgggtcgtctgggtctggtatgcctggcttcctgccgtccagccccgctccgctaccgcagccgaaaccaggacatccctgccgccttgcaaggcgaggtcgcccttgctgtcgatgacaccgccaatattggttacatcgcgacctgccgaaacggtcagcttctgcgcagcctcgatacgcgcggcgctatcggcaaatgcctcagtggtaccggttcccctgtaggaggactggtgctgggtcaccgtccgttcattgataacgtctccggtaagggcggagaggcttacctcgcgcccggcaatgatgccgccctggtcattgcggatggagccgctggccagcaggtcgaggcggttgccggcctcgatcaggccgctgttgtcgatgttgccggctgtcgcgctgaggtcgttctgcgcgcgcagggtaccggcgttcctcaggtccccgccggtgatcaggttcacgtcgcgcccctggatcagcgcgccgttcgggcccaaccgcccctcggcctgggccaggtagaccacgggggcgaggaccttctcgccattcacctcgacttcttccagccaaacgatgtcgtgggtcagcgcggccacctgggcggcgctgagggtgacgccaggggtcagtcccaatacgtccttgctggcgatggcgttgtccatcagatagcggaacatcgcttcgtcgctgttcaatccggcgatgaagcgctgccccgtacgctggacgatcgcttcgcgtaccaggcgctgctcgtatag

SEQ ID NO: 324734 - DNA, 714 bp, Pseudomonas aeruginosa
atgtcacaagttgcagtcatccaacaaggcccggtcctggcgatgagcagccgcgagattgcggcgctggtcgagtcccgacacgacaacgtgaagaggaccatcgagcgcctcggcgagaagggggtcatcaggtttactccatcggaggaaacctcccacgctggcgctggggcgcggcccgtgagcgtttacctcgtcgacaagcgcgacagcttcgttgttgttgcccagctcagcccggaattcactgcgcgcctggtggaccgctggcaggagttggagtctcagctagcgcatggtgtgcccgccgtccctacgaatctggcggatgcactgaggctggctgctgatcaggtcgagaagaatcaggcgctgcagttggtcatcagcgagcaggcgcctaaggtccaggccctggagcggctcagcggtgcggccggcacgatgtgcataaccgacgcagcgaagcacctcaagatcaaccccgcccggctcttcgactggctccagcagaaccgatggatctaccgccggagcggctctgctcgctggatcggctatcagccacgaatccaggacggctggatcatgcacaaggtgacggttctcggtcgtgacgatcagggcgacgagcgtgcggcgagccaggtacgcatcactgccaaggggctgtcggtgctggcgcggaagatcgaggagggcaagctgtga

SEQ ID NO: 324735 - DNA, 762 bp, Pseudomonas aeruginosa
atggttcaagacatgcagacaatccgcgcagcgttcatcgcccgcctgaaggaggccgcatctgatgcaggctttcaggagtggggcctcggcgctcgactggcaaaaatcacaaagcgcacaccgaaagctgtcagcaagtggatgaacttggagagcatgcccgagcgcgatgccatgctgtcgatcgccgatgcgttcggcgtgcgcgttgactggcttgagcatggacagggcgaaaagaacagccggtacatgacgtccaatcggacagaagacgcggtgcgcaacctggttgcggagcgggctggcgattatggcaacgtgcaacccaccgctcagccctcaaggaagaagaaggggtatccattgatcagttgggtagctgctggcgcatgggcggaaagccatgacaacttccaacccggcgatgctgaggagtggattgagtccgaagcgaaggccggcgagaacggctactggcttgaagtccatggcgactcgatgctgccctcattccccgaagggactaggattctcgtccagccagagggttttgatttggtaagtgggaagttctatgtcgccctcctgtatgagccggggaaacagcgcgagactaccttcaagcaatacgtgcgggacgcagggcgcgagtacctgatgcctctgaacaaggactacaagcccctgcaggttaccgagaacgttcgagtaatcgggcgagtcattgacctgaagcctccaaaatccctcctctga

SEQ ID NO: 324736 - DNA, 207 bp, Pseudomonas aeruginosa
atgaatgaaaaggcctcactagcgttacgccagtctcttcgaatcactcgcagggagaacgacgtacaccgagcgcgcatcgagtactacgaaacggtcggaatgctgcgcggattgcactacggcggagcgatcgactcctggcagctattagctctaaccgagctagcaggaagcgcatacatcaacgccggtaaaccctggtaa

SEQ ID NO: 324737 - DNA, 309 bp, Pseudomonas aeruginosa; identical to SEQ ID NO: 323887

SEQ ID NO: 324738 - DNA, 1281 bp, Pseudomonas aeruginosa
atgctctatctgcgcaccggtctgccaggtgctggcaagactttgaacgcgattcgggaaatcgacattgaacatcagccggacccggatgacccgaccaagcggctgcacaaggacccggacaatccggacctgccgcccaggacgatctactactacggcatcccggatatgaagctggatcggctcaagtcgaagtgggtcgagttcgatacgcccgaagcgtggtacaacctgcctgatggctcggtgatcgtgatcgacgaagcgcaacgggtgttcggtaacgatggctccagggcgcgcccggagaaagtcacgcgcttcgagacgcaccggcaccagggcctggacattcacttgatcactcagcatcccagcttgctgtgcacgccagtgcgcaagcttgtcggcaagcacatcaacttcattcggccctatggccgggagaaaggcatcttccggcatgagtacgagttctgcatcgacaacccggagcggcgcagcaacttcaagcaggcccaggaagagcgggtcacgctggataaggcgtatttcggcgtctacaagtcgtctacggtgcacacgcacaagccgatcacgcccagctacatgaagaagatcccgctgatcatcgcgctgatgttgattccgatcggtgtgcttgttgggctggtcgtgaccgccatgcaacagggtgatgaggagaaagaggcggctcttgcgaggagtcatgcggctgaggcgtcagcgggtgttctgcctggggctggaaatgctgttcaggcagcccccagggcctccagtgggccgaaatcggccgatgagttcatcggtgatatgtcgcccagggtgcccgatctggtggcctcggcgccgcgctatgacgatctgaacaagcccagggatttccctcggccggtgtgtgcggccagctcggacccgaacttgatcagcaaggctcctgagcggcgaattccgatgggcacgtacaatggccgggtgatggtctgccagtgctacacgcaacaggtcacgcggatgcacacgacgttcgagttctgcatggacgtggtgaacaacggctatttcgacgacacgcggatgccaccgacttatgccagcggcaacagcacgcgaggcttgatcacaagtccgtcagttgacccggcgacggcgattgagcgagggcgcgcagcgacatcgccgacgccgggggatgcgttctcgacacgagtaaccatcgtgccggatagcagcaggacgcccaggacgctatga

SEQ ID NO: 324739 - DNA, 312 bp, Pseudomonas aeruginosa
atgccgttactgatcggggtactactgcgggccatcggctggtcgctgatcccgctgggttggaagctgctgcgcggcttgggattcaccgctgttgccttcgtcggcgtcaaggcggtgatggatcaggccaaggactacgtattcagcaacctgggtggcgtgcctgcgcagtggcttcaggtcctggggcttctgcaagtggacgtgtgcatcaacatcctgttctccgcgtacatcgcccgcgccgtgctgtgggggatggacaagtctggcggcaagtccggcatgcgctggaccgggccgaagtaa

SEQ ID NO: 324740 - DNA, 402 bp, Pseudomonas aeruginosa
gtggcgattcagtgcaacggcgacgcaatccagtgcgccattgttcgccaggaaaagctcgcacgctgcgcggatgaagagttccgtacggtcgatgacaagaagattcaggacctgaagaacacgctggccggtgagttctccgggcctgagtacgaacccatcaaggccaccggcgagaacacccatgacctgtcgaagctgctcgacactagcgggcgcttctccaaggcctgcccggttattcctgacgtctcgttcccctggttcggcagtactcagacggtgtcgctcagtagcgtgtcgtccgatctgtgcacgtatctccagtggtttgggtatctgcttgtcgcgttcgctatgcgctccgcggctgaaatcattgcgcgagggttgaactga

SEQ ID NO: 324741 - DNA, 657 bp, Pseudomonas aeruginosa
atgtccgataccgatgtccgtggcctgcaggatcttcccctggaagaactggttgcttgccatgagtgtgatctgttgatgcgccgggaacccctgggaccgggcgagaaagccaattgtccgcgctgcggtttcgagttggccgcgcatcgccatcaatggaaacgccgttgcttcgcgctggttctgacggcgctatttctctatatcccagccaatttcctgccgatcatgaatctcagcctgctcggccagacccgcagcgatacggtctggacgggagtgctcggtctttacgacagtggcatgcagggcgtcgccatcctggtattcctgtgcagcatggtgatcccgttggtcaagttgctctgccagttgctggtgatgatcagcgtgcgtttcggtatcgcccgtcacatcggcatgctgctctaccgcggctatcaccatctgcgcgagtgggggatgctcgaggtctacctcatgggtatcctggtttccatcgtcaagctgatcgacatggccgacctcagcctgggcatcggcctggcctgtttcgtggcgctgctgttcacccaggtctggctggaggtcaccatgtcgccgcaccaggtatgggaagcgctgggcggcgaggacgacgatgcgcgcgcttga

SEQ ID NO: 324742 - DNA, 621 bp, Pseudomonas aeruginosa
atgcgcgcgcttgatgccggaatcctggtgtgcggcgagtgccaccagttgaatcgcgccgacggggacgagcatccgcgttgcagccgctgcggtgcggtgctgcacgcccggcgcccaaacagcctcacgcgcacctgggcgttgctgatcaccgcggcgatcctctacatacccgccaacctgttgccgatcatgacggtcaacctcttcggcagcggaatgcccgccaccatcatggagggcgtggtcgaactggtgcatgccgacatgttccccatcgccatggtggtgttcgtcgccagtatcctggttcctactttcaagctggtgggcatcgccctgctgctctattcggtacagcggcaccagccgatgtcggcccgccagcgtatcctgatgtatcgcttcatcgaatggatcgggcgctggtcgatgctcgatatcttcgtcatcgccatcctcgtggcgctggtgaatttcggcaacctggcgagcatcgaggccaacctcggcgccgccgccttcgccagcgtggtggtgctcaccatgctcgccgctgtgacgttcgacccccggctgatctgggacaacaccaatctggatgacgagaatgagtga

SEQ ID NO: 324743 - DNA, 222 bp, Pseudomonas aeruginosa
atgagagttcacgagaaattcagcaagaagggggcgaggccgctggagtgcgtacaaccaactgttcgcactatcgccggcgccgtacatccagtcgcggttgagttcttccagacgagcgattcctgcgatggccgcaccctcactgcattcatgacgccgcaagaggcgatgaagttggccctgcatctgctgcacgtcgtgcagggcgctatgcgctaa

SEQ ID NO: 324744 - DNA, 279 bp, Pseudomonas aeruginosa
atgaaccagatttcaatcgtgggctacgaaagcgactgcaattgcgagcactgtggtcgcgccctgaaacatggagttcgccttagcgatgggcgattggttggggccacctgcctcgacaagaagctgacaaagccgcgccagtacaaaggcaagtcgttccgctttggcgccgagcacatcatcaaaattgccaaagtcgttcagttctactcgccgtccaattgggcgcgctttggtgtttccgcatcgagcacaacttttgaaggtatcgcatga

SEQ ID NO: 324745 - DNA, 168 bp, Pseudomonas aeruginosa
atgaacgcatacaaggcaggtgacaaagcctgctacctcggtcgagcacgcgccactgtactgggcaagacatcgcgcggctaccgcatcgaatactggggccagggtgcccgcgatggcgaactgatccgcgcaactgttccggcgcgcgacctgatgccgatttga

SEQ ID NO: 324746 - DNA, 207 bp, Pseudomonas aeruginosa
atggctcaattcaatgtcgatgcgcacctgagcaacggcaagcgcctggactggattgccctgccggaaggcaacgagacaccggatgacgtgctgatcaaggtacgccaggccgccatgaagaagttcggcgacctcatctggttcaaccgatgggaccacgttgttgccagcaacggctacatcaccgtgcggatgcacgcgtga

SEQ ID NO: 324747 - DNA, 372 bp, Pseudomonas aeruginosa
atgcacgatgagtcagcgatgagtgacgtaaccatggcgataggcgagaacatacggaaagccagagagcgcaagggcctgaggcaagagcaagtcgctgaaatggcaggcattcccctgtctacatacaagaactatgagcatggcaaacagccaccacccggcgaccggataggagccatcgcacgaaccctcggggtatcagctgatgaacttgtgttcgaagagagcgagcgccaagttgctgacgagctacgagccctattcaagagattcgaagtacttccgccagacctgaaaacccaagccaaagtggcaattcggggcctgctaatgagctatgaagtcgaggccctcaagcacgaggggtag

SEQ ID NO: 324748 - DNA, 1083 bp, Pseudomonas aeruginosa
gtggatacgctcgacgaagcggttgaaggaaatggccaggaccccgaattcatcgttgctggtgactttcaggcgcttggtcaggtcgccttcgccctgggcgatgtcctgcatggcgcggcccatgtcggtgagcggttgcatcagtacgcggatcagcatgccgaggaggaggacgatggcgaccaccgcgatcagcgcggcgacgatcgccgaggtacgcagcttggtgagcatggcataggccttgtccttgtccaccgagatgccgatgtaccagtccaggccggacaggcccttgaccggagagaaactgaggatccgggtgttgccgtgcagctcggcctcgctgaagccgctgccgatcttcggcgtgttgcgtgggtagacgtcgctgaggctcttcatgacctggtccttgtccggatggacgaggatcttgccgtcgccgctgaccaggaaggcgtagcccatgccgccgaagtccagcgagttgatgatcttcaccaccgtctgcaggctgaggtcgccgccgaccacgccgaacggctggccgccctggcgcgccgggctggcgatggtcagtaccagctcgtggatggccggctccatgtagggttcggtgagggtggtctggccggcgctggtggcggcgttgtaccaggggcggcggcgcgggtcgtagtcggccggcaggtcgctggtggggcgcgcggtgtaggtgccgtcggtctgccccaggtaggtgaagaggaaggtcgagcccagcagcggctgttccagcagggcctgggtggtctccgggctgtggtcgcgggccagggtctgggccaggttctcgatcagcaggatgcgcccgctcagccagttctgcacgttgctggcggtgatctcgcccatttcgtgcaggtagtcctccaggtcctcgcggatcgaggtgcgctgcagggagtcgttgtagagggtgaagagggagaaggtcgcgatcaccaccagcgcggcggcgagcaggatcttgtgactgaacttgagacttttgatcatggtttcttgcatccgggaggcgcgggcgcgctgtcgtga

SEQ ID NO: 324749 - DNA, 264 bp, Pseudomonas aeruginosa
gtgaaaaagcgttttaccgaagagcagattctcgacttcctcaagcaggcggaggccggtgtgccggtgaagaaactgtgtcgccgacacggcttcagtgatgcctcgttctacacctggcgggccaagtttggcggtatgaccgtggcggacgccaaacggttgaaggatattgaactggaaaacagccgattgaagaagtggctcgccgaggcccacctcgacatcgagtcgctgaaagtggtcgcccggggaaaagggtaa

SEQ ID NO: 324750 - DNA, 177 bp, Pseudomonas aeruginosa
gtggcaccggcctcggcggtgccgctgatgacgacgccgttgctcgggttgatcaccggcgccggcggcgcgctggaatcgacggtcaccgtcgccggcgggctgctgttaccggcggcgtcctgggccaccacgttgaccacagtaccgttggcgatcggcgtggacggggtgtag

SEQ ID NO: 324751 - DNA, 519 bp, Pseudomonas aeruginosa
atgccgatggacccggccggcggtccctacgcctggcggccggagctgacccaggaagagcgtgcgcggcggctggacgcggcgctggccaaggtgccgttcgtgcaaggcctgaacaaccacgagggcagccgcatgaccgcggtgcgcccggcgatggcctggctcgccgaggaactccagcgtcgcggcctgtacctggtcgacagccgcaccagcgccgccaccgtggccgccagcgaggcgcagcggatcggcctggcgagcgtctcgcgcgatgtgttcctcgacaacgaagccacaccggaagcggtctccgcacaactgcaggccggcgtcgccctggcccgcaagcagggttcggcgttgctcatcggccacccgcacaaggccaccctcgacgtgctggcgcgggagctgccgaagctgcgcgcccagggcatcgagctggtaccgccgcagatgctcatcggcgagcgcggcaaccgcaacgtcaacccacgccaggcgccgcactga

SEQ ID NO: 324752 - DNA, 231 bp, Pseudomonas aeruginosa
atgaaacaactgaaacaactgttctccctgggcaagcgtgaagccgttatcggtggctcgttgctgatgacgtccggcctttcgatggccgctgagggcgatatcgacactaccaaggccctggcctatatcgcgggcggcctgactgcggcggcggctgtgaccggtgccatgttcggcctggtggccctgatcggtgccgccaagaaagcccagcgcgcagggacctaa

SEQ ID NO: 324753 - DNA, 339 bp, Pseudomonas aeruginosa
atgctgatcaaacttcccgactttgacgacgatctggccgagcggctgaagagtcgtactggccagaacactggctccaaggctgtgctgcgtgctgctgaggagtatttgcctcttctgctgaagctggaacatcgcgaccggcagattgccgagcttgaagagcggttgcgagtggcaagccaggtgatcgagggcgctcgctcggctgctgcgctgctgcttgaaaagaccgctcagggcgatctgctcgccgctccggcatcgagcaagccgcgcatgaccggtgaagagatgttgaacgaactgcgccgcagtgcgggcttgcgtcagcgttga

SEQ ID NO: 324754 - DNA, 375 bp, Pseudomonas aeruginosa
ttgaacgacaccacagacagcactctgcgagacgacatgaacatcccacagaccttgaggaccgccagaaagaacagggggttgacgcaacgagaagtggccgagcttgtgggggtatctatcgaggcctacaagggctgggagggtggaagacaccaccccagatcggaaaacgtcgcaccccttgcccaggcgctaggaatatccaccgacgaactgatgatggaagcccagcagcgctcaatatcggaagacctcagagcgctattcaacgccgccgacaagctgccggacgacaagaagcggcaactcagaacggcaatcaaagggatgttgctggccatcagccaagagcagctagacgagggggagtag

SEQ ID NO: 324755 - DNA, 1668 bp, Pseudomonas aeruginosa
atgctgggaaccatcctcctgatcaacctggccggtgccgtggccctcctgttgtggggcacgcacatggtctccagcggcgtgctgcgcggtttcggcactgtgctgcgcaactggctcggccgccacctgggcaaccgctggctggccctgctcgccgggctcggcatcaccggcctgctgcagagcagcaccgccaccagcctgatggcagcgtccttcactgccagtggcaccctgggcctggcgccggcgctggcagtgatgctcggcgccaacgtcggcaccaccctggtggtgcaactgctcagcttcgacacctcgttgctggcgccgctggccctgctgtccggcctgctgctgttccgcctgggcgacggtccacgcctggagagccttggccagtgcctgatcggactcggcctgatgctcctggcgctggcgttgctcggccattccctgcagcagatcgaggcctcgccagcctttgtcgcggtgatccacggcctcgaaggcgatccgctgatcgccctgctgctcgccgcgctgctgacctgggcctgccattccagtgtcgcggtggtactgctggtggcgtccctggcccaggccggactggtctcgctgcccatcgccctggccctggtgctcggtgccaacctcggcggcgccttgccggcgttgggggtggccggtagccgggtggcgcggcgcctgccgttgggcaacctgctggtgcgcctgctcggttgcctgctggtgctgccctggctgacggcgctggcgcagccggccaacgcactcggcggtgcggcggcggtctggttccacagtgctttcaacctggccctggcactgctggcgatcggcttcaccggcccccttgcggcgctgctcgcgcgcctgttgccggaagaggcacagtccgacgacccgggcatgccgcgctacctcgacgaagccgggctggaggtggccaacatcggcctggccaacgctactcgcgaagtcctgcggctggccgacatggccagtctgatgctgcgcgccaccagcggcctgttgcagcgaccggaggcgaaggtggcggcggaaatccgtcgccaggaccaggccctcgaccagttgagtgcggcgatccgcgcctacctggcagacctcggccaggacggcctcggcgacagcgacgccgatcgtgcccaggaaatccttctgttcgccatcaacatcgagcacatcggcgatctcgtcgccaacagcctgctgcccctggcgatgcgctgggccgggcgcagccgcgccggcagcgagttcgagctgggccgcatgctgccgttgcaggcggcgatcgaggagagcctgcacctggcgatcagcgcgttccttcgcgaagacctggacgccgcgctgcgcctggtggcgcgcaagaagttgctgcagcgactggaggccgatgccagtcgcgagcgcttccgtcgcctgcgcgacgatcgcggtgcctgggtggagtccggtgacgtgttccagcgcattctccgcgactaccgacgcatccaccatcatgtcaccaccctggcctatccgctgctcgaacgcagcggcatcgatccgatggcgaagcggccggacgagccaggacaaggggagggatcggcatgcgcctcctga

SEQ ID NO: 324756 - DNA, 1437 bp, Pseudomonas aeruginosa
atgcccgtggccttcgtcgtcgacgacatccgccgctgccatccggctgaaatacgtggaagcgccccacagcgcgcggtgcggggcgttttttttaacggcggccacgggcatactaggccggtccaattcccaggtgcccgccaccccatgctccgcctccttcctctcctgctatccctcgcctgtctcgctccggccttcgccgacgagcgcgccgacacccaacgccagctggaacagacgcagaaggacatcggcgagctgaagaagctgctggacggcatccagcaggaaaagagcggcgtgcagaagcagctgaagtccaccgagaccgagatgggcgacctggaaaaacagatcaaggccctgcaggacgagctggacaagagcgaagccgagctgaaacggctggatggggagaaaaaaaaactccaggacgcgcgcattgagcagcagcgcctcctcgccatccaggcccgcgcggcctaccagagtggacgcgaggaatacctgaagctgctgctgaaccaggaacacccggaaaaattcagccgcaccctcacctactacgactacatcaacaaagcccgtctcgaacagctcgccagcttcaacgaaaccctccgccagctggccaacgtcgagcaggacatctctgcgcagaaagccgaacaactgagcaagcaaggcgagctggacagccgccgcgaggcgctggcagcgacccgcaaggagcgccagcaagccctggccaagctgaacagcgactaccgcgaacgcgaccagaagctcaagtcccgccaacaggaccaggccgagctggccaaggtactgcggaccatcgaggaaaccctggcccgccaggcccgcgaagccgccgccgcggcggagcgcgagcgccagcgcgcgctggccgccgaacgcgagcgtgcgcgccagcagcaggccgcccccggacgagtcaccagcccgccgcgcgaacctgcgccgggcccgctggtctcaagcactggcgcggtctacggcggcgcgttcggctcggcccgcggcaagctgccgtggccggtgaatggccgcgtcgtggcgcgcttcggcagccagcgcggcgacgatccgcgggcgaaatgggacggcgtactgatttcggcgagcgccggcagcaccgtccgcgcggtgcacggcggacgcgtggtattcgccgactggttgcgcggagccggcctgttggtcatcctcgaccacggtggcggctacctcagcctttatggccataatcaaagcctgctgaaagacgccggcgacaccgtgaaggccggagacccgatcgccaccgttggaaccagcggcggccagagtagcccggccgtgtacttcgccattcgccatcagggccgcccggcggaccctactacctggtgccgcgcacagggatag

SEQ ID NO: 324757 - DNA, 774 bp, Pseudomonas aeruginosa
atgtcggcgttccgcgttgccctgctgggcctgtgcctgctgttcaaccaggcccaggcccgccaggaccccgtcccctaccagcgcccgccgctgctgaccgtggtcatcgatgacctcgggcagaacctggcacgcgaccgccgggttctcgacctgccccccggcgtaaccctggcgatcatcccggaaaccccgcatgccgccgaactggcccgcgaggcgcaccagcgcgggcgcacggtgatcctgcacatgccgatggacccggccggcggtccctacgcctggcggccggagctgacccaggaagagcgtgcgcggcggctggacgcggcgctggccaaggtgccgttcgtgcaaggcctgaacaaccacgagggcagccgcatgaccgcggtgcgcccggcgatggcctggctcgccgaggaactccagcgtcgcggcctgtacctggtcgacagccgcaccagcgccgccaccgtggccgccagcgaggcgcagcggatcggcctggcgagcgtctcgcgcgatgtgttcctcgacaacgaagccacaccggaagcggtctccgcacaactgcaggccggcgtcgccctggcccgcaagcagggttcggcgttgctcattggccacccgcacaaggccaccctcgacgtgctggcgcgggagctgccgaagctgcgcgcccagggcatcgagctggtaccgccgcagatgctcatcggcgagcgcggcaaccgcaacgtcaacccacgccaggcgccgcactga

SEQ ID NO: 324758 - DNA, 1059 bp, Pseudomonas aeruginosa
atgaccggcaccaagcccacaacgcccgtagcccgctatttccaccaagaggcgcaacggcgcggctatgtgctggacgcagcccagggcaatgccattcttcatctcgatcgattggcggagcgcttgcgtcgaggtccgtcgctattccggcaagcgccgcgcagcctctacctgtgggggccggtcgggcgcggcaagagctggctgatggatggcttctttcgcagcgccgatttgcagggcctgcgccggacgcatttccatgcgttctttcgccggcttcatgacggtatgttccgccgccaggggcggcccgatgccctgggcggtgcgctcgacgaactgctaggagactgccggctgctttgcttcgacgaattccatgtccacgacattggcgacgcgatgctgataacacgcctgttcagggagctgttccgcaggaagatcaccctggtctgcacctccaactacgcgccgcggcaactgctgcccaatccgctctaccacgaacgcttcctgccggcgatccggttgatcgagacgcgcatggaagtgctggaagtagccggcgcccgggactaccggacgatttcgccgcggcaggagatcgcttccggttatgccagcggcgggtattgctggccagcctcatgcgcttgcctggacgagctgggcttgtccgcgcccgagccctcgcaacgcgtgaccctgcaaagcggcgcgaggacgttgcaggcgcgcgcggtgtgcggcgacctggtgtggttcgccttcgccgacctttgcgaggcgccaaccgcggtgatggactaccttgccctcggcgaacgcttctctacctgggtgctggagggcgtaccgccgatggcgcgctgttcggtcgccgcccagcagcgcttcatcaatctcgtcgacgtcctttacgacaatgaccggcgttttttcctgagtgccgaaaaggcgctgccggacctggtcgagggcagcgacctgcctgcggacatgcagcgtaccgccagtcggctggcgcagttgcgccagcttcgctgttga

SEQ ID NO: 324759 - DNA, 1443 bp, Pseudomonas aeruginosa
atgaccgtgaacgcgagtattttttggtacgactacgaaaccaccggcatcgaccctcgccgcgaccggccgttgcagatcgccgggatccgcacggacgaggcgctgaacgagatcggcgagccgatgaacctgtattgccgtcccagcgacgatatcctgccccaccctatggcttgcctgatcaccggcatcactccccagcggctggccgagcgggggctgtccgaggccgacttcatgacccgggtatacgcccaactggcgcagccggcgacctgcgtggccggctacaactccctgcgcttcgacgacgaagtgacgcgctacagcctgtaccgcaacttcttcgatccctacgcccgcgagtggcaaggcggcaatagccgctgggacctgatcgacatggtccgtaccgcctatgccctgcgcccggagggcatccagtggccgcagctggacggccggctgtcgctgaagctggaaatgctcaccgcggcgaacggcctggagcatgggcaggcccacgacgcgctttccgatgtccgcgccaccattgccctggcccgcctgatccgtcagcgccagccgcgcctgtacgattacctctaccagttgcgcagcaagcacaaggtgctcgaccaggtgcgcctgctgcagccgctggtgcatgtctccggacgcttttccgcggagcgccatttcctctcggtggtcctgccgctggcctggcacccgcgcaaccgcaatgctctgatcgtctgcgacctctgcgccgatcccgcgccgctgctggagttgtcggccgaagacttgcgcaggcgcctgtatacccgtcgcgacgaactggccgagggcgagttgccggtgccgctgaagcagatccaggtcaaccgttgcccggtggtggcgccgctgtcggtattgcgcgccgaggatcgccagcgaaccggcatcgaactcgatgagtgccagcaaaaagccgagctgttgcgccagcatcaaaccgtctgggcggacaaactgacagcgctatatggcgaagaaagtttctccgccagcgacgaccccgagcaacagttgtatgacggatttattggcgatcgggatcgacgcctttgtgaacagctgcgccttgccgaaccggagcaattggccaaagaacaatggcccttcgacgatgcccgtttgcaggagttgttcttccgctatcgtgcgcgaaatttcccggaaactttaaatgcagccgagcgccaacaatgggaaagcttctgccgcaatcgtttgtcccatgaagaatacggcgcaccgaatactttgccggccttcgaggcggcgctggaggcttgtcggcaagagcagggcggcacattgccggcggtacttgcggcctggcgcgattacgccgcggaactgcgtcaacgctattcgctggagacttga

SEQ ID NO: 324760 - DNA, 375 bp, Pseudomonas aeruginosa
atgtccctgatcaacgaatatcgcgccacggaagaagccatcaaggaacttcaggagcgcctgaagtccctggaacaagacgacaaactgaaaaaagaactggaattcgaagagaagctgcgcacgctgatgggcacttaccagaagtccctgcgtgacgtgatttccctgctcgatccggacgccaagatcggcaagagcacccgcaccgccaaggcgcctgccggcaagcgcgcgcgcaaggtcaagcagtacaagaacccgcacaccggcgaagtcatcgagaccaagggcggcaaccacaagactttgaaagagtggaaagccaagtggggccccgaggccgtcgagagctgggccaccctgctcggctaa

SEQ ID NO: 324761 - DNA, 852 bp, Pseudomonas aeruginosa
atgcgcacttttcggctggtgatcgcctgtcccgacggggtcgggatcgttgccaaggtgagtaacttcctggccacctacaatggctggatcaccgaagccagccatcattccgacaacgataacggctggttcttcatgcgccacgagatccgtgccgactctctgccgttcgacctggatggcttccgccaggctttcgccccgatcgcccgcgaattctccatggaatggcgaatcaccgattccgaggtgaagaagcgcgtggtgctgatggccagcaaggagtcccattgcctggccgatctgctgcaccgctggcacagcggcgaactggactgcgagattccctgcgtgatcgccaaccacgacgacctgcgcagcatggtcgagtggcacggcatcccgtatttccacgttcccgtcgatccgcaggacaagcagccggccttcgatgaagtttcccggctgatcgacgaacatggcgccgactgcatcgtcctggctcgctacatgcagatcctgccgccggacctgtgccgcaagtacgcccaccaggtgatcaacatccaccacagcttcctgccgtccttcatcggcgccaagccgtatcaccaggcgtcgaagcgcggggtcaagctgatcggcgcgaccagccattacgtgaccgaggaactggatgccggtccgatcatcgagcaggacgtggtgcgggtcactcaccgcgacaacgtcgaagacatggtgcggctgggcaaggatgtggaaaaactggtgctcgcgcgcggactgcgctatcacctggaagaccgcgtactggtacacggcaacaagacggtggtgttcgactga

SEQ ID NO: 324762 - DNA, 213 bp, Pseudomonas aeruginosa
atgagcgatcccaggtcggcgggcaccgccagcccgccaccgaccctcggcgagggttgcacaagccgttacgacatcgacgccctcggcgacgaggacggaaccgagtttcccggcgcggccgaactctggcggcgtatccaggagagcgccagcgagacgggcgaggctgacgccgaggatacgctcaggaagaagcctcgcgactgctga

SEQ ID NO: 324763 - DNA, 1002 bp, Pseudomonas aeruginosa
atgagtcgaggctggttactgctgttcggtttgatcggtgcctcgctgattccgctggtgctcggcggcagcgacatgttcccgcgcttgcgcgccttcccgctggacagtctgctgctgatgttcggcatgatcgtggtctgctggttcatcaacggcctgcgcctgcgcctgctgctcgccgggcgcgccggcaagctcgggcaattgcagagcgtcggcatcatcatggccagcgaattcgctttctgcgccactccgggcggcagcggcgggccgttgaccctgatggcgctgctggcccggcgcggcctgcgcccggcacagaccagcgcggtgttcgcggtcgaccagttggccgacctgacgttcttcctctgcgccctcggcgcgatcctgatctatgccctcagccattcgctgagcccgaacatggaatcgagcctgatcttcagcgcggtattcctggtcggcctgttcgtcggcgcggtaatgctgatccgctacctgcaccaggtgatccgcttcaacgggcgggttctggcgcggctcggcgtgtcatcgcgcaagcgcctgcactggggccgcaagatcctgcatttccgcattgccctgcacgacagcctgcgcctgccgaaacgacgcctgctggcggtcttccttctcagcagtacgcactggctactgcgcttcagcgtgctcgatctgaccctgcgcggcctgggagtggatatccagtgggcctggaccttcctgatccagatggtctcgctcagcgccggacagctctcgctgatccccggcggcgccggcggcaccgagctgacctcggcggccctgctggcccccatgatcggcaagtcgacggcggcggcggccatcgtcatctggcgagcggtgaccttctatttctacctcgtcgccggcggcccggtgttcgccgtgctcgccggacgcccgctgctgaagaagctgatcagcagtcgcgaggcttcttcctga

SEQ ID NO: 324764 - DNA, 762 bp, Pseudomonas aeruginosa
atggctgaacgcagcctgctgctggtgttgcacgacgtggccccggaaacctggccggactaccggcccttcgtcgaggccgtggacgcgctcggtgaggtccccatgacctggctggtagtgcccgacttccaccatcgcaacccgctggaagccgacgaaaagttctgcaaactgctctcgcggcgggtaacccggggtgacgaactggctctccacggcttctatcactacgatgacgccccaccaccgcgtactccaggacaatacttcatgcgtcgcatctacacctgggagggagagttctatgccctcgaccacgccgaggccaagacccgcctggccgccggcatcgagctgttccgccgccgcggatggccgctgcacggtttcgtcgcgccggcctggctgatgagcgccggcacccgccaggcgctcggcgagagcgggctgcgctacaccagcgacccgtccaacctgtatctgcttccccacctgcaaccgatcgaggcccccggcctggtctggagcgcgcgcagtgcctggcgtcgcggcctctcctgggcgctcagcgagcagcgccgccgggcctggcgcgcagcgccggtgatccgtctcggactccatccggtcgacatgcgccatcgcttttcccgcgaatactggctgagtaccctgcgcaccctgctatccgaggggcgccagccgttgaccaagatcgactggctggagcgccacctcgccctggaccgcgcggcatga

SEQ ID NO: 324765 - DNA, 1116 bp, Pseudomonas aeruginosa
gtgcacatcgccgatatgaccatgttctacgcgcctgccagcgggggggtacgcacctatctcgaagccaagcatcgccatctctggcactatcccggcattcgccacagcgtgctggttcccggcgccagctaccgccaggcgaacggcatccacgaggtgccggcgccgccgctgccattcggcaatggctaccgcttccctctccgtcgcggcccctggcgcaaggtgctgcgcaatctgcaaccggacctgatcgaggtcggcgacccctacctcaccgcctgggcggcgctcgacgcgcgacgtcggctggacgtgccggtgatcggcttctaccactccgacctgccgctgctggtgagcaatcgcatgggcgcctggctcggcaccaacgcggacaactacgtcagcaagctgtacggccacttcgaccgggtcctggcccccagtcgggtaatggcggaaaagctgatgcgcctgggcgtcgccgacgtgcatgtacaaccgctgggcgtcgacctcgtcaccttccatccgagcaaccgcgatccggggctgcgccaggaactcggcctggacgaggaaacccgcctgctggtgttcgccgggcgcggttcgcgggaaaagaacctgccggtactgctcgacgccatccagcgcctcggcgacggctatcacctgttgctggtgggttccaacatgccgacccgggttccgcgcaacaccagcgtggtcgaccatttctgcgacagccgcgaagtcgcccgcctgctggcgagcagcgacgcgctgctgcacgccggtgaccaggagaccttcggcctggtcgcactcgaagcgatggccagcggcattccggtggtggcggtgcgcgccggggcactggcggaaatagtcccggagcgttgcggcgtgctctgcgcaccgaacaacggcgacgccatggcctgcgcggtgcgcgaactgttcagccacgacgtcgagctgcgcggccagcgcgcccgccgtcacgtcgagcgccagcatgcctgggacgcggtggtcgccggtctgctcctgcactaccacgcggtactcggcgacagcgaggcgaggttcccgcgctatggctga

SEQ ID NO: 324766 - DNA, 1899 bp, Pseudomonas aeruginosa
atgcttcgctcgctgtcgtttgccaagaaaatccttctcgccgccgcgctggtggtagttttcgccttcagctgcttcatcctctacaacgattaccgacagcgcgaggccgtgcgcacggacacggaaaactacctcggggaaatcggcaccctgaccgccagcaacatccagagctggctggaaggccgcatgcacctggtggaaggcctggcctcgcaactggcgctgctcgaccagcccgacgaggcgaatatcgcaaggcaactggaacagcccgtcttcagccgcaatttcgcgtcggtctatcttggcgaggcggccagcggcgccttcaccatgcgcccctacgacgccatgccggaaggttacgacccacgtacccgcgcctggtacaaggacgcgctggcggccgaccggctgatcgtcaccgaacctttcgtcgatgccggcaccggcgagcagatcctcgccatgtcgctgccggtgcggcacgccggtcaactgctgggcgtcgccgccggcgacatgaagctggagaccctgaccgcgatcctcaattccctgaagttcgacggtgccggctacgccttcctggtcagcgacgccggcaagatcctcctccaccccgactccgggctggtcctgaagaccctcgccgaagcctatcccaaaggcgcaccgaacatcgttcccggggtccacgaggtggaactcgacggtcgcagccagttcgtttccttcaccccggtgaagggactgcccggcgtgacctggtacgtcgccctggtcctcgaccgcgacaccgcctattcgatgctcagcgaattccgcacttcggcgatcgtcgccacgctaatcgcggtggtcggcatcatgcttctcctcggcatgctgatccgcgtactgatgcaaccgctcaccgacatgggccgcgccatgcaggacatcgcccagggcgaaggcgacctgaccaagcgcctgaaggtcaccagcaacgatgaattcggtacgttggccaatgccttcaaccgcttcgtcgagcgtatccacgaatcgatccgcgaggtcgccgggaccgctcgccaactgcacgatgtggcgcaactggtggtgaacgcctcgaactcctcgatggccaactccgacgagcagtccaaccgcaccaacagcgtcgcagcagcgatcaacgaactcggcgccgccgcccaggaaatcgcccgcaacgccgccgatgcctcgcaccacgcctccgacgccaaccaccaggccgaagacggcaagcaggtggtcgagcagaccatccgcgcgatgaacgagctttccgagaagatcagcgcctcctgtgccaacatcgaggccctcaacagccgcacggtgaacatcggccagatcctcgaagtgatcaagggcatctccgagcagaccaacctgctcgccctcaacgccgccatcgaagccgcgcgcgccggcgaagccggacgcggcttcgcagtggtcgccgacgaggtgcgcaacctggcccaccgcgcccaggagtcggcccagcagatccagaagatgatcgaggaactgcagatcggcgcccgcgaggcggtggccaccatgaccgagagtcagcgctacagccttgaaagcgtggagatcgccaaccgtgccggcgaacgcctgagcagcgtcaccggacggatcgccgagatcgacgggatgaaccagtcggtggccaccgccaccgaggagcagaccgcggtggtcgattcgctgaacatggacatcaccgagatcaacaccctcaaccaggaaggcgtggagaacctccaggccaccctgcgcgcctgcggcgagctggaaacccaggccgggcgcctgcgccagctggtggacagcttcaagatctga

SEQ ID NO: 324767 - DNA, 912 bp, Pseudomonas aeruginosa
atgaatagcaaggtgctgatggccctggccggcctgctgctgctcggtgcggtgttgctcggatacctcggcgtatccatcggccgcgcgccatcgaacgcgcacgctccatccgtggcgccggcttcggcgacggtggacgcttcgctggaaaagctcgaacgcaagccggtgctggtggccagtcgcgatctcccggcgctggcggtgatcggcaaggatgacctgagcgtcgagctgttgcggaccgcaccggtcggtagctacgacaggcccgaggcgttgctcggcaagcgggtctgggtcgcggtgccggccggcagcattctttccgccgcgaccctcgaacccggcggtccgctggcccggaccatccgtccggacgagcgggcgatggcgatcgctgtggacgaagtggtcggcggcggcggcttcgtcctgcccggcgactatgtcgacgtgatgctcttcgtgcgtgacgagcgggacggcgaatcgaccccgctggcgcaactggtgttgcccggcgtccgggtactgacctacggcgagcggatcgccgtgggcagcgatggacaggaccgctcgaaccaggaaaaggacccgcgtccgccgcgtaccgcggtgctggcggtaccggaggacggcgtggcgcggctgatgctggcgagccaggccggttcgctgcgcctggccatccgcagcaaggacgaagaactctaccgcagggagcaggaaggcgcgctgctgcaagcgtcgctgggcgcgccgagcgcggcgctgagtctcgaccaactgctggagcgccgcaaaccgacggcgccgagcgtgcgcagcgcggctccgcgcgtgccggtggccaacggggtcacggtctaccgtggcagcgccatgacccatgaagtgccttga

SEQ ID NO: 324768 - DNA, 1266 bp, Pseudomonas aeruginosa
atgagcacgggattcggcgcgcgtcctgacggcggtgccttccactcccgccaggagcaggacatccaggcgctgaagctgcgcctgcaccgctacatcatcgacgagatcgacgaagacggcatgaacctgctggagggcgcgcgctccgccgtggtccagtacgtctcggaaaaggtctgcgaatacggctcgcgccatcaactggcgatctcccgctacgaactggaccgcctggccgaagaggtggtcgacgaactcaccggcttcggcccgctggagatcctcctgcgcgatcccggcgtctcggaaatcctcgtcaacgggccgggccgggtgttcgtcgagcgggaagggcggctctaccagagcgacctgcgcttcatcgacgaccaccatgtgctgcgggtgatccagcgtatcctcgcgcccctcggccgacgcctggacgagtccagcccgatggtcgacgcgcgcctgccggacggcagccgggtcaacgcgatcattcccccggtggcgctggacgggccgtgcatctcgatccgcaagttcagccaggagctgctgcgcagtgccgacctgctggcctaccagagcgtcgacgaagccttgctcgagttcctccgccaggcggtctcgcgccgctgcaacatcctcatcagcggcggcaccggcaccggcaagaccaccttgctcaacgtcatcagcggcttcatcgacgaacgcgagcggatcgtcaccatcgaggacaccgccgagctgcaactcggccacgaccacgtggtgcgcctggagacccgtccgccgaacgccgagggctacggcgaggtgaccgcccgcgacctgatccgcaacgccctgcggatgcgcccggaccggatcatcctcggcgagatccgcggcgtcgaggtgctcgacgtgctgcaggcgatgaacaccggccacgacggctcgatgagcacggtgcacgccaactcggcgatggattcgctgctgcgcatggagatgctggtcggcctgaccggcaacaggctgccggagcagaccttgcgcctgatgatctgcgccgcgctggacgtggtggtgcagatcacccgcctggccagcggtcggcgttgcatcagcgaagtgctggaggtgctggaggtgcgcgacggtgtgtacgtcaccaatacgctgttcagtctcgaccggcgcggtagcgggcagttcgtccgccaggccgcgccggtcgggcagaaattccgccaggcgctgctgtga

SEQ ID NO: 324769 - DNA, 1212 bp, Pseudomonas aeruginosa
atgcaggtcagcaaatcgaacaagctcgccaacgtctgctatgacattcgcgggccggtgctcaagcacgccaaacgcctagaggaagagggtcaccgcatcctcaagctgaatatcggcaacccggcgccgttcggtttcgaagctcccgaggaaattctccaggacgtcatccgcaacctgccgaccgcccagggctacagcgactccaagggcctgttcagcgcgcgcaaggcagtgatgcagtattaccagcagaagcaggtggaaggcgtcggcatcgaggacatctacctcggcaacggcgtgtcggaactgatcgtgatgtccatgcaggcgctgctgaacaacggcgacgaggtgctgatccccgctcccgactacccgctgtggaccgccgcggtcagcctcgccggcggcaaggcggtgcactacctgtgcgacgagcaggccaactggtggccggacctggaagacatcaaggcgaagatcacgccgaacaccagggcgatggtgatcatcaacccgaacaaccccaccggcgcggtgtattccagggaagtgctggaaggcatggtcgaactggcccgccagcacaacctggtgctgttctccgacgagatctacgacaagatcctctacgacggcgccgtccacgtctccaccgcctcgctggcgccggacgtgctctgcctgaccttcaacggcctgtccaaatcctaccgggtggccggcttccgctccggctgggtggcgatctccgggcccaagcagcgggcacagagctatatcgaaggtctcgacatcctcgccaacatgcgcctgtgcgccaacgtcccggcgcagcacgcgatccagaccgccctgggcggctaccagagcatcaacgatctggtcctgccgccggggcgcctgctggagcagcgcaaccgcgcctgggaactgctcaacgacatccccggcgtcagctgcgtgaagccgatgggcgcgctgtacgccttcccgcggatcgacccgaaggtctgcccgatccacaacgacgaaaagttcgtcctcgacctactgctctcggaaaaactgctgatcgtccagggcaccgccttcaactggccgtggcccgaccacttccgggtggtcaccctgccccgcgtcgacgacctggagcaggcgatcctgcgcatcggcagcttcctcaagggctaccagcagtaa

SEQ ID NO: 324770 - DNA, 891 bp, Pseudomonas aeruginosa
gtggattcccgattgagcgattttcttgcccgcgccgaaagcgtgctcgcgcgcctggagccgctgctgccggccgtacgcgaagccgtcgactgggagcgcagcctggcggcgcgctggcaccgcgacggccgtagcggctacctgcagccgctggaggtcagcctcgacctgcgcctggccgacctgctgggcgtagagcggcagcgcgagcaactggaacgcaacacccgccagttcgtcgccggccagccggccaaccacgccttgctctggggggcccgcgggaccggcaagtcctccctggtccgtgcgctgctggccgagctggccggcgccgggctgcgcctgatcgagatcgagcgcgaccacctggccgacctgccgcgcgtggtggagcaactgcaaggcctgccgcagcgcttcgtgctgttctgcgacgacctctcgttcgatgccggggaaggcgactaccgggtactcaagagcgtgctcgacggctcgctggaacaggcgccggagaatgtgctgctctacgccacctccaaccgccggcacctggtttcggagaagcagagcgacaacgagaactggaagatggtggacggcgagctgcatcccaacgaagcggtggaggacaagatcgccttgtccgaccgtttcggcctgtggctgtcgttctatcccttcacccaggagcatttcctcagcgtggttcgccactgggtggacgtgctcgcggagaaggccgggctggcctggagctggagcgaggaactggagaaggaagcgatccgctgggcgcttggccgcggcaaccgcaacggccgttgcgcctatcagttctcccgctactgggtgggcaagcaactgctggagcgccaggcatga

SEQ ID NO: 324771 - DNA, 663 bp, Pseudomonas aeruginosa
atgagcctgacactctacggagccccgctgtctccgttcgtccgcaaggtccgcctgctcctggccgaaaagggcctcgactaccagttggaagcgatcgcccctttcggccagccggcctggtatcgcgagatcagtccgctgggccgcatcccggcgttgcgcgacggcgacctggccctcgccgactccagcgtgatctgccagtacctggaagaacgctatcccgaaccgccgaatctccagggcgacgcccccgccagccgcgcagcggtgcgctggctggaaaaatacgccgactacgagatcgctcccctggccacgctgacgatcttccgcaaccggatactcaagccggcgatgggccaggcctgcgaggagaacgacgtgcgtcgcgcgctggaggaaaagctgccagcgcacttcgattacctggaaaaccatctcgacggccgggccttcttcgtcggcgagcgactgaccctcgccgacctggcgatcgccagccagttggtcaacctgcgtcacgccggcgaaaacctggacgagcaacgctggccggccctcgccgcgcatttcgcgcggatgctcgaacgcccggcgatgcaagcgctgctgccgggggaacgacggaccctcgacaagctcgcagcgaaagcctga

SEQ ID NO: 324772 - DNA, 729 bp, Pseudomonas aeruginosa
atggtggtgatctacatcgtcgcgcgggtcaagaagctgccggcgcagccgcgcgccagcttccgcgagtggctgggcgccgcacgccgtgcaggctggggcctgttgttgctggtgatcatcctcggcggcatctattccgggctgttcacccccaccgaggcggcggcggtggcggcggtgtattcggccttcgtcgcgctgttcgtgtacaaggacatgcgcctgcgcgactgtcccaaggtgctgctggagtcggggcggctgagcatcatgctgatgttcatcatcgccaatgccatgctcttcgcccacgtgttgaccaccgagcagatcccccagcagatcaccgaatgggtggtgcaggaaggcctgaccccgatcggcttcctgctgatggtcaacgtggtgctgctggtcgccggcagcttcatggagccctcggcgatcgtgctgatcctggcgccgatcttcttccccatcgccatgaggctgggcatcgacccgatccacctgggcatcgtcatggtggtgaacatggagatcggcctggtacacccgccggtcggcctcaacctgttcgtcacttcggcggtcaccggcatgccgctgggggcgaccatccgcgcggcgctgccgtggctgatgatcctgctgctgttcctgatcctggtgacctacgtgccgttgatctcgctgtggctgccgggcctgctgggcatgagctga

SEQ ID NO: 324773 - DNA, 1956 bp, Pseudomonas aeruginosa
atgtctgcggcatccctgtaccccgtgcacccggaagcggtggcacggaccttcaccgacgaagccacctacaagacgatgtaccagcagtccgtcgtcaaccccgacggcttctggcgcgagcaggcccagcggatcgactggatcaagccgttcgagaaggtcaagcagacctccttcgacgaccatcacgtggacatcaagtggttcgccgacggcaccctcaacgtgtcgcacaactgcctcgaccgtcacctcgccgaacgcggcgaccaggtggcgatcatctgggaaggcgacgatcccgccgaccaccaggaaatcacctaccgccagctccacgagcaggtctgcaagttcgccaacgccctgcgcgggcaggacgtgcaccgcggcgacgtagtgaccatctacatgccgatgatccccgaggccgtggtcgccatgctcgcctgcacccgcatcggcgcgatccactcggtggtcttcggcggcttctcccccgaggccctggccgggcgcatcatcgattgcaagtcgaaggtggtgatcaccgccgacgaaggcgtgcgcggcggcaagcgcactccgctgaaggccaatgtcgacgacgccctgaccaacccggaaacctccagcgtgcagaagatcatcgtctgcaagcgtaccggtgcggagatcaagtggaaccagcaccgcgacgtctggtacgacgacctgatgaaggttgccggcagcacttgcgcacccaaggaaatgggcgccgaggacccgctgttcatcctctacacctccggctccaccggcaagccgaagggcgtgctgcataccaccggcggctacctggtgtacgcctcgctgacccacgagcgggtcttcgactaccgtccgggcgaagtctactggtgcaccgccgacatcggctgggtcaccggccacacctacatcgtctatggcccgctggccaacggcgccaccaccattctgttcgagggcgtgccgaactaccccgacgtgacccgcgtggcgaaaatcatcgacaagcacaaggtcaacatcctctacaccgcgccgaccgcgatccgcgcgatgatggccgaaggcaaggcggcggtggccggtgccgacggttccagcctgcgtctgctcggttcggtgggcgagccgatcaacccggaagcctggcagtggtactacgagaccgtcggccagtcgcgctgcccgatcgtcgacacctggtggcagaccgagaccggcgcctgcctgatgaccccgctgccgggcgcccacgcgatgaagccgggctctgcagccaagccgttcttcggcgtggtaccggcactggtggacaacctcggcaacctgatcgagggcgccgccgagggcaacctggtgatcctcgactcctggccgggccaggcgcggaccctgttcggcgaccatgaccgcttcgtcgacacctacttcaagaccttcaagggcatgtacttcaccggcgacggcgcgcgccgcgacgaggacggctactactggatcaccgggcgggtcgacgacgtgctcaacgtctccggccaccgcatgggcaccgccgaggtggaaagcgcgatggtcgcccacccgaaggtcgccgaggcggcggtggtcggcatgcagcacgacatcaaggggcagggcatctatgtctacgtcaccctcaactccggggtcgagccgagcgaggcgctgcgccaggagctgaagcaatgggttcgccgcgagatcggtccgatcgccacgccggatgtgatccagtgggcgccgggactgccgaagacccgttcgggcaagatcatgcggcgcatcctgcgcaagatcgccgcggccgagtacgacaccctcggcgacatctccacccttgccgacccgggcgtggtccagcacctgatcgagacccatcgctcgatgcaggccgcctga

SEQ ID NO: 324774 - DNA, 1917 bp, Pseudomonas aeruginosa
atgcacctgataccccattggatccccctggtcgccagcctcggcctgctcgccggcggctcgtccgcgtccgccgccgaggaagccttcgacctctggaacgaatgcgccaaggcctgcgtgctcgacctcaaggacggcgtgcgttccagccgcatgagcgtcgacccggccatcgccgacaccaacggccagggcgtgctgcactactccatggtcctggagggcggcaacgacgcgctcaagctggccatcgacaacgccctcagcatcaccagcgacggcctgaccatccgcctcgaaggcggcgtcgagccgaacaagccggtgcgctacagctacacgcgccaggcgcgcggcagttggtcgctgaactggctggtaccgatcggccacgagaagccttcgaacatcaaggtgttcatccacgaactgaacgccggtaaccagctcagccacatgtcgccgatctacaccatcgagatgggcgacgagttgctggcgaagctggcgcgcgatgccaccttcttcgtcagggcgcacgagagcaacgagatgcagccgacgctcgccatcagccatgccggggtcagcgtggtcatggcccaggcccagccgcgccgggaaaagcgctggagcgaatgggccagcggcaaggtgttgtgcctgctcgacccgctggacggggtctacaactacctcgcccagcagcgctgcaacctcgacgatacctgggaaggcaagatctaccgggtgctcgccggcaacccggcgaagcatgacctggacatcaagcccacggtcatcagtcatcgcctgcacttccccgagggcggcagcctggccgcgctgaccgcgcaccaggcctgccacctgccgctggagactttcacccgtcatcgccagccgcgcggctgggaacaactggagcagtgcggctatccggtgcagcggctggtcgccctctacctggcggcgcgactgtcgtggaaccaggtcgaccaggtgatccgcaacgccctggccagccccggcagcggcggcgacctgggcgaagcgatccgcgagcagccggagcaggcccgtctggccctgaccctggccgccgccgagagcgagcgcttcgtccggcagggcaccggcaacgacgaggccggcgcggccagcgccgacgtggtgagcctgacctgcccggtcgccgccggtgaatgcgcgggcccggcggacagcggcgacgccctgctggagcgcaactatcccactggcgcggagttcctcggcgacggtggcgacgtcagcttcagcacccgcggcacgcagaactggacggtggagcggctgctccaggcgcaccgccaactggaggagcgcggctatgtgttcgtcggctaccacggcaccttcctcgaagcggcgcaaagcatcgtcttcggcggggtgcgcgcgcgcagccaggatctcgacgcgatctggcgcggtttctatatcgccggcgatccggcgctggcctacggctacgcccaggaccaggaacccgacgcgcgcggccggatccgcaacggtgccctgctgcgggtctatgtgccgcgctcgagcctgccgggcttctaccgcaccggcctgaccctggccgcgccggaggcggcgggcgaggtcgaacggctgatcggccatccgctgccgctgcgcctggacgccatcaccggccccgaggaggaaggcgggcgcctggagaccattctcggctggccgctggccgagcgcaccgtggtgattccctcggcgatccccaccgacccgcgcaacgtcggcggcgacctcgacccgtccagcatccccgacaaggaacaggcgatcagcgccctgccggactacgccagccagcccggcaaaccgccgcgcgaggacctgaagtaa

SEQ ID NO: 324775 - DNA, 1182 bp, Pseudomonas aeruginosa
atgaaaggcccgttgtcatcgttgaaagtgctggatttctcgaccctgttgccggggccgttcgcctcgctgctgctggccgacatgggggcggacgtgctgcgcgtggagtcgcccgggcgcatggacctggtgcgggtgctgccgccgcacgtcgacggcacctcggccagccatgcctacctgaaccgcaacaagcgttccatcggcctcgacctgaagcggcagggcgcgcgcgaggtggtgctggagctggtacgcgaatacgacatcgtcctcgaacagttccgtccgggggtgatggacaagctcggcgtcggctacgaggcgctgaaggcggcgaacccgcggctgatctacgtggccatcaccggctacggccagaccgggccgtaccgcgagcgcgccgggcatgacatcaactacctggcgctggccggcgtcgccagctacaccgggcgccgcgagcgtggcccgttgccgctgggggtgcaactggcggacctcgccggcggttcgttgcatggcgtgatgggcctgctggcggcggtcatccaccggcagcagaccggcgaggggcagttcgtcgacatcagcatgaccgactgcgccttcagcctgaacggcatggccggtgcaggctatctcgcggccggggtcgagccggagatggaggcgctggcgctgaacggcggcagcttctacgactactaccgcacccgcgatggccgctggttctcggtgggcagcctggaaccgcagttcatgcagcagttctgcgccgccatcggccgcccggaactggccgcccgcggcctgtcgccgaagccggaagagcagcgggcgctgaagcgcgagatcgagatggagttcgagaaacgcgacttcgccgaatggcaggcggtgttcgccgccctggatgcctgcgtggagccgctgctgccgctctccgaggcgctggaacacccgcagttgcaggcgcgcgggctggtcgcccgggtgccgctggcggacggcggcagccaggcgcagatggcctgtccgatcaagttttccgccggcctgccggcgcctcgccacatcggcgcggcgctcggcgccgacaccgtggcggtgctcgaaggcctgggctactccgccgaacggatcgccgagctgaaggcggccggggccatcgcctga

SEQ ID NO: 324776 - DNA, 603 bp, Pseudomonas aeruginosa
atggtggttgatccgttgaaacaccctcgtgcggagctaaaatccgcagagaacgcattagaagctatgcgtaccgcacgaaaccttgagcgcttcgaagaggagtggcgttcatatctaaatcatttggagaaagtttgggttaaagctgaaagagcatgtcaagaaattagaggtgaatttcaggaatggcaaggtaaaactagtcatcttcgaaaaaaggatatgcttttacgatatcttcggcaggctcgaaacgcagacaatcactccattcaagaggtaattgaacataagcctggtaagtacactttttcggtgccaggtgggcctggagtcgtaaggattgactctttggtaattaataatggtcgagttattgagtatactggtagtcatgcccccatcgtcactaacgagccgcctcagattaatgttatccccgtaaaaaacagcggcgagtggtttaatccgccaacatcgcatttaaataaggatgtcaatagtaaaaaccctattgtaatagctgagcttggattaagtttttacaggaactggctttctgaacttgaagccactttctttagggatggagttccctga

SEQ ID NO: 324777 - DNA, 276 bp, Pseudomonas aeruginosa
atgataaagcagcgcgttatagccatccttgcgtggtcggacattcggctacctaagctcgaagagttgacggggatcagtcgctatacctggagcaaccttaagaatccgtccaagagccgggagattaaggaagaagagatactcgccatcgccaaggtctttccgcagttccgttggtggctactcactggcgaggtaatgcctgatatcggccagaccagcccagagtacgaagaggccaaccgaaacttgaccagtcaaagcgcgggatag

SEQ ID NO: 324778 - DNA, 216 bp, Pseudomonas aeruginosa
atggaagtggaagaaatcaaggctcaagacctccgcgcggcgcccccggtgttgccgtggcgggacttcgcgaactggattggcatgggggaagaccacgaaacagtccgtggatggattcgtaagggctatctccccgcgcacaagatcggcaagcacgtgatggtcaatgttgcgctcttcacccgtcagctgatggaaaaggaggagttctga

SEQ ID NO: 324779 - DNA, 219 bp, Pseudomonas aeruginosa
atggtcagcttcctccttatcttggcgagcacggccccaggcgagagcttgaacccgcaggtcggtcagataggattcttccggctgggagaggtagccggcgtccatgaggccatcgatcagcatcagggcgcggtcaaagggttcgctagggtgctgtgccgtttgcagcagatagccttccaagaagatcagcagcgcatggatagggttacctga

SEQ ID NO: 324780 - DNA, 1458 bp, Pseudomonas aeruginosa
atgaaacggtccttcctttccctggcggtagccgctgtcgttctgtccggctgctcgctgatccccgactaccagcgccccgaggcgccggtagccgcggcctacccgcaagggcaggcctacgggcagaacaccggcgcggcggccgttccggccgccgacatcggctggcgcgagttcttccgcgacccgcagttgcagcaactgatcggcgtggcgctggaaaacaaccgcgacctgcgggtcgccgcgctgaacgtcgaggccttccgggcgcagtaccgcatccagcgggccgacctgttcccgcggatcggcgtggacggtagcggcacccgccagcgtttgccgggcgacctgtcgaccaccggcagtccggcgatttccagccagtacggggtgaccctgggcactaccgcctgggaactcgatctcttcggccgcctgcgcagcctgcgcgaccaggccctggagcagtacctggcgaccgaacaggcgcagcgcagcgcgcagaccaccctggtggccagcgtggcgaccgcctacctgacgctgaaggccgaccaggcgcagttgcagctgaccaaggacaccctgggcacctaccagaagagtttcgacctgacccagcgcagctacgacgtcggcgtcgcctccgcgctcgacctgcgccaggcgcagaccgccgtggaaggcgcccgcgcgaccctggcgcagtacacccgcctggtagcccaggaccagaatgcgctggtcctgctgctgggctccgggatcccggcgaacctgccgcaaggcctgggcctggaccagaccctgctgaccgaagtgccggcgggtctgccgtcggacctgctgcaacggcgcccggacatcctcgaggccgagcaccagctcatggctgccaacgccagcatcggcgccgcgcgcgcggcgttcttcccgagcatcagcctgaccgccaacgccggcaccatgagccgccaactgtccggcctgttcgacgccggttcgggttcctggttgttccagccgtcgatcaacctgccgatcttcaccgccggcagcctgcgtgccagcctggactacgcgaagatccagaaggacatcaacgtcgcgcagtacgagaaggcgatccagacggcgttccaggaagtcgccgacggcctggccgcgcgcggtaccttcaccgagcagttgcaggcgcagcgcgatctggtcaaggccagcgacgagtactaccagctcgccgacaagcgctatcgcacgggggtggacaactacctgaccctgctcgacgcgcaacgctcgctgttcaccgcgcagcagcaactgatcaccgaccgcctcaatcagctgaccagcgaggtcaacctgtacaaggccctcggcggcggctggaaccagcagaccgtgacccagcagcagaccgcgaagaaggaagatccccaggcctga

SEQ ID NO: 324781 - DNA, 417 bp, Pseudomonas aeruginosa
atgagaatcgctcccatctcccgctcgccgctgctgcagtggctgagcttcgccctctgtgcctgcgtgctggtcaacgcgctggcttgcggcgtcctgcacctgcaggcgctgggagtgggcagcgacaaggggcagaaggccagcgtcgggctgttctgcgtcgccggtgccagccaatggctatccctggatcccgacgacgggtccgccggcgatccggcaccggtcaatccccagttgccgatgagctgcccgatgtgcagcgccctggtgctgttcgtcgcgctcggggtgatctggtcctggcgcttgcaacggcgacgccaggcgcgtttccgcccgcccgccacgcgcgagccggtgccgccccggtacgtctggccgccggccaacccgcgcgcttcccccgcctga

SEQ ID NO: 324782 - DNA, 999 bp, Pseudomonas aeruginosa
atgaagttaaccatccaactcctgttcctgggactgctcctggctctaaccccaaaaagtctcgctttgacttgtctgaaaaacgcgacggacgtatctgatcaaatctcgatggatacgaccgtcgcggtacccattgcgcttcccaaggacaccattctctggcgttcccccaactacagcgtcaatataagttgctgggcgaaccagttctggaacgccgaagaggagatctatttctacctcagccccaaggatcctggcttgagcatgatcggacccgacctggaggtcggactgaacctcgacgggaaggacatacggtgtacgcaggtcgatcgctgccgaatcaagcttccccataagaccctgccctgccggagcaatgcgcctggcggctgcccacatctgaaaacaaacttcacgctgcactacaacttcttcatttccaagcgaagccttcccggcaccagcaaggaagggccgatcgctggccacgatagctacgtgattttccaactggatggtgttggaggtcctatcgccaacaacttccgcatggtgctcaatggcctgaaccaactacgctatgtcgcatgctcgtctaccctgagcatttcacccaagacactcgacttcggcctccttcaagcgcttcaagccgccaccaaccagaccatcaaggaaaagcccttccagatcactgcaagcaagaactgcaatagcgcctatggcctgggagcacttctgagacccgtgaattcttccagcaccgtaggcgacacgttggtgccgggagacaacaagtccgtaggcatcaccgtgctcaggcaagaagaccgtagcatcgtccccttcaacaaagaattccaattggtggaacacagcaaagaccaggtcgtggtgaagaacttcctggcccaactgaaatggatgaccaacgcacctacgttgggtcgattcaatgccaccgctgcgatagatatctactacaagtga

SEQ ID NO: 324783 - DNA, 669 bp, Pseudomonas aeruginosa
atgtccgcccatgccgatctctcgttcgacggccagaaccgtttcgtgatgaaaggcaagcgcctgccgatcacgctggtcaacgagggcaaggagccggccctggcggaaatctccctggattggggtaccgacggcaaggggcaggcgctgcccttcgccgtgtccaggccgctgctccgcctgggcgccggccagcgggccaaggtggaggtgctctaccagggccagggcctgcccaccgaccgcgagacctacctgctgttgagcgtgctggacgtgccgcacgcgactggcaaaggcgatgctctgcaaatcgctctgcgccatcgtttcaaactgttctaccgaccgtccttgaaagctaccgtcgagcaagccatggcgggcttaacctggtcctacgatcctgagggtagtcccaggacgcggaatccctctccctattacgtgaccctcagccaggtggagtttctcgatgcgcccgggcggctctgcgccccacccatcgatcacctgattctggctccttataccgaacactcattcgacagcatcgattgccaggccatcaaggctcgatatgaggtagtcagcgacgccggcaacctacgaccctttcaggtcatattgccaacgaatgggaaagctaccgccaatccactctga

SEQ ID NO: 324784 - DNA, 1797 bp, Pseudomonas aeruginosa
atgccggaatacaaggctccgctgcgcgacatgcgcttcctgatcgatgaggtattcgacttccatgggcgctaccaggcgctcggcgccagcgacgcgaccccggacatggtggcggcgatcctcgatgaagggtcgaaattctgcgaacaggttctggcgccgctgaaccgctccggcgacgaagagggctgccacttcgacaacggcgtggtgaccacgcccaagggtttcaaggaagcctatgcacagtacgtcgagggtggctggaacggtgtcgccagcgatcccgcgtacggcggccagggcctgccgcactcgctgggtctgctgctcagcgagatgatcggcgccagcaatgtctcctggggcatgtacccgggcctgacccgcggcgccatgtcggcgatccacgcccacggcagccaggcgcagaaggacctctacctggcgcggatgaccgccggcacctggaccggcaccatgtgcctgaccgagccgcactgcggcaccgacctgggcatcatcaagacccgcgcggtgccgaacgccgacggcagccatgcgatcagcgggacgaagatcttcatctccgccggcgagcacgacctgagcgagaacatcgtccacctggtgctggccaagcttcccgatgcgccggccgggaccaagggtatctcgctgttcatcgtgccgaagttcctacccgacgccgaaggtaacgtgggcgcgcgcaatgcggtctcctgtggctccatcgagcacaagatggggatcaaggcctcggccacctgtgtgatgaacttcgacggcgccaccggctacctgatcggcgagccgaacaagggcctgcactgcatgttcaccatgatgaaccacgcccgtctgggcaccggcatgcagggcctgtgccttggcgagaccagttaccagggcgccgtgcgctacgcccgggagcgcttgcagatgcgctcgctgaccgggccgaaggcgccggacaagccggccgacccgatcatcgtgcaccccgacgtgcggcgcatgctgctgaccatgaaggcgttcaacgaaggcaaccgcgcgctggcctacttcaccgcccagttgctcgacaccgagcacctgtcgcaggacgccgccgagcgcgagcgggccgccgacctgctggccttcctgacgccgatctgcaaggccttcatgaccgagaccgggcaggaggtgaccaacctcggcatgcaggtctacggcggccacggctacatccgcgagtggggcatggagcagttggtccgcgattgccgcatcgcacagatctacgaaggcaccaacggcatccaggccctcgacctgctcggccgcaaggtactgggcagccagggcaagctgttgcgcggtttcaccaaactggtccaccagttgtgccaggcccaggccgagcatccgcaactgaagggacaggtcgcgcaactggcggcgctgaacgcgcagtggggcgaactgacccagcaggtgggcctggcggcgatgaagaatgccgacgaagtgggcgccgcctcggtggactacctgatgttctccggctacgtgaccctggcctatttctggttgcgcatcgccctggtggcgcgcgagaagctggatgccggcagcggcgaggccgcgttctacgaagccaagctggccaccgccgacttctacttcagtcgcctgctgccgcgcactgcggcgcacgccgcggcgatccaggccggcgcggcgggcctgatgagcctgtcggcggagcagttttcgctctag

SEQ ID NO: 324785 - DNA, 246 bp, Pseudomonas aeruginosa
atggtgaagcgttgcggtatcgtgctgccaagagggcagtgcacccatgtgctacgccatacgttcgcttcccacttcatgatgaacggtggaaacatcctggcgctgaaagagattcttgggcattcgtcgctgaacatgaccatgcgctatgcgcatttgtcgccggaatacctgcgggacgctattcgactcaacccgctggcggatttcgacagttcttcgacacttgccgagacgtcctag

SEQ ID NO: 324786 - DNA, 318 bp, Pseudomonas aeruginosa
atggcgctgatcccctacctgctctgcgccggcttctgcctgaagctggtggcgcgccgcccacactcgggcgcgatgctggcgctggcgctgttggggacgctctacggggtctggctgatctacgccgccgggctgaaatacctgctgctgtcgatgatcctctacgcgccaggcctgggcttcttcctgcatgcccgtcgccagcgcggcctgccggcgttcggcaatcgcgccgaaggcagcgtcgcggcgctggtgctggtcctcgcgctggcggcgctgtggatgatcggcagcggtcggctgagcctctag

SEQ ID NO: 324787 - DNA, 2028 bp, Pseudomonas aeruginosa
atgtcagcaatgaagtacatgcctggtgtcgacggcctgagggctgtcgcggtgatgagcgttctgctctttcatgcgggatttagctctctggcgggaggctatgtcggagtagatgtgtttttcgtcatcagtggatttctgattacgagactcatctattcagaagtgtcgtcaagtgggtgtttcgactatcatagattctactcccgtcgggtgcgcaggctctttcccgctctttttgtggtagttttctgtagtttctttgtatctctgtttttattcagttctgaacatcttaagcgatttgggggggaggttgtttactcgctattttccctttcaaacttctatttttggagtgaaagcggttacttcaatacatcctcaggctttaagccgcttttacatacgtggtctcttagtgtagaagagcagttttacatgttttggcctgttgtccttgttttttttggaaagagatttggtgcgaaaggaatagtatcgtttcttgttgtcggcggtgtgttgagccttctcgcaaatttttccttcatagatggttatagctcggccgtagcttgggctgggccaacagttgccaagtggtttgcagatggcgcctctacagttttctatctgacaccatttcgagtgtttgaattcgcgataggcgcgatccttgtttttattcctcagattaagtcgaatgcatttcataatgttgcctttgctgctggactggcattggttgtctattcgatctttaagtttgattctttaactccgtttccaacctataacgcactacttccatgcattggtgcggctcttatagtgttttcctcaagttcgcccgtttcgagatatacgctttctacgaagccgtttgttttcttgggcatgataagctattcggtctatcttgttcattggccgataattgttttctataagtattatttctccggggaagcgtctgtttatgaaaaattcgtaatagtatttctctcgcttgttcttggatatgcactgtataaaacggttgaaactccacttcgtcgacctaacgagaagtcacttactagtaatggcttcaatctgacatgcttgatgcttgcctgccttctcgtagttcctgcctcgacggcatggggaagttctggttgggtatggcgcgtagcagaaccgcctgaagggataaagcgtcagttggcagactcgaagcaatttcatgtagaccaatacggtggaaatggatatcccgagcgttatggatggatagttggcggtgctgatggactggcagatatcgtcgttatgggagatagtcacgcacgacagtatgcctatggattcgatcatgctattggaaagccaaataaactcagcatttatattagtacggttagttgtataatgcttcccggcgtcacgcgacttactcccggaacagattgggactcaacttgccctgccgctttagatcaggcgatttcagttcttaaaaagaatccgaattctgttctggttatttctgagttctggcatgagcagataaaatatgccgcgcgattgggtgagaagaagccaattgatcaggactcagcctatcagtttttgaatggaaaaattctggagttaaagtctcttattgggagccacgaactggttgtaatagggaatgttcctggcgctggctcgccagatattgctggttgctatagcaggccgtccatcggacgaggagattgtttgaaacgtattggaattccatactctgacgttccttcagctaagctgaataggtcgctttctctgctatctgaagagagtggggtttattttgttgatcctcagcgttcactttgtgatggggggttctgtaaatccgttaataaagagagaattctatatagtgatagtcaccacctttcaaaggctggctcagagtacgtgatttatgcgaataaggacctgttcctgcgcctggtaactaagcccaggtcagtatcaacaaataattag

SEQ ID NO: 324788 - DNA, 2064 bp, Pseudomonas aeruginosa
atgctcaaggattcgaaccaggctttccttgaatatgtcgacggctctccgctgattgttgatcgcccgactcaactgattcagcgtgacgggaacctgtatagcgttcaactgccagcagatttcccggtcagcctgagcgggaactgggctaccgacgagccgctacttgtgaaccaggttgatcgcgcgctacgcgctgagctggtcaatgagaccgacctggcgcttggcgcggcggttgtcggccggtccgcagttgtagttgagtcacttgccgatctcgtcggatcgcctcggaaaacgactcatacgtaccatgttcgtgagcatcgcccaggcattacaaccggtggcggcgtattcgtctgggacccgttgatgcctcgatcaatgcacaatggcggaacggtaatcagtccgacggtccctgcatacaccgcccagcctggcctagcagactatctcgccggcgtcggcgagacggagccgtcggcgagcggtgcattcgttcgccggatcgagaacaacgctgtgcggctggagtacttcggctgggtcgaaggtgagcttggtacggcaccgctcgcgatgctgctccgcgaaactcggtcaaacgagggcgatggcgccaacattggtgcagtcgccgtgctgccgccggggacgattcgcacagcgccattcgtgatcggttcgaaccagattataggggcgaccagtcggacggtagttcttcaagagccaggaacagtaatcggtgacaacgccccgttcatcgctattgccagccagacaaacgtctatatccgcggaaacggaatgcagatcaatggtcagaagaacgaggcaactagcggagagggacgctatggtctgtttctctatggttcaaaaaatgtacttgttcaggatttatcgataaacgcattttctggtgatggcgctgcattaactggtaatgtagggcttccctgtgaagatataaatttagagcgtgttctctgcaactataacggccggaatggcgtttcaattgttaacgccaagcgtgcaactctgactaagtgccggtcgacaaatacgaatacaaatggaatgggagcctctgcaaacggcccgtgggctggatttgatatagagcctaacgaaggttccggttactattttgaagatatcaatatgtacgggtgctcggctcagggcaatgcgggttttggcttgcagttcacaataccaaacacggactctgcaatctcggttcgagtctacgggttccagtcctatcgtaatggttcagccacacagtatggtgcaaaagggggtggaatcgggttcgtatatggtgggggcaagactccatcgttaaatatgtatggggaaattgttattcataatccacatattgagcagccatttgggtcggccattcgattcggaaattggagcgcaaagaatgccgctgttattgttaataacgcttcggcgagaaatcttaattttgctggagctactggcaatataaatcggtgcggtgtttggctggattccactgacagtctggaggttgtcgaatccaaggggaatttcgatataaacgggttcactgtatttaacgataatttgcagatggtgcgccctgtgtggtgtctaggggctacaaatgctccagtcattgcgaatatccgaaacgtgcgcgtgaatcgccatggttatccatctgtcgagcggatgcgcgtgaaagttgttggcggtatcacatgggacactccgccagttgtcacgctatcgacggccccaggtacagacgctttcgaatatgccggacaacatattgaagcagctgttgccggtgcgtttcccctgcccgaggccgccctcactatcggcacgacgtacatgatccgcaacgcctctagcggaaatgtggccgtcacgccggcagctggcgcgatcacagcgagtacctacggcacgtacacgaacaacggcacgacgctgacgctcacgcctgggcagtatgcggaattgaagagcaacggttccagttggctgctcaagtga

SEQ ID NO: 324789 - DNA, 168 bp, Pseudomonas aeruginosa
atgactacatacgccaccggtaacccgcttggctccaaagacccgcctgatctgtacgataacgccgagaacttcgacgcggcgatgaacgaccgagtaaacaccacgtggagtgatcgtttcggcgttatgcgcccaacgatgaaaggatatgcggaacagttctaa

SEQ ID NO: 324790 - DNA, 1446 bp, Pseudomonas aeruginosa
atgaccatgcgccgcctgatgacctggctgttcggcgccttcctgttgctgctgcgcgaggacgccttcgccctcggcctgctggacggctatcacctggccctggagaacgacccgcagttccaggccgcgatccaggagcacgaggccggcaggcaataccgtgcgctcggccgcgcggcgctgctgccgcgcctggtgtacagctacaaccgtgggcgcagctggtccgatgtgacccagaccaccacccgcggcgatttcaaggaagaccgcgactacgacagctacgtctccaccctcagcctgcaacagccgttgttcgactacgaggctttcagccgctaccgcaagggcgtggcccaggcgctgctgtccgacgagcgcttccgcagccagagccaggaactgctggtccgggtcctggaagcctataccggcgcgctgctggcccaggaccagatcgaactggcgcgggcgcagaaacgctcctaccgcgagcagttccagctcaaccagcgccagttcgagcgcggcaacggcacccgcaccgacaccctggagacccaggcccgcttcaacctggcccaggcccaggaaatcgaggcgcgggacagccaggatgccgccctgcgcgagctggagcggctggtcggggcgccgctggagatcgccgacctggcgccgctcggcgaacgcttccaggtgcgcccgctgagccccgccagctacaccgcctggcgcgacctggcgctggccgagaatcccgagctggcctcgctgcgccacgcggtggacgtggcccgctacgaggtcgagcagaaccgcgccgacttcctgccgcgcctgggcctgtacgccagcaccggcaagtccaagtccggttcggagaacacttacaaccagcgctacgagaccgacagcgtcggcatccagttgagcgttccgctgttctccggcggcgagaccctggcggcgacgcgccaggccacgcatcgcatggagaagagccattacgacctggacgacaaggtccgcgagactctcaaccaggtgcgcaagatgtacaaccagagcagcagcagcgcggcgaagatccgcgcctacgagatgaccgtggattcggcgcggacgctggtgatggccacgcgcaagagcatcgccgccggggtgcgggtcaacctcgacctgctgaacgccgagcaggcgctgtacagcgcgatgaacgagctgtccaaggccaagtacgactacctcacggcctgggcacgcctgcgtttctacgccggggtgctggacgaagccgacctggaactggtggcggcgaacttcgtttccggcgagacgccggcgcgccgccgcgactgcgcgacgacggattgcccggcgccgctgcacaccctgtcgaagacagatacggaggaaaaccggagcgcgctcaattga

SEQ ID NO: 324791 - DNA, 417 bp, Pseudomonas aeruginosa
atgcgccggatattcatcgcgccgttactggcgtcgctttccctgggcggctgtatccagatggacacgctgcccgaggtctacgcccgcagccagtggaagggccgttccgccgaggaagcgatagccttcttcggtacgccgcagaacatggagcgcaccgctgacggctcgcaggtggtgatgcagtggtacaccgacaccagctattcccgctatgaagtggtgggctccagctcggagatgcagggcaacgtgatggtgaacaccaactactgggataccgtcaaccaccccaatcgctgcatcatttccgtcaccgtcgacaagagcaagcggatcacccagttcgaggccgacgacggcgagttgctgctgtcccacggctgcgctggcatcaagtacggcccgccgtag

SEQ ID NO: 324792 - DNA, 1623 bp, Pseudomonas aeruginosa
atgaagttcgagaagaataccgagctggaccaggccaacctgcgactgatcgtggccacctgcgcgatcctctacgtggtgctgatcggcctgctgcccggcctgaaggtcgagacctacctgccgatcgttgcctactacggcctgttcctgatcgcctccatactgctgcgccaggccatcgtgcgctggccggggcactacccggcgcggcggatcttctgcatgctgcacgactacgccggcacctcgttcggcctgatcgtgggcggcgaggcagcgctgccgctgtacgcggtgatggtctggatcaacctgggcaacggcatgcgctacggctcgcgctacctggccatcgccaccgccctggcgctgctcgcgctactggtcatctatcgactgaccccggcctggcaggctcagccgttcatggtgctgatgctgatgaccaccagtaccgtcattcccttctacgcgcacctcctgctggagcgcacgcgcaaggccaccgaggaagcgttgcaggcgaaccaggagaaatcgcgcctgctggcccaggccagccacgacctgcgccagccgatccactccatcggcctgttcaccgcctgcctgcgcgacgcccgcctgggcgacgaggaacggcgcctggtggacaacatcgaccgctcgctgctcaacgtctcgcaactgttccgctccatcctcgatctctacaccctcgacaacggccggctccaacccaagcaggagaacgtccacctgggcgagttgctgcgcgacctggtccggcgcaacgccgaagcggcgcgctgggccggggtggaactgcgcctgcgcccttgccgcctgtggacgcgaaccgatccggggctgctgtcgaccatgctgcagaacctgctctccaacagcctcaagtacgccgccgagcgcccgctgctgatcggcgtgcggcggcgaggcgacggcctggccgtagccatctacgaccagggcagggggatcgcggaggaacacctgccgcgggtgttcgaggagttctaccgggtacgcgagacgcgcgaccgcgacgtcgagggaatcggcctggggctgtccatcgtccgccgcctggggcagttgaccgggatcgaggtgacgctgcgctcgcgggtcggacgcggcaccgcggtgaccctgcacggcctgccggcggtcgccgcgcaagccctgccccgccgcgacgatcccctgcaggccggcctgctcaccggcttgcgggtgtgcctggtggaagatgatcgcaacgtcctgcgcgccacctcggcgttgctcgaacgctggggctgcacggtccaggcggaaaccgaggcggacggctggcgaaccgattgcgacatcctcgtcgtcgactacgacctcggcccccacgcctccggcgtcgagtgcatcgagcgggtacggcggcaacgcggagaggcgataccggcgctggtgatcagcggccacgacatcgagcgtatccaggccagcgtcgaagacaccgacatcgccctgctctccaagcccgtgcgccccacggaattgcgcgccaccctgcgcgccctgcgcgagcgcccggtggccgccagccacgcttcctga

SEQ ID NO: 324793 - DNA, 2076 bp, Pseudomonas aeruginosa
atgttcgcgccagccaatagtgcgcactttgcgctatcgatcccctccgtacgcaacgacttcaaggtactggctttcgatggcaccgaagccatcagcaccctgtatgccgtccgtatcgaactggtcagcgagaaccccgatttcgacctggagggtttgctcggtcaaccggcatttctccagttcggcctgagcggcgaagggatccatgggcatatcgaagacgtgtacgtgggcgaagccggtaggcgcctggcgcgctatcacctgaccctggtgccggtattgcactacctgcagttcagcttcaaccagcgcattttccagcacctgacagtaccgcagatcatcgcacaggtgctggcaggccatggtatccagcctgatgtctacgtcttcaatgtccactccagcccggaacgcgaatactgcacccagtacggtgaaagcgatttcgatttcatccagcggctgtgtgccgaggacggcatcgcttggcaccaccagcattcagcggataatcacctgctggtgttcaccgaggaccaggcctggttccccttgctgggatgtacgccataccgccaggatactgggacggtcgccgatcatccggtggtcaatcggttttcccagcgtttcagttcccgcaccagcaaggtgactcgccgcgactacgacctgaagcggccaagcctgttgctggaaagccagttcaccgcggagttcgagccggccctcgaggactatcgttatccttcgccgatcactacgctggagcgtggacaggtgttggccagacaggctctggaacggcatcgtgtcgattaccagttggccgaaggccagagcgatcagccgacgttgcgcagcggtcacttcttcaagctgaccgaacatccgcgcaagacatgcaacgaactgtggttgttgctgagcgtcacgcactctggtcggcaaccccagtcactcgaagagtccgtgaccggggatagccaggcagaagacggcttcacccagggttatcgcaataccttcaccgccattccatgggatgtgtttttccggccgccgctgctgacgcgccgacccctgccggggtgccagaccgctcgggtcaccggtccggccggcgaggagatcttctgtgatgaatacgggcgggtgaaggtcgagctgcattgggacagacgggaactgggaagcgacaaaagcagttgctggctgcgggttgcttccagttgggcaggcgagcgttttggcgcggtgaccattccgcgcattggcatggaagtggtggtgagcttcctcgaaggcaacccggaccgcccgctgattaccggtgtcgtgccgaacaagaccacgcctgtgccctacgcgctgccggcgaacaaaagcagaaccgtattgcgtagccgaagtacgccgaacagcggcggctacaacgaactttcgatcgaagaccgggcaggccaggaaaagatcttcctgcgcgcgcagcgtgatatcgagcaactgatcctcaacgacagtcacaccagcatcggcaatgaccgtcacgaacggataagccgggacagccgcagcctggtcgaaaacgaccgctttgagcaggtgaacatgaacagttccagcctgatcaagggcgatgagctgcataccacccagggtgagcgccacacccggatcggcggcaacgaactgctttccatcagcggcgccggcagcatcgccgtggacggtacctgggtcgtgcaggccggatcacaggcccgtgtcaccgccaccaatgtgctagtcgatgccggcgtgaacctgacactcaaggccggtggacagcatatcgtcatcaactccgcagggattttcagcagcgtgccgatcgtgcagggcggagccccgatggccggcatcgcaccgcagcaggcactccaggctctggccgaagcagcacagaccgtcgtcgccaattcgctgcctctcgtggctgccgccaggcaacgcgccgcggacttctgcccgctctgcgaaatctgtcgcgatggactgtgccgtgttggaggtgccgcatga

SEQ ID NO: 324794 - DNA, 849 bp, Pseudomonas aeruginosa
atgaccacggccgaacaatggctgcagaaacaaggcgagctgggccgatacctgtacctggtactggactccgatggccagctcgacgagcgcgatgccttgctcgaagggcgcgaaccccatcagtacggcaatctgtatagcggtacgcccgccagttcgctggcggcgataggtccctacctattccggctcgatgcgctggaccatccggtcattcaggcgttgctcaagtcgcccgaacgtcattggggctggctggccagcagcgtgagcagtgatctggagtcgctggcccggcattggcgcactcgcctggtaacgggcgagcggccgaaccaggcgctttatcgctttcacgacagtcgcgtgctgggtcgcgccctggcacacctgcagccggagcagcgcccggcgttccttggaccgatctccagcgcgtgctactggctggccgggcgatggctccatgccgacaaccctgcccctggcgaccatcccgtgccggccgaaccggcgtggctcgttgtccccacggcttcggagacggcggcaggtattcagttcgacaacgcctggcgctacctgattgccgagtggacggagccgtttgcggaattggccgggcagcgggatgccgacgcctggcttcgggcgcagttggaactggcccgcacatggggctggcgggcgcctgaacagatccgctttctactgcttcaacgcctgttcgcatcggatgacgctctgcccaggtcctggtcacccctgcctgacgaaacccccacgacgcatttcgagcgtgtgtatcaggaggtgcggttctggcaaggagacgcccccgtatga

SEQ ID NO: 324795 - DNA, 453 bp, Pseudomonas aeruginosa
atgaactgcacccttaaaaacatgacccttgccagttgccttgtgctggcacagggctgcactgccttgggcacgtccaacagttttaccgttacggcggacctgccgcctgagttcacttatgaagccacggcaacttatgtgccggccaaaggtgaaacctgcacggtgccggggggaaaggatacgcaaattggctacaactcggggcgggaaaaatatgaacgggattcgaagatattgttacgccgtacggtcagtggctgccccttggtactgcagaatatctatttttatgtatatggttggtatggcaaggattggggggatttcggacgagactcagcaatgattgccgtgcgcgaaaagctggtcgaagtgaaaaagggtactttaatgccgccggggaaagtgagttctccgggtagtgccagtttctattccgcacggtag

SEQ ID NO: 324796 - DNA, 297 bp, Pseudomonas aeruginosa
atggatgagacgggcgtgcggcgcaaagcgaaacctttcgtggcttacaccctggatcaactgcccggcaagacggtgaagttgaggatcaagttggctgatgaagagcgcccctatatgaaggatacctgggtcaaggttcctggtgggtggaagcgctgtatggggaaagggtttgaagatcaatatgcattctgctacggaaactacaaggacttcagcaccttcagaatgccggatggacgcaactgcaccctctatcccggttgtacggaaaacaaggcggtgaccccatga

SEQ ID NO: 324797 - DNA, 792 bp, Pseudomonas aeruginosa
atgaaccgcacccttaaaagcatgacccttgccagttgccttgcgctggcccagggctgcactgccctgggcacgtccaacagttttaccgttacggcggacctgccacctgagttcacttacgaagccacggcaacttatgtgccggccaaaggtgaaacctgcacggtgccggggggaaaggatacccaagttggctacaactcgggtcgggaaaaatatgaacgggattcgaagatattattacgtcgtacggtcagtggctgccctttggtactgcaaaacatcgatttctatatctatggctggtatggcaagagttggagggatttcgggcgtgactcggccctgatcgtcgtacgagacaagctggtcgaggtgaaaaaaggcactttcaatgcggccggggaaagcgagtttgccgggcaatgccagtggctgtttcgtacagccgggaagacccgtgttctgagaaagctcctcgattgcaaaaggatggatgagacgggtgtacggcgcaaagcgaaacctttcgtggcttacaccctggaccaactgcccggcaagacggtgaggttgaggatcaagctggctgacgaagagctgccagctatcggcgacacgtgggtcaaggtacctggagggtggaaacgctgcttgggtgataactttgaagatcaatacgcattttgctatggaaactataaggacttcagctccttcagaatgccggatggacgcaactgcaccctctatcccggttgtacggaaaacaaggcggtgaccccatga

SEQ ID NO: 324798 - DNA, 2238 bp, Pseudomonas aeruginosa
atgacccctgggccgatggaggagtgggaaaagccgttcttcagtgaacgtatccatgcctgcccgcgacgcacccactcgaccagttttcaactggtggatgagcggggggatggcaggccctatgccggcctggcttatgaagtcagcgattctgaggaggttgtctaccttggtgttctggacgaaacagggacaggccgagtcaatcggcactattgcgggccggtggttcttaagctcgctcaagcctatcaagggagtgagaagagctacacgtttttacaaaagaggccacattacccgctccccatcactgagctgcaagtacgtgccgagaagacccgctttgtaaaccctgacggcgcccgcacccggtccaaccccgcccaaggccaggccgattctttctgccaggtcgaggtgagcgaactggtggagcaccgggcccatcttccgcccctggcgctccggtactttccgcctcggcaccaggtgcatgcgctgatgcgccgtccctcggccgccatggcggagttgggatttgctcccaggcctccccgggttcgcggtatcgcgctgttgccgaaccggcaccatgtgctggaggtgcgccccttgcgggcgctgagtccgctcctgtccacgggcgaagcgttctgctacctcaacctgtaccagttggcgctgatgtcgaccctgagctatagcccgtttggccaggaacccgatacgcaaccggtggaaaccgacgccgtgagctttccggcgcaacccagcgtcggcaactggttcggcgatgccctggccaggtccgatgagctgtggcaagtggacgcaactcaggccggcgggaaggcttactaccccctgtatgaagaagtggcctactccaggcgcctggaggtcataccgttcgaccccgagctataccccgaagtgaacagccccgaactcggggcggatcaggaacatccggccaggctccattacctgaacgatgccaaaaaacgggggagtaccgatacgcaagcctatgtcacccacaacgatgagctgatcctgctggtggtacgcggcaccgcgagtatggctgacgttctgcgcgatgtggatgctgcgcagacgccgttcgaggaaaccagaggcaaggtacacaacggcttttacgagtcggccaaggtggccatcaagttctttgcaacctacctggataagttctacagcgggcagaagctggtgatcaccggccatagccttggtggcgcggtggctttgctggtcgccgagatgttgcggcaacaaccagaaaaatatgacatcgtgctctacacctacggcagcccgcgcgtaggcgacaagaccttcgtggaaaacgccaggcctctggtacatcaccgcatggtcaaccagaacgatccggtgcccagtgtcccggcggcctggatgaaaacgtcctggcgcatgtcgggggcgggcgtcctgctgatgctcttcaaccccgccatcggaggggcggtggtgctcctgagtcccgtcaacatcgtcggcgagccttacacgcaccacggcaaactgcgtcatttcatgcccgtgtcgtttgccgatggccacaagtccgcgatcctgtggacgcccggctgcgaaagcattaccgagcgcggcggcgcggcggtttgcgccaaggcactggctgcaaggaatggcttgccggagcgaggcgggctgctgcggcagatgctggataatgccgatcacaagatggtcgccagctacattccgcattgctgggcttccttgcgccgtgcgcaagaggccttggaggaaggccgcaccgtggtgactccgaccgagtatgagcgggtcggggaagcgctgcaggacttcaaggcgcagttgcgggaaaaggaggctgtggcctacggttctgccagggaacaacagataatggggccattgcgcgctgaaatcggcaggttgcaacagaccgctgtgcgactgaaagcattgagcgtcgagcgtgtcagcgaggccaaggtctacggccgggttgccgagcggcccgaggcgctggcggtgagcctggagcgctggctggcgcactcgttcaatcgctcgcatgaacaactcgcgatggccccgccggatgccgacagcaatgagcgcgcgatcgctaccctggtaggcggccatgcccctggagcggtgttcgatctggatatcgatacgcttggatag

SEQ ID NO: 324799 - DNA, 3288 bp, Pseudomonas aeruginosa
gtgaccgctcccttcaacgccttgctgatcgccaaccgcggcgagatcgccattcgcatcgcccgcgcctgcgacgacctgggtatccgctcggtggcggtgttcgcggaagacgatgccgcgtccctgcacgtgcgcaaggccgatgtcgcgctgccgctggccggccgtggcgtggcggcctatctcgacatggatcggctggtcgcgctggccctggagcagggctgcgaggcgatccatccgggctacggtttcctcgccgagaacggcgaattcgcccgtcgctgccagcgcgcgggcatccacttcgtcgggccgcaagcggaagtgctcgacctgttcggcgacaaggctgccgcgcgcgccctggccgagcgcctggaggtgccgctggtggccgggatcaaccgtgcggtcagcgtcgaagaggccgaggcgttcctggaagggctgggcgatggcgccgcggtgatgctcaaggcccttgccggtggcggcggacgtggcatgcgcgcggtggaggaggttgcgcaactggccgatgcctaccgccgctgccgtgccgaggcgcaggcggcgttcggccgggacgagttatacgtcgagcaacgggtagcgcgggcgcggcacatcgaggtgcaggtgctcggcgacggcagcggtgcggtcagccacctctgggagcgcgattgcagcctgcaacggtgccagcagaagctgctggagatagcccccagcccggacctgccggaggccactcgcgaggcgctgatcgattgcgccctgcgcatggccggcgcggtgcgctatcgggggatcggtaccttcgagttcctggtcgacgacgagcgccccgggcgcttctatttcatggaagccaatccgcgcatccaggtggagcacaccgtcaccgaggaagtcaccggggtcgacctgctgcacgcccagttgcgtctcgccgccggcatggagcttgccgccctcggcctggagcgaccgccggcgatcggcggctgcgcggtgcaactgcggatcaacctggagaccctggcggccgacggcagcggccgtccggcggtgggcactatcggcgcctacgaaccgcccagcggtcccggcctgcgggtggacggctacggctatgccggctatcgggtcagccccagctacgattcgctgctggccaagctggtcgtgcgtggtgcggattatcccgccgcgttgcgtcgggcctaccgggcgctctgcgaattccgcctggagggcgtggcgagcaacctggatctgctgcgcaaccttctgctgcatccggcggtacaggccaaccgggtcgacacccgcttcgtcgaaagccacctggagacactgctggcgcctatcccggcgagccatccgcggctccgcgccgagtgcccgctcgccgaggacgcagcgcctgcgcgggtcgaggcgccactcggcagcctgccgctgcctgcgccgagcagcggggtgctggtggccctggaagtggccgagggcgaacgggtgcgtgccggccagcgggtcgcgatcctggaagcgatgaagatggagttcgaggtcaaggcacccggcggcggtatcgtccggcggctcgcggcgagcctcggggagcctctggaggagggcgcgacgctgctgttcctcgaaccgacggaggatgacgacgagcaggcaccgaccgaacaggcgctggacctggcgcatatccgcgccgatctcgccgaggtactcgagcgccaggcagcgctgggcgacgagcgtcgtccgcaggcgctggccaggcggcgcaagaccggacagcgtaccgcgcgggagaacgtgctcgacctgctggacgagggcagcttcagcgaatatggcggtttcgccctggccgcccagcgtcgccggcgctccgccgaggagttgttggagctgagccccgccgatggcctggtcgccggcaccggtacggtgggggccgccagcttcggcgcgcaggccgcacgttgcctggtgctggcctacgactacacggtgttcgccggcacccagggggtgatgaaccacaagaagaccgaccgcctgctcggcctggccgaacagtggcgcttgccgctggtgctgttcgccgagggtggcggcgggcgcccgggcgataccgatttcgtcggcgtcgccggcctcgattgccataccttcgtcggcatggcccgactctccgggctggtgccgctggtgggagtggtctccggtcgctgcttcgccggcaatgccgcgttgctgggctgctgcgatgtgatcatcgccacccgcgacgccaccatcggcatggccggtccggcgatgatcgagggcggcggcctgggccgtttcgccgccgaggaggtcggtccgacgggcgtgcaggggcccaacggagtgatcgacgtactggtggaggacgaggccgaagcggtcgcggtggccaggcgctacctcggctatttccagggcccgctgcccgactggagttgcgccgaccagcgcgagttgcgccacctggtgccggagaaccgcctgcgtgcctacgacatccgccaggcgatcgaggtcctggccgaccgggacagcgtgctggaactgcggcgccagttcgctcccggcctggtcaccgcgctgctgcgcatcgagggccgggcgttcggcctgatcgccaacaaccctggccatctcggcggcgccatcgatgccgcggccggcgacaaggccgcgcgcttcatgcagttgtgcgacgccttcgacattccgatcgtctcgctctgcgacacccctggcttcatggttggcccggaggcggaaaaacaggccacggtgcgccacgtctcgcggatgttcgtcagcgccgccagcctgacggtgccgttcttcaccgtggtcctgcgcaagggctacggactgggtgcccaggccatggcggcgggcagcttccattcgccgctgttcaccgtcgcctggcccagcggcgagttcggcgccatgggcctggaaggcgcggtgcggctgggcttcgccaaggagctggcggccgaggaagacccccagcggcgcgaggcgctgttccgcggcatggtggacaaggcctaccgcaacggcaaggcgctgaacatggccagctacctggagatcgacgcggtgatcgacccggcggagacccgcgcctggctcctgcgcggcctggccgtcgctggagaaccggcgccgagggcggggcgcaagcggccgttcgtggatacctggtag

SEQ ID NO: 324800 - DNA, 1257 bp, Pseudomonas aeruginosa; identical to SEQ ID NO: 318954

SEQ ID NO: 324801 - DNA, 708 bp, Pseudomonas aeruginosa
atggactgccctaccctcagcaaggtattgctcgtcgaagacgaccagaagctcgcccgcctgatcgccagtttcctttcccagcatggtttcgaagtgcgccaggtgcatcgcggtgatgccgcgttcgccgccttcctcgacttcaagccgcaagtggtggttctcgacctcatgctccccggacagaatggtctgcaggtgtgccgggagatccgccgggtcgcgaacctgccgatcctcatactcaccgcccaggaggacgatctcgatcacatcctcggcctggagtccggcgccgacgactacgtgatcaagccgatcgagccaccggtgctgctcgcccgcctgcgcgccctgatgcgccggcacgcgccccttcccgcgtccccggaaagcctgacattcggcaagctgaacatcgaccgacggcggcgcgaagcggaactcgaaggcctcggcatcgaactgaccacgatggagttcgagctgctctggctgctggccagccaggcaggggaaatactttcccgcgacgagatcctcaaccagatccgcggcatcggtttcgacggcctgaaccgcagcgtcgacgtctgcatcagcaagctgcgcaataaactgaaggacaatccgcgcgagccggtccggatcaagactgtctggggcaagggctacctgttcaacccgctgggctgggagctctga

SEQ ID NO: 324802 - DNA, 1833 bp, Pseudomonas aeruginosa
atgtttcgtgcaatgcatctttcccttctcggctgcctgctcggcaccagcggctgccacggactgccgcccgccccgccagcgccgagcgccgccgtgggcaactacggcgaggtcatcgactatctgcaacgccacatccgccgggaaatggaaaggcaggacgtgcccggcctggccctggcattggtcgacgaccagcaactggtctgggcccgcggtttcggctatgccgaccgacagcacaggatcaacgccagcgagcacaccgcattccacgccggcgacctgtccaagctactgatcgccagcgcgaccctgcaactggccgaacgcggccaactctctctcgacgctccgctccaggacaccttgcgcgagttctacgtacgctcacgcttccatgccgaccagagcgaggcggatcgcgcgatcactttccgccggctgctcagccatcagtccggccttcctggcgaacacctgccgcccctgttcggcgaacgcccgaactcactcggccaactgccggcgaaagtatccggtgtctggctgagcaatccgccgggaacccaggtcgcccattccaaccttggctacgaactggtcggcgcggccatcgagcgcaacaccggaaagcacttcgagcagcacatgcgcgagcacctgctggaccctttgcagatgactcgctccagcttcgccaggaacgccctgccccaggcgcaacgcgcccacggctacagcggcggcggtcgccccggctccgccagcgacctcccggtcaacgatctgtggagcagcccggtcgacctcagccgcttcgtccgcatgctgttcgccaacgggcgccacaaggagcgccagcttctcaggaaacactccgtcgaggagatgttccgccagcagaacgccggcaatgccctggacttcgactgccaggtgggcctggcctggttcctcagcccgtgcggctccgcaccgctggaaggaggcatccgtcactatgagtacgccagcgccaccccaggattcagcgcccatctgattctgctgccggaacagcgcctcgccgccattgtcatgagcaacgccgatgacagcgggtcgctcactgcctccctggcccggcaagcggcgtcgctcatgctgcaggttaaacagggcgctcgtcgccccgccgtacagcccacccccgcgcgcgcccccgcactggaggtgccgagcccggaggaccggcgacagctatacggtcgctacgcaacccgccaaggccagattcgcctgtacgagcgcaggggtcgcctgtacgcggatttcggcgaacaacgcgtggaactgttgcgcgacacctcgggctggctgcagatgagaaaaagactgctggggttctggcctgtcggcgtggacagcgccggacagttgcaactggacgtggtcagctacggccaacgccgaatcctggtgtcccgccgccacgaccagaccgcctacctcggcgagcgcatcgagccgacatccctgccccaggcctggaccgaagccgtcggcacctaccgcgtcgccagcacgggccggcacagctacctgaacggcctgagcatcaggatcgaagacggcttcctgctggtgcgcgggcaagccggaggaacccgctccggcgagttcatcctgcaacccatcgacagcgcacacgccgtcctggccggcagcggccagggcctgggagacaccttcagtcgcgacttcgacggtctgaacgcgctcggctaccgcttcgcccagcaagacatcaaggcacgtccctggctgcaacggaaggagtccccatga

SEQ ID NO: 324803 - DNA, 1671 bp, Pseudomonas aeruginosa
atgagcaagccagagaccaccgccgccccgaacttcctgcgccagatcgttcaagccgacctggatgccggcaagcacgcgaagatcgtcacccgtttccccccggagcccaacggttacctgcacatcggccacgccaagtcgatctgcctgaacttcggcctggcccaggaattcgctggcgattgccatctgcgcttcgatgacaccaacccggccaaggaagaccaggagtacatcgatgccatcgaggccgacatcaagtggctgggcttccagtggtccggcgaggtctgctatgcctccaactatttcgaccagttgcatgcctgggccatcgagctgatcaaggccggcaaggcgttcgtctgcgacctcggtcccgaggaaatgcgcgaataccgcggcaccctcaccgagccgggccgcaacagcccttaccgtgaccgttcggtggaggagaacctcgacctgttcgcccgcatgaaggccggtgagttccccgacggcgcccgttcgctgcgggcgaagatcgacatgggttcgccgaacatgaacctgcgcgatccgatcctgtaccgcatccgccatgcgcatcaccaccagaccggcgacaagtggtgcatctacccgagctacgacttcacccacggtcagtcggacgccatcgagggcatcacccattcgatctgcaccctggaattcgaagaccatcgtccgctctacgagtggttcctggccaacctgccggtacctgcgcaaccgcgccagtacgaattctcccggctcaacctgaactacaccgtgaccagcaagcgcaagctcaagcaactggtcgacgaaggccatgtcagcggctgggacgatccgcgcatgtcgaccctgtccggctatcgccgccgcggctacaccccggagtcgatccgcaacttctgcgagatgatcggagtgaaccgtgccagcggcgtggtcgacatcggcatgctcgagttcagcatccgcgaccacctggacgccaccgcgccgcgtgccatgtgcgtgctgaaaccgctcaaggtggtgatcaccaactaccccgaagggcaggtggagaaccttgagttgccgcgtcatccgaaggaagatatgggagtgcgcgtactgccgttcggtcgcgagctgttcatcgatgccggtgacttcgaggaagtcccgccggccggctacaagcgcctgatccccggtggcgaggtgcgtctgcgcggcagctacgtgatccgtgccgacgaagcgatcaaggatgccgacggcaatatcgtcgaactgcgctgcagctacgatccggacaccctgggcaagaacccggaaggccgcaaggtcaagggcgtgatccactgggtgccggccgagggcagcgtcgagtgcgaagtgcgcctgtacgatcggctgttccgctcggccaatccggagaaggcggaagagggcggcagcttcctcgacaacatcaacgccgactccctgcaagtactgaccggctgtcgcgccgagccgtcgctgggccaggcgaacccggaggatcgcttccagttcgagcgcgaaggctatttcgtcgccgacctgaaggactccaggccgggcaagccggtgttcaaccgtaccgtcaccctgcgtgactcctggggacagggctga

SEQ ID NO: 324804 - DNA, 3078 bp, Pseudomonas aeruginosa
atgtccttcaacctttccgcctgggcgttgcagaatcgccagatcgtcctgtacctgatgatcctgcttggcgcggtcggcgcgctgtcctacagcaagctggggcagagcgaagacccgccgttcaccttcaaggccatggtggtgcagaccaactggccgggcgccagcgccgaagaggtggcccggcaggtcaccgagcgtatcgagaagaagctgatggaaaccggcgactacgatcgcatcgtgtccttctcccgccccggcgtctcgcaggtgaccttcatggcccgcgaggacatccattccagcgagatccccgaactctggtaccagatccgcaagaagatcagcgacattcgcgccaccttgccgcaaagcatccagggcccgttcttcaacgacgagttcggcaccacctacggcaacatctatgcgctcaccggcaagggcttcgactacgcggtgatgaaggactatgccgaccgcctgcaactgcaattgcagcggatcaggaacgtcggcaaggtcgagctgatcggcctgcaggacgagaagatctggatcgacctgtccaacaccaagctggccaccctcggcctgcccctggcggcggtacagaaggcgctggaggaacagaacgcggtggcctcctccgggttcttcgagaccgccagcgaccgcgtgcagttgcgcgtttccgggcgtttcgattcggtggaggagatccgcgacttccccatccgcgtcggcgaccgcaccttccgcatcggcgacgtggccgaggttcgccgcggcttcaacgatccgccggcgccgcgcatgcgcttcatgggcgaggacgccatcggcctggcggtagcgatgaagccgggcggcgacatcctggtgctgggcaaggccctggaaaccgagttcgcccgcctgcagcagtcgctgccggccggactggaactgcgcaaggtgtccgaccagccggcggcggtacgtaccggggtcggcgagttcatccgggtgctggccgaggcgctggtgatcgtcctgctggtgagcttcttctccctcggcctgcgcaccggcctggtggtggcgctgtcgatcccgctggtgctggcgatgaccttcgccgccatgcattacttcggcatcggcctgcacaagatctccctcggcgccctggtgctggcgctgggattgctggtggacgacgcgatcatcgcggtggagatgatggcggtgaagatggagcagggctacgaccgtctcaaggcggccgccttcgcctggaccagtaccgccttcccgatgctcaccggcaccctgatcaccgccgccggcttcctgccgatcgccaccgcgcagtccggcaccggcgaatacacccgctcgctgttccaggtggtgaccatcgccctggtggtctcctggttcgccgcggtggtcttcgttccctacctgggggccaagctgctgccggacctggccaggttgcacgcgcagaagcacggcggcagcgccgatggctacgatccctatgctacggccttctaccagcgcttccggcgtctggtggagtggtgcgtgcgctaccgcaagacggtgatcgtcctgaccctcgccgccttcgtcggcgcgctgctgctgttccgcctggtgccgcagcagttcttcccgccctcggcgcgcctggagctgctgctggacatcaagctggcggagggcgcctcactgcgctctaccggcgaggaagtccagcgcctggaaaaaatgctgcagggccatgacggcatcgacaactacgtggcctacgtcggcaccggctcgccccgcttctacctgccgctggaccagcaattgccggcggccagcttcgcccaggtggtggtgctggccaaggacctggagagccgcgaggcgctgcgcaagtggctgatcgagcggatgaacgaggacttcccgcacctgcgcagccgtatcagtcgcctggaaaacgggccgccggtgggctatccggtgcagttccgggtttccggcgaggacatcccgcaggttcgcgaactggcacgcaaggtcgccgacaagatgcgcgagaacccgcacgtggtgaatgtgcacctggattgggaagagccgagcaaggtggtgtacctgagcatcgaccaggagcgcgcccgtgccctgggggtgagcaccgccagcctgtcgcagttcctgcagagcgcgctgaccggctcgcacgtgagcttcttccgcgaagacaacgagctgatcgagatcctcctgcgcggcaccgagcaggagcgtcgcgacctgtcgttgctgccgagcctggcggtgccgaccgagaatggccggagcgtggcgctgtcgcagatcgctacgctcgaatacggcttcgaagagggcatcatctggcaccgcaaccgcctgccgacggtcaccgtgcgcgccgatatctacgacgattcgctgccggcgaccctggtcgcgcagatcgccccgaccctggaaccgatccgcgccgagctgccggacggctacctgctggaggtgggcggcacggtggaggacgcggcgaagggccagagttcggtgaacgccggcgtgccgctgttcatcgtggtggtgttgagcctgctgatggtgcagttgcgcagcttctcgcggatggcgatggtattcctcaccgcaccgctgggcctgatcggcgtgaccctgttcctgctgctgttccgccagccgttcggcttcgtggcgatgctcgggaccatcgccctggccggcatgatcatgcgcaactcggtgatcctggtggaccagatcgaacaggacatcagccatggactggatcgctggcacgccatcatcgaggctaccgtgcggcgtttccggcccatcgtgctgaccgcgctggcggcggtgctggcgatgatcccgctgtcgcgcagcgtgttcttcgggccgatggcggtggcgatcatgggcgggctgatcgtcgccaccgtgctcaccctgctgttcctgccggcgctctatgccgcctggttccgcgtgaagaaggacgaggcgcgggcctga

SEQ ID NO: 324805 - DNA, 336 bp, Pseudomonas aeruginosa
gtggccttcgacgaccgcgcgactccggccgaactgggccagagcgcgcgggtctacgtcgccgccgccgaggcggtgccgttatcggttcccttgtcggcgctgaccgcagaggccggccaggcgttcgtctgggtggtcgagccgggcagctcgaccctgcgccggcaggcggtgcgcaccggtccctatgccgaggaccgggtgccggtgctcgaaggcctgaaggctggcgactgggtggtggccaccggggtccaggtgcttcgcgaagggcagcaggtgcgtccgatcgaccgggccaaccgcacggtgaaactggcggccaaggagtag

SEQ ID NO: 324806 - DNA, 1158 bp, Pseudomonas aeruginosa
atgagcgcttccgacaagactctcgccagcgcctctccggcgtccggcaacctcgcgctgctcgcggccatcgtggtgttcgccgcgatcaccccgaccatcctgatgaccgcccccgccgtcgccgcgcaactggcggcccagtggcaactgagcccggcgcgggtcggcgacctgttttcggtggagctgggcgccatgagcctggcgacgctgccggccttccattggctgaaacgcgtcgattggcgccacgcggcgctgctcgccggcctgctgttcatcgccgccaacctggcctcggcgctggccggcagctacccgctgctgctcgccctgcgtttctgcagcgccctcgccggcggctcgctgatgatcctctgcctgtccagcgccgccagcaccgccaccccgagccgggtctacgggctctgggtgatgggccaactggtggtcggcgccgtcggcctggcactgctgccggcgctgttcgaacgcttcggcctggccgcctgctacctgttgctggccggcctgatgggcctcgccctgccgttgtcgcgggccttccccagtggcagcccgccagcggaagcccgcgccagtaccggcgcggttcactcgcgactgcgggtcgggctgggcatcctcgccgtgctcaccttctatatcagcctcagcggcgtctggaccttcatcagcgccatcgccgaaggcgcggggatcggtaccggcgccagcggcgaggtactcgccgtcgccaccctgatgggcatcgccggggcggcctgcgcctccttcatcggcaaccgcctgccgcgcgacctgatgctgctcggcggctacctggcgatggccgcggcgatcctcctgctgatcggccagccgccgctggcgcgcttcgccctggccgcgctgctgttcaagttcacctggaccttcgccctgccgttcatcctcgcctgcctcgccgacctggaccgctccggccgcctgatgaacgcctccaacctggtcatcggcggcgggctggccatcggcccggcgctggccggacgactcatcgaaggcagcggcggtttcctcccgctgctgccgatcgccgccggcctggccgccctctcgctgctgctggccctggcctgccggccacgctga

SEQ ID NO: 324807 - DNA, 909 bp, Pseudomonas aeruginosa
atgatctctttgcggcaactccattacttcgtcgaaatcgtcgagtccggcggcttcagccgtgccgccgaacgcctgttcgtcgcccagtcggcgctcagccggcaggtgcgcgaactggaggacagcatcggcaccccactgctccgccgcggtccgcgccaggtcgagctgacgccggccggtcgcgccttcctgccacgcgcgcagcgcctgctcggcgacctggaggccgcccggcgcctggctcgcgaggtcggcgaaggcggccatggcctgctgcgcctggggcactccagctcggtgccgctggtgggcggcctgcaagcggcgctgcgcggctacctcgcggcgcagagcggcgtccgcctggaactgacccagcaatcctccgagcagcaactcgccgatctcgccgaaggacgcctggaccttggcctgctgcgcctgccggtgctgcgccagcatccccggctgcacctgcgcgccctgtaccgcgagccgttgctcctggctctcgccgccgaccatccgctggcccgccgtgaagcccccgtggccctggccgccctggccggagaaaccttcgtctccattccccacctgcaacgcggcggcctcagctatcgcgccgccgaactctgcctcggcgccggtttctacccacgcccggcgcgcgcgctgtcgcgcaagaccagccagttgcaactgatcgaggccggcttcggcgtcgccctggtgcccgcctcgatgcgcgccatcgcaccgcccgccgtgcgcttcatgtctctggccgaggccgaggcatacagcgaggtggcgctggcctggcgacgcgacgatagccccctggtggaaggcttcgtcgaatatttcctggagaatctgccgaacgaagccaaggattga

SEQ ID NO: 324808 - DNA, 936 bp, Pseudomonas aeruginosa
atgatccgcctcagccagcgcgccctggcctacctcaacgaggtgatccaccacggttctcttcgccgcgccgcccagcacctgaacatcgacccctcggccatcagccggcagctcgccagcctggaggaacatctcggcgtgcgcctcctgcaacgcaccccgcaaggcgtggcgcctaccgaggccggcgagctgctggtggcgcactaccgccagcaacgggccaacgaagagggcgtgctgtcgcgtctgtcggccctgcaggggctgcgccagggcaaggtgcgcctggcggtcggcgagggcttcatcgccgacctgatctcccagccattgcagagtttcatcctgcgctaccccggcatcgagctggaggtccgcatggccggggctaacgaaggcgtggcgctggtcaaggaagacgccgtcgacctggccctggtctacgccccggtcgaggacggcgaactggacgtgcacgtcgacacccgccagcccctcgacctgatcatccccgccaaccatgccctcgccggacaccgcggcgcggtgccgatgcgcgcgctgcgcaacgagtcgctggcgttgatccacaacagcaccggcatgggccaactggcggtgatcgccgcccaactggagcgcatcgagctaaggccgaagctgcgcaccaactcggtggcggtgctgaccaatttcgtcaagtccggcatcggcgtggccttcatgccggagttgacggtcagccacgagatcgaggccgggcatatccgttgcctgccgctggcccacccggcgctgcgcgacgcccgcgcgcggatcgtcagccacaagggccgcgagctgaccgtggcggcgatcgcctgcctggaacacctgcgccgcggcatgcgcttcttcagtggcgacgcgcccgggctctcgcagcgctga

SEQ ID NO: 324809 - DNA, 591 bp, Pseudomonas aeruginosa
atgaaaaacattctcctgctcaacggcggaaagcgtttcgcccattccgacggtcgcctcaaccagaccctgcacgaaaccgccctggcccatctggaccgccgtggcttcgacctgcgccagaccctcatcgacggtggctatgacatcccgacggaggtggacaagttcctctgggccgacgtggtgatctaccagatgcccggctggtggatgggcgcgccatggacagtgaagcgctacatcgacgaagtcttcacggccggacacggcagcctctatgccaacgacggtcgtacccgctccgacagcacgcagaaatatggcagcggcggtctggtgcagggcaagcgctacatgatctcggcgacctggaatgcaccacggcaggcgttcgacgatccgagcgacttcttcgaagggaaaggcgtggatgcggtgtatttccccttccacaaggccaaccagttcctcggcatgtccggcctgccgacgttcctcgcggtggatgtgatgaagcgcccggacgtcccggctaccgtcgctgcctaccaggcgcacctggacagggtgttcgggcgcgccggctga

SEQ ID NO: 324810 - DNA, 2886 bp, Pseudomonas aeruginosa
atgctgacaaggtcgttgctgtccgcggtcttttgcctgttgctgatcgctctgcagccgctgcccgtcgaagccgaatccatcctgccggatgggcgtacgacgacaacgatgcgtccctggctcgataaacgagccaggcagtggctggatgcacgggagccgctgacggtaggcgtggtttcccccgactatccgccgttgtccatcttctacgcaggctcctacaagggcttcacggccgattacctggccctggtgttcgagcggccgttgcgcgtcagggactttccgtcgcggcaggcggcaatcgacgcgttgtcgcaaggggagatcgacctgcttggcgtcggtagcgaggtcgaggcccgacaacacggcttgctggcatccgctgcgtatctttccgaccggccggtactggtgtcttccagcggtgccccgttcgattcgcaggcggagtcctggctggccacggtcaagggctatcttcccgccgaacgtatcaaggctgcctatccgcacagcaggatcatctggttcgactcgccgcagcttgccctggaagcgctgagcatgggggatgtcgatggcgtgctgggggacgcagtttccacgcactacctcatccagacccattacctgctgaacttgcgcatcgagaacttcgcacccatcgacagccagggtttccgtttcctgctccggccaggtgacgaacctctgctcgcgctcatcgatcgcgccctgccgcatattagcgggcgctacggcgacgaactgttgcgcagctggagcgccgggcggcgcctgcgcttcgacgagccccgggtgacgctgtcgccggcggagcagcgttggctctccgcgcacccggtcgtgccggtggtgatcaaccattcccttggcgcgctcgggcaactggataacgaggggaggctgagtggtatcgggcgtgactatctggacctgatcggcaagcgcagtggcctgcggttttccttcactggagcacgcaacttcgtcgagacgaaaagccgactggatgcgggggaggcattggttacgccgaccatgccttcgtcggagcgcttcgattccggcctcgaagtgctgacgccctatctacgcagcaccacggtgctgatgggcgcccgccagggtggccgggatgaaagggtggggcgtgtccatggcctcgcggacctggcgggcaagcgattggcgacgacgattggctactttctcaacgacttcattcgacgcgagcacccggagatcaagctccaggtctatccgaccttcctcgccgccatgcgcagcgtagacgccggccagagcgaggccgccatcagcagcgactataccggtcgctatctgtccgcccagcatttcgacaaccggatccaggtcgtcggtatcctcgatgacctctccatcccgatcagcatcggcgtggcgaggaaccagccggagctgcggggcatcctggagaaggcccaggtggcgatcgctccggaagaagtggcggaaatcctccaccgctgggagcctcgcttcgccaagggaggggcggacttctggcgcgatcaccggagcaagattctgcagatcggcggattgttcggcgtactgatttccatctccctcatctggggtttctacctgatgcgccaggtgcgcaagacccgccaggcagaagagcaagccgacgctgccaaccgtgccaagagcgtgtttctttcgacgatgagtcacgagatccgcacgccattgaatgcggtcatcggcctgcaggaactggtgctgaaaaagggcgagaagggcgtgttggacctagattcgctgagcattgcccaggaggcggcccaggggttgctgcttctgctgggcaatattctcgatttgtcgcggatcgaatccggtcggttcgattcagctcccgaaccagtgcttcctggcgagttgatcagaggaatcctgccgttggttggtgggctgacgcggcagaagaatctttccctggcactggaactcgacggggatctcgagcattgggtgctggtggatcccctgcatttcaagcaggtgttgttcaacctgctgggcaatgccatcaagttcaccgagcgcggaggggtaacggtgcgggcggtggggcggcgcgaggcggagaggcttcatttgctgctcgaggtaagcgacaccggcctcggtatttcggaggaggaccaggccaggctgttccggccattctcgcaggtcggctctcctgcgcttggccaggcgtccggcagcggcctggggctgtacatcagccgacgcctggtgcacctgatgggcggccagatcagcctgcgcagcgaactgggcaacggctcctgcttctcggtcgagttcgatcttccgctgaccgggcctccgcccagcgagtccagcgaagcgcgttccggagttgccgaggtcgaggagcagaaagaggcaagggcgctctcgatcttgcttgcggaagaccatccgttcaatcggctgaccctgaccatgcaattggaaagccttgggcaccgggtgacctccacggaagatggcgaggaagcactcgaacgttggcagggcgaagacttcgatgtcgtgattaccgacggcatgatgccgcggatggatggctacgagctggcgcgacgtatccggtcgcaagaggcccttggcggtcggcgtcgctgcttggtgatagcgcttaccgccagcgccgagaaggatgcgctggagcgttgcctggctgccggcatggaccgggtcctgttcaagccgactacgctcgatgagctcgctcgggcgctgaacgggggagagccgctcatgcctacgagcgtcgattcgcaatga

SEQ ID NO: 324811 - DNA, 645 bp, Pseudomonas aeruginosa
gtgattaaggtgctggtggtcgacgaccacgatctggtacgcaccggtattacccgcatgctggccgacatcgaaggcttgcaagtggtcggccaggccgactgcggtgaagactgtctgaaactggcccgcgagctgaagccggatgtcgtcctgatggacgtgaagatgcccggtatcggcggcctggaggcgacccgcaagctgctgcgcagccagcccgacatcaaggtcgtggtagtcaccgtctgcgaagaggatccgttccccacccgcctcatgcaggccggcgccgccggctacatgaccaagggcgcgggtctggaggaaatggtccaggcgattcgccaggtcttcgccggccagcgctatatcagcccgcagatcgcccagcaactggcgctgaagtccttccagccgcagcagcacgattcccccttcgattcgctgtccgagcgcgagatccagatcgccctgatgatcgccaactgccacaaggtgcagagcatctccgacaagctgtgcctgtcgccgaagaccgtgaatacctatcgctaccgcatcttcgagaagctctcgatcaccagcgacgtggagctggcgctgctcgccgtccgccacggcatggtcgatgccgccagctag

SEQ ID NO: 324812 - DNA, 960 bp, Pseudomonas aeruginosa
atgtctcgtccgttcctgcgtcgcttggccatcgtgtttgccgcttccgccgtcctgtcgggcattggtggcgcacatgccgaggaggtcctgcgcatcggcttccagaaatcctcgactctgctgaccctgatccgcagccagggcaccttcgagcgcgagttggccaggcagggcatccgggtgtcctggcatgagttccccagcggcctgccgttgctcgaatcgctcaatgtcggcaacgtcgatctctccgccgacgtcgccgacaccgtgccggtgttcgcccaggcggcgggtgctcgcctgacctacttcgcccgcgaaacaccttcgcccgcggcgcaggcgatactggtcggcgaacattcgccgctgaagtccctggccgagctgaagggcaagcgcatcgccgtgaccaaggccgccggcagccactacctgctgatcgccgcgctggccagcgccgggcttgagttctccgacatccagccagcctacctgacgccagccgacggccgcgccgccttcgagaacggcaaggtcgacgcctgggtgacctgggacccctacgtggcaagcgcccagcgccagcaacgcgcgcgggtactggccgacggccagggcctggccagctaccagcgctactacctcgcctccagcgactacgccaggaaacatcctgaagtgctccagcaggtcttcgccgaactgcagcgcaccgggcgctggctcaagagccacccggccgacgcggccaaggtgctggggccgctgtggggcaatctcgatgccgctaccgtcgagcaggcgaatgcgcggcgcagctacgacgtacaaccggtgagcgcagatggtctcgacgagcaacagcgcatcgccgacgccttccacgcccagggactgctacccaaaccggtggatgcgcgcgccgtggaggtatggcagccgcggcactga

SEQ ID NO: 324813 - DNA, 1152 bp, Pseudomonas aeruginosa
atggccgtcctgcagactccctcggcggcgttcgacgaatggctgccggaactgacccggcaactggcggaaagcgccgatgcccatgaccgcagcggagattttccccatgccaacctggccctgctgcgacaccacgggctgctcgccctggccttgccgcctgcgctcggcggtcccggcgccagcctcggcgggctgcgccgggtaatcggcgcggtggctcgcggcgaaccctccacggccctggtgctgtgcatgcagtacctgcatttgcggcgcctggccgataaccccgattggcccggcgcgctcaagcggcgcgtggcgcgcgaggtgctggagcagggggcgttgatcaatagcctgcgcgtggagcccgagctgggttcgccgtcacgcggcggtctgccgggtacgctggcgcggcgtgtcggcgacggctggcagctgtccgggcacaagctctacaccaccggcattcccggcctgacctggctggcggtatgggcgcgcagcgacgagccgatcccccgcgtgggtacctggctggtgcgccgcgacagcccaggcatccgtatcgtggagagctgggaccatctgggcatgcgcgccagcggcagccacgaggtgctcttcgaagaggtggcggtgcctctggaaaacgccatcggcctgcatccccacgaccagcctccggcgccggaccaggccgtgctgcgcgacttcgcccaggctagcgcggtgttgctcggcgctctctacgacggtatcgccgggagcgcccgcgagtggctcgtcggctggctgcgcgagcgcgtgccggccagtctcggcgcgccgttggcgagcctgccgaggatgcaggaggcgctcggcgagatcgacggcctgctcctgcagaaccgcctgctgctcgatgccgcgtgctgcggacagttgcccgccagcgactccgggctgctcaaggtcgcggtcatcgacaacgcgttggcggtggtcgagaaggccctggaactgagcggcaaccacggcctcagccggcacaatccgctacagcggcactaccgcgacgtgctttgcggacgtgtccacacgccacagaaagatagcgtctggagcgcggcggggagggcggcgctgagtctttga

SEQ ID NO: 324814 - DNA, 951 bp, Pseudomonas aeruginosa
atgagtgaagtcaagcattcgcgcctcatcatcctgggctccggtccggccggctataccgccgccgtgtacgccgcacgcgccaatctcaagccagtggtgatcaccggcatccagccaggcggccagctgaccaccaccaccgaagtcgacaactggccgggcgacgtcgaaggccttaccggcccggcgctgatgacccgcatgcagcagcacgccgagcgtttcgacaccgagatcgtctacgaccacatccacaccgccgagttgcaacagcgccccttcacactgaagggcgatagtggcacttatacctgcgatgcattgatcattgccaccggtgcctccgcgcaatacctgggcatgtcgtcggaagaagccttcatgggcaagggcgtttccgcctgcgccacctgcgacggcttcttctaccgcaaccaggtggtctgcgtggtcggcggcggcaataccgccgtcgaggaagcgctgtatctggccaacatcgccaaggaagtccacctgatccaccgtcgcgacaagctgcgctcggagaagatcctccaggacaagctgttcgacaaggccgagaacggcaacgtgcgcctgcactggaacaccaccctggacgaggtgctgggcgacgccagcggcgtcaccggcgtacgcctgaagagcaccatcgacggcagcaccagcgagctatcgctggccggcgtgttcatcgccatcggccacaagccgaacaccgacctgttccagggccaactggaaatgcgcgacggctacctgcggatccacggcggcagcgaaggcaatgccacccagaccagcatcgaaggcgtgttcgccgccggcgacgtggccgaccacgtctaccgccaggccatcacttccgccggcgccggctgcatggccgcgctggatgccgaaaaatacctcgacgaccattga

SEQ ID NO: 324815 - DNA, 2145 bp, Pseudomonas aeruginosa
atgttccttcgccgcctgtccatccaatggaagatcaccctgctggcagggctctgcctgctcggcgtggtcgccttgctggtcggcctttcggtctaccgcatgcagcacagcagcgtgctggtgaaaagcgccagtacacagatgctcgacgaatcggcgcgcctgcgcctggaagcccgcggggaattgcaggcgttacgcatccagcgctatttcatggatgccttccagtacggcaagggcttctcccggcagatcctgttcctccgcgaccaggcgcagaagcgcttcctcgatgcctacgacctgcgcgaagacctgacccgccaggtgcgcaccgcgctcgccgccaatcccgaggtgctcggcctgtacgtggtcttcgaacccaatgcgctggacggcaaggacgaactgttcgtcgaccagcccgccctgggcagcaacgacaagggacgcttctccctgtactgggcgcaggccacgccgggacagctggaatccgagtcgatgatcgagtccgaactcgccgacaccagcagcgggcccagcggcgcggcctacaacgcctggtacacctgcccgaaggaaagcgggcaaccctgcgtgctcgatccttacttcgacaaggtcggcgaacgccaactgctgatgaccagcatcgcctttcccctcgaactggatggcaaggtgatcggcgtgatgggcctggacatcaacctgagcaacctgcaggcgctcagcgaacagggcaaccgcgaactctacgacggcgtcggccaggtcggcatcctcagcccggccgggctgttcgccggcaacagccgcgacgccggcctgctcggcaagaacctggccaaggcggatccgcagcacgccggcgaactcctgcaactgctggccgccggcaagagccggttgttcaacgagaacgacgacctcaaggtgctgcaaccgttgcagccgattcccggcgccaagccctggggcgtgctcctcgaagtgccgaagagcgccctgctcggcccggccctggcgctggagcggcaactggacgacatgcgtcgcgaaggcacctgggtcgaactgggcctcggcctcggcgccgcggtgctcggcctgctggtgctgtggctgagcgcccgcggcgtgacccggccgatcctcggcgtcgcccacatgctgcgcgacatcgccagcggcgaaggcgacctgacccagcgtctgccgcacaccgggcgcgacgagctgggcgaactggccggttggttcaaccgttttctcgacaagctgcagccgatcatccgcgacgtgaaggtctcggtgcgcgatgcgcgcagtaccgccgaccagtcggcggcgatttccagccagaccagcgccggcatgcagcagcagttccgcgagatcgaccaggtcgccaccgcatcccacgagatgaccgccactgcccaggacgtcgcccgtagcgccgcccaggccgccgacgccgcgcgcggtgccgaccaggcgacccgcgacggcctggcgctgatcgaccgcaccacccagagcatcgacagcctggccgccaacctgaccagcgccatgggccaggtcgagcaactggccagcagcagcgaggaaatcggttcggtgctggaagtgatccgcgccatcgccgagcagaccaacctgctggcgctcaacgcggccatcgaggcggcccgcgccggcgacgccggccgcggcttcgcggtggtcgccgacgaagtgcgcaacctcgcccggcgcacccaggactcggtggaacagatccgcggggtgatcgaaggcctgcaacagggcacccgcgacgtggtcgacgccatgcacggcagccatcgccaggcccagggcagcgtcgagcaggtggatgaagcggtggccgcgctgcaacggatcggcgaggcggtgacggtgatcaacgacatgaacctgcagattgccagcgccgccgaggaacagagctcggtagccgaggagatcaaccgcaatgtcgcggcgatccgtgacgtcaccgagtcgctgtcgagccaggccgaggaatcggcccaggtcagtcagtcgctgaaccgcctggccaaccaccagcagggcctgatggaacagttcaaggcctga

SEQ ID NO: 324816 - DNA, 969 bp, Pseudomonas aeruginosa
atgagttcctctcccaagccggtggcctggcaattgaaccgaggttcgatctaccaggatgtctacgagaagagaatcgataaacgtcctgtagataccctggcaaaactgcaagaggcctatctggaggacgagcatctggtcttcccctccgaacaaacccgcgtggcggcgttgagagatggcgttttcctgttgcggataccggacgatttccaggtccgcgactgcgacctgttcgccagcaatttcttcaagggcccggccatcgccccctacggtgcatttcgcgaactcacagcggaaaccttcgacgatcccctgctgggttttcacgaacgaatcaaccagattgagcaattcctgctggaacgacgcttctggaaaacccactacccagaggaaatcctccaggccggcgaacagctgaccgcttacagtcggcagttgctgcgtgccatcctgtcgctcaccgacatcgatccggaattctggagcctggctaccggcggtgcctcggacgcccagggttcctaccatttaaccttcaatcactatcgcccgcgcttcgcgggtgtcgggctggcttcccacaaggacgatgggttcctgacgctgttacgcaccaccgaaccggggctggaagtcaaccgcaatgatcgctgggaggcgctggagccctcacccgatcatttcgtggtcaactttggtctctccatggaagtgcttactcgcggctcctccacacccgtcagggccatcatgcacagggtcaggcatcagacccacgaccgctgcagcttcgctcatttcacctccagtcactgcactcccggcaccgaggcaggcatctacagctatgcaacgggagagggactcaggagagtctgcagttcgcgcgacatcatcgacgcgaacgacgaggagatctaccagggtacggtcatcagggagacggacaatccatga

SEQ ID NO: 324817 - DNA, 2025 bp, Pseudomonas aeruginosa
atgagcgatcatcagaacgggctgcatcttgaggcggaaaactggccgcgcgcgttgttcgccgtggccctggccttttccgtgttccaggtcgtcaccgcggcctttcccctgatttccacccaggtcctgcgggcaatgcacgtcggactgctgttgctggtggtgtacatcagctatcccgccttcggcataggtcgcccctggcagccgctggcctggttgctgggcatggccggcctgggcacggcggtctaccagtgggttttcgagggcgacctgatccagcgctccggagagctgacccaggccgacatggtcgtcggcgtggtgctgatcgtcctggtcttcgaggcggcgcgacgggtgatgggcatcgccttgccgatcatctgcgcgctgtttcttgcctatggcctgttcggcgaacacctgccgggcgacctggcccaccgcggctacggcttcgaccagatcgtcaaccagctgtcgttcggtaccgaaggtctctacggcacgccgacctacgtatcggccacctacatctatctgttcatcctgttcggcgccttcctcgagcaggccggcatgatccgcctgttcaccgatttcgccatgggcctgttcggtcaccgggtcggcgggccggccaaggtctcggtattctcctcggcgctgatgggcaccatcaccggctccggcgtggccaacgtggtcaccaccggacagttcaccatcccgctgatgaagcgtttcggctacaagccggcgttcgccggcggcgtcgaggcgaccgcgagcatgggcagccaactgatgccgccggtgatgggggcggtggcgttcatcatggccgagaccatcaacgtcccctacgtggagatcgccaaggcggcgctgatcccggccctgctgtatttcggctcggtgtactggatggtccacctcgaggcccgccgggccgatctaaagggcctgccgcgcgatcagtgtccgagcgcctggggtgccgtccgcgagcgctggttcctgctgattccgttgctggtgctgatcgcgctgctgttctccgggcgcacgccgctgttctccggaaccatcggcctggcgctgaccgccatcgtcatcctcggttcggcgatcatcctgcgggtgtcctcgctcggcctgcgcatcgccttctgggtggcgctggggctgctctgcgcggggttcttccgcctcggcatcggagtgatcttcgttgtgatcgcggccctggccctggcctgctggttcgtccgtggcggccgggaaaccctgcgcatctgcgtccgcgccctcgccgaaggtgcgcgacatgcgatcccggtgggcatcgcctgcaccctggtgggagtcatcatcggggtgatttcgctgaccggcatcgccaccaccttcgccagctacgtgctcgacctgggacgggagaacctgctgctgtcgctggtcctgaccatggtcacctgcctggtcctgggaatgggcatcccgaccatccccaactacatcatcaccagctccatcgccgcgccggcgctgctggaactgggggtgccgctgatcgtctcgcacatgttcgtcttctacttcggcatcctcgccgacctcacccctccggtggcgctggcctgtttcgcggccgcgccgatcgccaaggaaaggggattgaaaatcagcttctgggcggtgcgcatcgccctggcgggtttcgtggtgccgttcatggcggtgtattccccggcgctgatgctgcaggaaggcggttggggggcgacgctctatgtcacctgcaaggcggtgctggccatcggcctgtggggcatggcttccatcggctacctgcaggggccgctggcctggtgggagcgcctggtggcgttcgccgccggggccagcctggtcctggccttgccgatcagcgacgagctgggcttcgtcctcggcgcgctggtgatcggctggcacctctggcgccagcgtgcgcgcgaggcggtggcgtga

SEQ ID NO: 324818 - DNA, 294 bp, Pseudomonas aeruginosa
atgcgtaccgcatatgcgcgctccgtcccctccttcctggccgcttgcgccctgctctgctgcaccaccctgcccgccctggcggctgcctggaaacccgaagagaacctggagatcgtcgtcgccggcggtcccggtggcggcaccgaccaactcgcccgcctggtccagtcggcgatcagccagaacaagctgctcgacgtcaacaccgtggtgctgaacaagggcggcggcaacggcgccgaagccttcctcgacctgaagctggcccagggcacgcgcacaagctggtga

SEQ ID NO: 324819 - DNA, 723 bp, Pseudomonas aeruginosa
gtgatcggcaccaacaatgtctacctgctgccgctggtggcccggctgggctaccaatggaccgacctgacgccggtggcggcggtggccgaggacgacttcatcctctggacctaccaggcggcgccgtgggcggacgccgcggcgttcctcgccgatctgaagaaggacgcgacaggcatgcgcttcggcggcagccagtcgaaggacgtcgaccagactctaagcctgctgctcggcaagcaggtcggcggcaagctgacctacatccccttcaagagcggcagcgaggcgtccatccagttggccggcaggcacatcgccgccaacctcaacaacccggcggaaagcctcagccagtggcgcggcggccaggtccggccgctctgcgtgttcagccacgagcgcatgatctacaccgccaaggtcgctgccgagcagtcctgggcggacatccccacctgccacgaacagggcctgggcatcgaccagtaccgcttcccgcgcaccgtgttcctgcccggcggagtcagcgacgagcagcgcgccttctacgtcgagttgatgcgcaaggtcagccagaccgccgagttcagggactatgtcgaacgctcggcgctggcgccgaccttcctcgcaggcgaggacctggtgagctacatcgagaaggaccgccagcgcgtcatcccgctgttccaggaagccggctggcttcgccagtaa

SEQ ID NO: 324820 - DNA, 1521 bp, Pseudomonas aeruginosa
atgagcgaattcgattccctgatgcagggcatgagcctggtcctcagcgcccatcacctcggcctgatggtgatcggcgtgctgctcggcatcctggtcggcgtgctgccgggcctcggtgcgccgaacggggtggcgctgctgctgccgctgaccttcagcatgtcgccggtgtcggcgatcatcctgctttcctgcatgtactggggcgcgttgttcggcggctcgatcacctcgatcctgttcaacatccccggcgagccgtcgtcggtggccaccaccttcgacggctacccgatggcgcgcaacggccaggccggcgaagcgctgaccgccgccttcacctcggcgctcctcggggcgctggtcggcgtgctgctgctgaccttcctgtccacccatatcgctcgcttcgccctggcgttcagctcgcccgagttcttcgccgtctacctgctggcgttctgcaccttcatcggcatgagccgcaacccgccattgaagaccctggtggcgatgaccatcggcttcgccatggccgccgtgggcatggataccgtgtccggcgagctgcgcctgaccttcgaccagccctggctgctttccgggctgagtttcgaggtggcggtgatcggcctgttcggcatcggcgagatcctctgcacggtggaggaaggcctggtgtttcgcggcgagcgcgcacgcatcacgccgatggtgatcctgcgtacctgggccaggctgccgcgctactggctaacctggctgcgcagcgcgctggtcggctgctggatgggcgtcactccgggcggccccaccgccgcctcgttcatgagctacagcctggcgcggcgcttctcgaagaaccgcgagaacttcggcaagggcgaggtggaaggcgtgatcgctccggagacagccgaccatagcgccggcaccagcgccctgctgccgatgctgacgctcggcatccccggctcggcgaccgccgcggtgatgctcggtggcctgatgatctgggggctgcatcccgggccgacgctgttcgtcgaacagcacgacttcgtctggggcctgatcgccagcatgtacctgggcaacgtggtcagcctgatcgtggtactggcgaccgtgccgctgttcgcctcgatcctgcggattccgttcgccatcgtcgcaccgatcatcgtcatggtctgcgccatcggcgcctactcggtgcacaacgccatgctcgacgtggtcctgatgctgctgttcggcgcgctcggctacctgttcaagaaactcggctaccccatcgccccgctggtgctcgccgcggtgctcggcgacaaggccgaggacgcgttccgccagtcgatgctgttctccgacgggcaactctcggtgttctggtccaacccgctggtggccagcctgaccggcgcggcgctggcgatgctgctctggccgttgctggcgcggtgcgccggggcgctgttccggcgtggccggcggagtctccggcatgccgcctga

SEQ ID NO: 324821 - DNA, 948 bp, Pseudomonas aeruginosa
atgtcccggattcccgacgccagcatcatccacagccgcctgcgcctgcgccagttgcgcctgatgctggccctggaggaactcggctcgctgcgccgcgccgccgacgagattggcatgacccagccggcggcgaccaagatgctccacgaggccgaagacctgctcggcgtcgagttgttcgagcgtttgccgcgcggcatgcgcgcgacgcctttcggcgagacgctgatctattactcgcggatgatcttcgccgagctgtccgggatgcgcgaggaactggtcgcgctggaatccggcaacctcggccgggtcaccgtcggagcgatcccggcgctggcctcgagcctgctgacgcgcaccatcgccaccctgaagcagagtcatccacggctgtcgatgagcatccaggtggacaccagcgacgtgctggtccaggccctgcaacaggaccagctggacgtggtgctcggacgcatccccagcggcgcgcgcaccgacgacctggtgttcgacagcctcggcgaggaagaactctgcgtggtggtcggcgcgcagaacccgttgtcgcaggcacgcaagctggactggggcgagttgcaggagctgacctgggtgttgcagcagcaccccagcccgatgcgcgggatcgtcaaccaggccttccacaatgcgcgcatcgacctgccgagcagtatcgtcgagaccacctcgatcatgaccctgctctccctgctgcaacagaccgacatgatcggcatcactccacgctcggtgatcgaggactacccgggcaagcacctgctggcgatcctgccgatccagctggagccgcgcctgccgccctacggcctgatcacccgacgcaaccgggtccactcctcggccatgcagaccttcatggccagcgtacatgccgaacaggcgcggcacctggcgaagtga

SEQ ID NO: 324822 - DNA, 3303 bp, Pseudomonas aeruginosa
atggccagacgcgagaagccggtctttctcaacgacccgcaatggtacaaggacgcggtgatctaccaggtccacgtgaaatccttctacgacgccaacaacgatggcatcggcgacttcgccgggctgatcgagaagctcgactacatcgccgacctcggcgtgaacactctctggctgctgccgttctacccgtcgccacgccgcgacgacggctacgacatcgcccagtaccgtggcgtgcacagcgactacggcagcctcgccgacgcccgccggttcatcgccgaggcccatcgacgcggtctgcgggtgattaccgagctggtgatcaaccacacctccgaccagcatccctggttcatccgcgcccgccacgcgaagaagggatcgcgcgcccgcgactactacgtctggtcggacagcgacgagaaataccagggtacgcggatcatcttcatcgacaccgagcagtccaactggacctgggacccggtagcccaacagtactactggcaccgcttctattcccaccagccggacctgaacttcgacaacccgcaggtcctgcgcgaggtgctcggggtgatgcgctactggctggacatgggcgtcgacggcttgcgcctggacgcgattccctacctgatcgaacgcgacggcaccagcagcgagaacctgccggagacccaccaggtgctcaagcgcatccgcgccgagctggacgcgcactatcccgaccgcatgctgctggccgaggccaaccagtggccggaagacacccggccgtacttcggcggcgaggatggcggcgagggcgacgaatgccacatggccttccacttcccgctgatgccgcgcatgtacatggccatcgcccaggaggatcgctatccgatcaccgacatcctgcgccagaccccggacatcccggccaattgccaatgggcgatcttcctgcgcaaccacgacgagctgaccctggagatggtcaccgacgacgagcgcgactatctctggaaccactatgccgccgaccgccgcgcgcgcctcaacctgggcatccgccggcgcctggcgccgctggtggagcgtgaccggcggcgcatcgagctgctgcacagcctgctgttgtcgatgccgggcacgccgaccctgtactacggcgacgagatcggcatgggcgacaacatctacctcggcgaccgcgacggcgtgcggaccccgatgcagtggtcggtggaccgcaacggcggcttctcccgcgccgacccggcgaagctggtgctgccgccgatcctcgacccgctgtacggctaccagacgatcaacgtcgaggcgcaggcgcgcgacccgcattcgctgctcaactggatgcgccgcctgctcgccgtgcgcagccagcagaaggccttcggccgcggcagcctgaagatgctcgcgccgagcaaccgacggatcctcgcctacctgcgcgaatacgccgagggcgaacggcaggacagcatcctctgcgtggccaacctgtcgcgcgcggcccaggcggtggaactggacctcgccagccatgccggcaaggtgccggtggagatgatcggcggcatgtcgttcccgccgatcggcgagctgacctacctgctgaccctgccgccctacggcttctactggttctacctggccgacgccacgcagatgccgagctggcacgtggccgccgacgagcgcctgccggaactgccgaccctggtggtcaagcagcgcctcggcgagctgctgcagggcgcatcgcggaacatcctggaaggcgagacgctgccggcctacctgccgaagcgccgctggttcgccggcgagataggccagccacggctctgctacatcgttccgctggacgaggcggagccacgctgtgcgctgtgcgaagtggagatcgacgggctgcgctaccagttgccgctgggcttcctcgacgccgaccagcgcggcgacagcctgcctcagttgctggccctggcgcgcctgcggcgcggtcgcaaggtcggcctgctgaccgacgccgccagcctgccgctgttcgcccgcaaggtcctcgcgcaactccgcgccgaggcggtgatcgcccacggcgacggcgagatccagttcatcccggcggcgggactggcggaaatggacgacatcgccgacgaagacgtcctgccgttctcggtggagcagtccaacagctcgatccgcttcggcgagcgcatggtcctcaaggtgctgcgcaagatccttccggggctgcacccggaaatcgaggtcggcggctacctgacccgccacggctaccccggcatcgccccgttgctcggcgaggtacggcgggtcggcgcggatggcgagccgcacacgctgatgatcctgcagggctacctgaacaaccagggcgacgcctggaactggaccctggacaacctggagcgagccgtgcgcgacgagatatccgcggccagcgaggcgctcgaagggcaatacgacagcctcgccgaactgcgcggcttcgccgccaacctcggcgcccggctcggcgagatgcacagcgtactggccggcgagtcggacgatccggccttcggcagccgcgagagcgacgaagccagcgtccaggcctgggcgctgcgcatcgccgaacagttgcgcgaagccggcaaacgcctgagcgagccgcctcggccgttgcagggcgaggcggcggaacaggcgcggcgcctgctggaacgcctgccggcgctgctcgaacgcctgccgctgctggcccggcaggcagccggcgggctgctgatcagggttcacggcgacctgcacctgggccaggtgctgatggtccagggcgacgcacgcttcatcgacttcgagggcgagccggcgcgcagcctggaagagcgccgccagcgccacagtccgatgaaggacgtcggcggcatgctgcgctcgttcgactacgcggcggcgatggtcctgcgcaacgcgcagagcaccgatagctcggaacaggccgacagcgcccggcgcaaggtcgccatgcgctatcgcagcgaagcccgcgatgccttcctggccggctatcgggccgccgcggcgggtctcatgcacgcctggcacggtcgcgaaggcgagggggcggcgctggccctggcctgcctggaaaaggccgcctacgaactgctctacgaagccgactaccgccccgactggctggaagtgcctctcgccggtctggccgaactcaccgaacacctcctgaagggcaagaaccgatga

SEQ ID NO: 324823 - DNA, 882 bp, Pseudomonas aeruginosa
atggcgcgtgcgatctggaaaggcgcgatcagcttcggcctggtgcatataccggtgagcctgtcggcggcgacctcgtcgcagggcatcgatttcgactggctcgaccagcgcagcatggagccggtcggctacaagcgggtgaacaaggtcaccggcaaggagatcgagcgcgagaacatcgtcaagggcgtggagtacgaaaagggccgctacgtggtgctgagcgaggaagaaatccgcgcggcgcatcccaagtcgacccagaccatcgagatcttcgctttcgtcgatagccaggaaattcccctgcagcacttcgataccccgtactacctggcccccgaccggcgcggaggcaaggtctacgcgctgctccgggagaccctggagcgcaccggcaaggtcgccctggccaacgtcgtcctgcacacccgccagcacctggcgctcctgcggcctctgcaggacgccctggtgctgatcaccctgcgctggccgtcgcaggtgcgcagcctggatggcctggagctggacgaaagcgtcaccgaggcgaaactcgacaagcgcgagctggagatggccaagcgcctggtggaggacatggcctcccactgggagccggacgaatacaaggacagcttcagcgacaagatcatgaagctggtcgaggaaaaggccgccaagggccagctgcacgcggtggaggaagaggaggaggtggccggcaagggcgccgacatcatcgatctcaccgacctgctcaagcgcagcctgcgttcccgcgccggcggcggcaaggacaagggcagcgaaaaggccggggccgacgcgaagggtcgcgccaagtccggtgcctcgcgttcgcggcgcaaggcctga

SEQ ID NO: 324824 - DNA, 714 bp, Pseudomonas aeruginosa
atgagccaaccgcaaccgcgcatcgaggtggccgccatcgacagcttcgtcctgcgcctgttcgagcgcatcgacgaagccaacatgccctggctgctggcggcggaggaaaacctgcgggcggcgttcggcgccgccctgctcgacctggtgccgtcctacaccaccctgctcctgcaatacgacctgctccagctcgaccctggcgaggcccgcgcgcggatcgccgcggcgctgtccgacttgcgcccgaaacgccaggacggcggccgtctgcacatcctgccgacctggtacgacccgcgggtcggccccgacctggcccccctggcgcggcgcaagcagctcggcgtcgccgagctgatccgccgccacagccagcgcgagtaccgggtcttcgccctcggtttcagccccggcttcgccttcatggggctggtcgaggaagccctggcggcaccccgtctggcgactccccggcaacgcatcgccgccggcagcgtcggcatcgccgagcgccagacggcggtctatccgcaggcctcgccaggcggctggaacctgctcgggcgctgcccggtgcgcctgttcgacctcaccctggacggctacagcctgctgcgcgccggcgaccgggtgcgtttcgaacccatcggacacgccgaattcgtccgcctcggcggcgacgacacgaccctggaggtccaggcatga

SEQ ID NO: 324825 - DNA, 942 bp, Pseudomonas aeruginosa
atgaacgactccatccacggcggcctgcgggtgtgccagagcaccccgctggtccagttgcaggatcgcggccgcttcggttgccgccatctcggcgtgacccagggcggcgccctcgactggctgtccatgggctgggccaactggctgctgggcaatcccctggacgccgcggtgatcgagatcgccctcggcggtttcgtcgccgaatgccgtgccgacggctggttggccctggccggcggcgatctcggcgcgaccctcgatggccagccgctaccggcctggggcgcgttcgccgtgcgcggcggccagcgcctggccttcgcccacccgcgccagggcgcccgcgcctacctggcggcgcccggcggcttcgccggcgagcgccagttgggcagcctggccacggtggcccgcgaaggcctgggcggcccccgcgccgacggcaaggccctggccgcaggcgacagcctcggctggctggccgatggcgcgcgaccgcgcgcgctgcccctgcccagcgaacggatcatggactgcaccggcgaagcgcgcctggagctgatcctcggcgcgcagatcggcgacttcccggccatgagcctgttcgatgcgttcaacggcgactggcaggtggatacccgcgccgaccgcatgggcgtacgtctgctcggcccgcgcctggaatgccggcagcagtcgatgatttccgaaggcatcgccctcggcgcggtgcaggtgccgccggacggtcagccgatcgtcctgctcaacgaccggcagaccatcggcggctacccccgtctcggcgccctcgccccgctggcgctggcgcgcctggcgcaatgcctgccaggccagcgggtgcggctgctgccgacggtgcaggaggcggcgcaccgcgagcatcgacgcctgctggcggcctgggacgcatag

SEQ ID NO: 324826 - DNA, 1773 bp, Pseudomonas aeruginosa
atgtccagcacggttgccgatcaattgctcgaacgcttgagccagtggggggtgaagcgcgtcttcggctaccccggcgatggcatcaacgggatcatgggcgccatgggccggcgcgccgaggcattcgactatatccgcgtgcgccacgaggagatggcggccttcatggccggcgcccacgccaagttcaccggagaggttggggtgtgcctggccacctcggggccgggcgcgatccacctgctgaacgggctctacgacgcgcgcatggatcatcagccggtgctggccatcgtcggccagcaggcggctaccgcgttgggcagcgactaccagcaggaagtcgatctgcagagcttgttcaaggacgtttccgcctatgtcgagaccgtggtcagcccggcacaactgctccatgtgctggaccgagccctgcgcgtggcggtcggcgagcggcaggtggcgacggtgatcgtgcccaacgacgtgcaacagatggcggccccgaagcgccagccccacgagcacggccacgtgatgtcggcggtgggcttcgtccagccgcgaccctacgcgcgcgacgccgacctggaggccgccgcggcgatcctcaatcgcggccggcgcgtggcgatcctcgccggtgccggggccctgggcgcgcaccggcaactggaagcggtcgccgagcgcctggccgccggagtggccaaggcgctcctgggcaaggcggcggtttccgacgacctgccgtacgtgaccggctccatcggcctgctcggcacccgcgccagcagcatgctgatggagcattgcgacaccctgctgatcgtcggcagcactttcccctacagcgagttcctacccaaggccggccaggcgcgggcggtgcagatcgacctgtatccgcgcaacatcggtatccgctatccgatcgaccaggccttgctcggcgatgcaggggaaaccctggagcgcctgctgccgctgctcgagcagaaaaagcacggtgcctggcgccgccgggtcgagcgggcggtgacggccagtcgcgaggaagcccggcgccaggccgaagagccagccgacccgatcaacccgcagcgggtattccgttccttgtcggagcaactgccggacgatgcgattctctgcggcgacagcggctcgcataccaactggtacgcccgcgacatccgcatgcgcccgggcatgctcggctcgctgtcgggcaagctggcgaccatgggcagcggcgtgccctacgccatcgccgccaagctcgcctatccgcagcggccggtggtggcgatggtcggcgacggcgccatgcagatgaacggcaacgccgaactggtcaccgtgcagcagtactggcagcgctgggactcgccgaccttcatcgtgctggtgctgaacaacggcgatctcaaccaggtgacctgggagcagcgtgccctggccggcgacccggagttcagcccggcgcaggaagttatcgatttcccctacgcgcgttatgcggacatgctcggcttcaagggcatccgcgtggatcgcccggaggacatcgacgccgcctgggccgaggccttcgccgccgaccgcccggtgctgctggaggtggtcaccgacccgaacgtgccgccgctgccgccgcacatcagcttcgagcaggccaagcacctgcttggcgccatgctgcaggacgatcccaagcgctggggggtgattcgccagagcgcccggcaggtcctcgcgcggcactga

SEQ ID NO: 324827 - DNA, 735 bp, Pseudomonas aeruginosa
atgacgcagaccgcctccctttttctccaggactcctaccgggaagagtgtttggcgagaatcaccgatgtcgttgaagatggcctgctgctcgaccagaccgttttctatccccaggggggtggccaggctggagacagtggttggctgacgctggctgatggcacgcggctccggatcgccgatacacgcaaggggacagaagcaggtgctggcagggatgccatcctgcatatcccagctgaaggccaggcaaccgttctccgagcaatgaagcctggcgaggtggttcttgcgcagatcgattgggtgcgtcgttaccggcacatgcgactgcataccgcagcgcacatgctctgtgctgtcctgccctatccggtcaatgggtgcagcatcactgatgagcatgcgcgcctggacttcgtgacgagtgaaccgctgtcccgcgaggccattgatagcgccttggcggcaatggtcgaggcagcacatccggtttcgatcgacaccatgagcgacgatgcactgcgggctaggccggatctggtgcgcaccatgagtgtccaacctccgatgggcgccgggcaggttcggttggtgagtattaaagacaccgacctgcagccttgcggtggaacccatgtggcgaataccgaagaagttggggtggtgcgcgtttccaagatggagaagaaatcagcgcgcacccgtagggtggtactggtactgggttga

SEQ ID NO: 324828 - DNA, 720 bp, Pseudomonas aeruginosa
atggacaaactggtaggtaatctgatgcgcgcggcattgatggagtgctgctcaccccaactggtggagcggatagtcgctcattcgatgttcgaagaagctagacgttggtgcgaggaagacctgcaggcattcgccagcaaggatccagccgcacagggacggacatccgacattgcgtttggctacagctcgttcaaggcagtgctgcactaccggctttcccacatgctgtgtctgcgaagcacatctgaaggcgatcctgagagagcgttggaggctaccgcgctcctggtctcctctcgtggaaagctcctgtcgggcgcggaaatccacccaagatgcaagattggcagtcgattcatcctggaccatgggcatggcacggtcattggcgagacagcggtaatcggtgatgactgttacatcctcggaggtgtggtattgggggcaactggcatatcggctaatcccgccggtaagcgtcaccccaccatagggagccgcgtccaaatcggggccttcacgcgtgtactgggtgacatcgctatcggcgacgatgtgtttgtcggtccgcattgtgtcatcaaggacgacatccctgtcggttcagtcgtaaccctgcgttctgaactacaggtcatccgaggcccccacatagttcagcaactacagccggcagccacgcagacccaaattcaaccaatggaggcatcatga

SEQ ID NO: 324829 - DNA, 918 bp, Pseudomonas aeruginosa
atgatctacgattcgctactcgatttaattggcgggacgccggtgatacggctgagcaaattgtctgctcgcctgggggtgagcgtattcaccaagctggaatccttcaatccaggaggaagtcataaggcgcgtatcgcgctctggatgattctggatgccgaacgcaaaggaatcctggtgcgcgggaaagggcagaccattctcgagccgagcgggggaaatacggggattggactggcaatggcggggaacatcctggggtaccgcgtgaccctggtggttcccgacaactacagccctgacaagagacaattgctcgagctgtatggcgctcacgtcgtgctgtcggatagcagaaaagggaacaactcgcatggcgagctggcaatccagatactgctggaacatccggagttcgtcatgctcaaccagcagcgcaatccagctaacccgcaagcccatcgcgaagctacagccctggaaatcctgagggactttgcaggccagccacccccggacttcttcttcgctggcattggaactggtggacatatcacgggtgttggagaggtgctgaggaaccactggccggatatggccatctatggcgtgcagccagagcagtgcgacttgctcgacgataggcacgcaccgcatgagattcagggactttccattggtatcgtgccggaagtctgcaacctcggcattgttactggcatggtcggggtgtcgaaatctgcctgcttgtcgatgatccgggaagtcctgcaaaacgactctgtgagcatggggttgtcctccgcagccaacctggtcgcggtgctgaacatggcatctgccatgccgtcaggcgctcgtgtactgacgatgatctacgatggcgtcgagtcatacatggacgcttttcgatga

SEQ ID NO: 324830 - DNA, 1419 bp, Pseudomonas aeruginosa
gtgaagacggtaatttttccggaagtactggtacgggccgcccaactggaaggcgggcgcctggagggagcgggcttgacggttggcgagctgctggcaggccttgtcaggaagcatccttcattactcgggcacctgtattacgaaaacggtcaattgaaagaacacttcctgctgacccacaaaggttcgctagtcaatctggatggcgagctttccgatggagatgaagtcgaagtcatgctcgcgacatctggcggttctggcgttgaagcgttgagcgacgaagaagttcaacgctacgttcgccacatcacgttgccaggcgttggcagggaaggccagcagcgcctgaagcaggccagggtgctgataatcggaacgggcggcctgggttcgcccgcttgcctttatctggccgcagcaggagtgggcaccatcgggctggttgactttgacgtggtggagtcgagcaatctccagcgccaggtcgtccatggctatagcacgctcggtatgccgaaggttgagtccgcccagcgccggatgcaggacctgaacccctacattgaagtcgtaacccaccgttacgccatcgacgcggacaatgcgcagtcactgattcagagctatgacctggtattggatggcaccgacaacttcgccacacgttacttggtcaacgcggtttgcgccaagctcggaaaaccactcgtctttggcgcgatctatcggttcgaaggtcaggtcagcgtcttcaatctggagggaggcccctgctaccaatgtctcttcccgaacaatcccccgcctgagatggctccaagctgtaacgcagggggagttattggtgtgctgcctggagtgattggcctgctgcaggcaaccgaggcggtgaaggccctcgtcggcctgggcaagtccctatcaggcagacttcttcgattcgacgcgctgctcatgcacttcaatgaagtgaagttcaatcggcgcgacgattgtccggcctgcggcaaaaccgctgcagagaatccccgccactggagggagggattgctctgccaggcaagcgcggcaccgtcgcaacgactcgacgacgatcgctatatcgatcccggctgcctgttgcagttgatgaaatccaacagcgaaaactatgcccttctggatgtacgcgacgcgggcgagctcgaagtgtgccagttgccggggatcgtccacgttcccttgaacgaactcgccagccatttcgccaatctcgacttcagtaagcgctacatcctcgtgtgctacgccggcactcgtgccgaacgcgcggccatacagctcatgggggcagggttctccaacgtccaagtgctcgatggcggcatgaagcgatgggcgaaagagatagagcagcacatgccgatgtactga

SEQ ID NO: 324831 - DNA, 459 bp, Pseudomonas aeruginosa
atgaatacgaacgtgttgaccgagcatgcattgagcgtgatctacagacacgcctgcaggacctatccaagggaatgctgcggattcgttctcgccgatgcaaaagtgaaagagggtacgaacatccaggatgaactgcacatggctgacccccggaggtacccacgcacggccgccaacgggtacacgttttccgtgacggataccgtattcctcaacagcagcttcaagacgtgcagcccggtatccgtcatctaccactcccacccggacgtcggtgcctacttcagccgggaggatatcgacaaggcattgtatgccggggagccaatgctgccggtcgactacctggttgttgatgtggccgccggcaacgttcgcggcgcaaaactgtttgcctggcgcaacggacgctttgaatgcacacgagagttcgggccatcgagccaggacgagtag

SEQ ID NO: 324832 - DNA, 891 bp, Pseudomonas aeruginosa
gtggccagcctggtgaccgctgttctatttctagtggtgtgtatcagctgggggactacctggctcggcatcaagatcgccgtggagagcgtgccgccgctaactgccgccggattgcgctttctgatcgcatttccgcttttcctgctctttgcgcggctgcgccacgagacgatctttttcccgcggcgactcctggccttcttcgtcttcgtgacgctcggctacttcagcgtgccctactacctgctgaactatggcgagcaatacgtcgcttcaggtcttaccgcgctgctgttcagcagcatgcccgtgttcatcctgatcttctccgcgatcttcctgcgcgagcgcatctacctgtcgcagatccttggtattgcgattggcttcggcagcctgttcatgatcatcaggtctcaagggctgcatctggactacacggagttgttaggcgtacttgccatcctgctcgcggcgatcatgcacgcactcagctacgtcatcaccaaaaggcaaggtgctgacatcggcgtgatcaccttcaatacgctgcccattggcatcgccggcttggggctgttcatggccggactcgtgatggaacacccgaacctgtctgccgtcacaagccgatcttgggctgccctgatctatctcggtctggtggcatcagtcgggggattcatcgtgtacttcttcctgctcaagcgtttgagtcccgttgtgctgtcgttcgtcttcatcattttcccggtgttcgccgtgatcatcggcgcctggtacgaaggggttgccatctctcgcgagttgattggcttcaccgtgctcctattggctggatttgccatcaccaagcttcccatcgagaagctgctcggcaggaggtga

SEQ ID NO: 324833 - DNA, 1434 bp, Pseudomonas aeruginosa
atgccggtcaaagcaaatattgacaccgattcaattttcagattcttcctaccagaagggcccggcctgaagtacaaacggctggcccagggcatcgaagaatctattcgcaatggggttctccggcagggagtcaagctgccgccacatcgcatcctcgcggacaagctcggtgtgaccgcgggcacggtgagccgggcctatggtgagctggagcgcatggggctggttgaggctcgggtcggcgacggtacgttcgtccgcaaccgcggtcgagaacgtgctcgggaggcgggctttcgcaatttcgtagacagcaccgagatgtgcaacgacatgagccggaatatgcatattccgggcaatgagaccgaactgctttcccgcagccttcagcaattgagtgcggcccctgagctcctgcaggagttaatgctctacacacccgacacaggactgctccgacaccggcaagcgggagcaacatggctgtctcacggtgagtttcaagcggagcaccagcagattctgtgcgtcaatggcagccaacacggtctgctcgtcgtgcttatggccatgctgcgcgccggcgacaccctggtaacggagcagctctcctatcctgggctgatcagtgccgcgcaactcttgggcatcaaggtgctcggcttggaaatggatgaagaggggctactgcccgacgccctcgaagaggcctgccgcacgaacaggatcaccgccctgtactgcacacccaccatccagaacccgaccactgcagtgatgtcaggcgccaggcggaaggaaatcgcgaagatctgccgcgagcacggcttgatcgtcatcgaggacgaaacccatgctgtattgatggccgaacgccccacccctctctgccatctgctgcctgagcggggcatcctcatcggtggcatgagcaaggcggtcgctgcaggattgcgggttggatacgttcatgctcctgcatccatggtaagtcgcatggcagcagcgcttcgcaattcgtgctggatggcgacaccactggttctcgagattgcgagccgatgggtcgaggacggtactgcaagcgcactgctcgaataccagagaggggaaatcgcgcgtcgccaagcgctggttgtggacctactgcagggcctgacctatcgcagccatctatgctgtccgcatttctgggtagaagtgccagccccctggcgcgccatcgaaatagagcaaggcatgcgcggacagcagcatcttgtcaccaccgcagaggcctttagtacgggccgcggtacgcttccccaggccattcgaatcagcgtcagcaattccccaggaggggggaatacgttatctgacggcttcgcagtcctggcagcgctcctacgcgaaggcccccaagagatgctgacgatgcgtgcttga

SEQ ID NO: 324834 - DNA, 756 bp, Pseudomonas aeruginosa
gtgcagaacatcctgatcactggtgccgcttccggaatcggcgccgccagcgcgcgtctgttccaccgccggggctggcgggtcggtttgctggacatcgatgccgaggcgttgcgcggcttggccgtgcaactgccgggcgcctggcaccgcgccgtggacgtcagcgagcccgacgcggtcggcgaggcgcttgcgcagttctgtgccgatggccgcctgcgcctgctattcaactgcgccggcgtcctgcgtttcggccgcttcgaagaggtcgccctggaggaccacgcgcggttgctggcgatcaacctgcatggcgtcctcaactgctgtcacgcggcctttccgttcctgcgcgcgacgccgcaggcgcaggtactcaacatgggctcggcatcggggctgtatggcgtaccggagatggccgtctactcggcttcgaagttcgccgtgcgcgggctcaccgaggcgctggagctggaatggcgccgccacggtattagtgtggccgacctgatgccgccgttcgtccgcacgccgatggtcgccgggcagacctaccgaccgccggtgttgcgtcgcctggggctgagactggacgccgaggatatcgccgaggcggcctggcggcaggcgcacagccggcgggtacaccggccggtgggcgggttgttcacggcgctgtactgggctgggcagttgtctccgccgtgggtgaaccgagcggtgatggcgtggttgtcgcggggttag

SEQ ID NO: 324835 - DNA, 1035 bp, Pseudomonas aeruginosa
atgcccactccgccctggtctccccgccgcagcgccatcagcgcgcacctgctgatccagttcggcatcgaccgcggcctcggcctggagcagtgcctggcaggtagcggcctggatatccgcctgctcggcgatccctccggggaaatcgacgcggcccaggaactgagcgtagtgcgcaacctggtccggcacctgggcgacgcctgcgcgccgggcctggcggcaggcctgcgctatcacctcaacgcctacggcatctggggcttcgccctgctcagcagcccgaccttcctcagcgccgcgcaactgggcctgcgctacctcgacctgaccttcgccttccatggcattcgcctggaggtacacgacgatgaagcgcacctggtgctcgacgacgccggcattcccgaggacctgcggattttcctcctcgaacgcgacgccggtggcgtgctgcgcatccagcgcgacctcaccgggcagcgcctgccgatcctccgcgccggcttccgccgcccaccgcccgccgatcccgcgccctacgtgcgcgagctgggcctgtgcccggcgttcggccaggcggacaaccgggtggtcttcgaacggcgcttcctcgacctcccgctgcccggcgccaatccagaggtggcgcgcgcctgcgaggagcagtgccgcgccctgctcgctcgccgccaggtgcgcggcggtctggccggacgcatccgcgaccgcttgctgaggacgcccggccacttgccggacatgcagaccctggccatggaactgcacctcaccgtgcgtaccctgcgtcgccgcctggacgacgagggcagcagctaccgcctgttgctcgacgaggtgcgccaggccctcgccgaagagctgctggccaccggcgcgattcgcctggaggagatcgccgagcgcctcggctacggcgaggtgtccaacttcatccatgccttcaggcgctggaaaggcatgacgccgcgccagtatcgccagcggcgacgactcgacgcgatgtcctga

SEQ ID NO: 324836 - DNA, 471 bp, Pseudomonas aeruginosa; identical to SEQ ID NO: 318787

SEQ ID NO: 324837 - DNA, 903 bp, Pseudomonas aeruginosa
atgtcgtctccttccttgcccgatgccagtctccgcgccagcaccctgcatctgccggccggtccctggagcaccgtgctcgactgtctctgcgcgcgtttcccggccatcgaccgtgacacctggctggcgcgcatgcagcggggccgggtgctggacgccgaggggcgtgcgctgggcccgcaggcggcatatcgcgaaggcctgcgtgtgcactacttccgcgagttgccggtggaggcaccgattcctttcgaggcgcgcatcctgtaccgcgacgagcatctgctggtggcggacaagccgcacttcctgccggtgatgccggccggcggctacgtcgagcagacgctcctggcgcggctggcccgcagcaccggcaatcgcgacctggtgccgctgcaccggatcgaccggcataccgccgggctggtgctgttctcgaccaatcccggcagccgcgggcgctaccaggcgctgttccgcgagcggcgcatcgacaagtgctacgaagcgatcgctccggccttgccgcaactggacttcccgttgttgcgcaggacccgcctggtgcccggcgagccgttcttccgcatgcgcgaaggcgagggcgagccgaacagcgagacgcgcatcgaggtcgtcgagcgcaacggccgctggtggcgctaccggctgtatccggtgaccggcaagaagcaccagctgcgcgtgcacctcgcggcactcggcgcgggtatccagaacgatgggttctatcccgagctgctggacgccgagggcagccccgacgactacctgcggccgctcaagctgctggccagggggctgcgcttcgacgacccgctgagcggggagaggcgtacgttcgaatccgggctgcggctcgattggcaggtgtag

SEQ ID NO: 324838 - DNA, 1074 bp, Pseudomonas aeruginosa
atgagcgaagaacccactgtcagtcccccctcccccgagcaacccgccgcgcagccggccaagccggcccggccagccgcccgccgcgccccgcgcaagccggcgacccgccgcccgcgagtggccagcccggcgcagaaggcccgcgaggagatccaggcaatcagccagaagccggtggccctgcaggtcgccagtgcgccccacggcagcagcgaggacagcacctcggcgagcctgccggcgaactatccctatcacacgcggatgcgccgcaacgagtacgagaaggccaagcacgacctgcagatcgaactgctcaaggtgcagagctgggtgaaggagaccggccagcgcgtggtggtcctgttcgaaggccgcgacgccgccggcaagggcggcaccatcaagcgcttcatggaacacctgaacccgcgcggcgcgcggatcgtagccttggagaaaccgtcctcccaggagcagggccagtggtatttccagcgctacatccaacatctgcccaccgccggcgagatggtcttcttcgaccgctcctggtacaaccgcgccggcgtcgagcgggtcatgggcttctgttcgccgctgcaatacctggagttcatgcgccaggcgccggagctggagcgcatgctcaccaacagcggcatcctgctgttcaagtactggttctcggtgagccgcgaggaacaactgcggcgcttcatctcgcgccgcgacgatccgctcaagcactggaagctgtcgcccatcgacatcaagtctctggacaagtgggacgactacaccgccgccaagcaggcgatgttcttccataccgacaccgccgacgcgccgtggacggtcatcaagtccgacgacaagaagcgcgcacgactcaactgcatccgccacttcctgcactcgctggactacccggacaaggaccggcgcatcgcccatgagccggacccgttgctggtggggccggcctcgcgggtgatcgaggaggacgagaaggtctacgccgaggcggccgccgcgccgggccacgcgaacctggatatcccggcctga

SEQ ID NO: 324839 - DNA, 1053 bp, Pseudomonas aeruginosa
atgtcacgcgccgcccgcccatgcaatcgcttttgcagccttctgctaggactcgccctgctgatgcccgccagccttcctctgtccgctgccgaaacggtggcgccgccatcgccgcggacgctgatcatcgacaccgatccgggcgccgacgatgtgatcgccctgctgttcgccatggcctcgccgaaggagctgaagatccaggcgctgaccaccgtcgccggcaacgtgccgctggaaaagaccgcgcgcaacgcccggctggcccgcgagtggggcaagcgcccggatatcccggtctacgccggcgccccgcggccgctgctgcgcacgccgatctacgccgccgacgtacacggcagcgaaggcatcaccggcgtcgaggtgcatgagccgaagcagccgctggccgaaggcaacgcggtggactacctgatccgtaccctgcgcgcggcgccggagaagagcgtgaccctggccatgctcggcccggagaccaacctcgcgctggccctgacccaggccccggacatcgtcaagggcatccgcgagatcgtgatcatgggcggcgcccacttcaacggcggcaacatcaccccggccgccgaattcaatatcttcgccgacccccacgcggcggaaatcgtgctcaagagcggggcgccgatcaccatgctgccgctcgacgtgacccacaagatcctcaccagccccgagcgcatcgccaagctgcgcaacctcggcaaccgagccggcaagaccgtcgccgacatcctcgacgcctacgtccagtacgacatcaagtactacggcctgaagggaggcccggtgcacgacgccacggtggtcgcctacctgctcaagccctcgctgttcaagggcaagcggatcaacgtgcaggtcgacagccgcgagggcatcaccttcggccagaccgtggccgactggtacggcggcctaaagcagccggccaacgtcgagtggatcaacgagggcgatgcccaggggttcttcgacctgctcaccgagcgtatcgcccgcctgccctga

SEQ ID NO: 324840 - DNA, 402 bp, Pseudomonas aeruginosa
atggccttctcgacccaggacagcgacgaagtcctttccgaaatcaacgtcaccccgctggtcgacgtgatgctggtgctgctggtggtgttcatcgtcaccgcgccgctgctgaccaactcgatcccgatcaacctgccgaagaccgaatcggtggccccgccggagcagaaggatcctctggtggtgagcatcgatggcgccggcaagctgttcgtcaacaaggacgagatccagccggagctgctggagagcaacctggccgcggccaaggcgaaggacgccgaggtccgcgtgcagttgcaggccgacgaaggggtgaactacggccaggtggcgaaggccatggcttccatcgagcgcgccgggatcaccaggctggcggtgatcaccgcacgctga

SEQ ID NO: 324841 - DNA, 438 bp, Pseudomonas aeruginosa
atgaagaagttcctgttgcccgccctgctgttcgccgcggcctcgctgaccggctgcgccagctacaacgtcagccagcccatcgccccggtggccggcgcggtgaaaaccgacctcaaggccgacgtcgccgtcggcgagccgattagcggagactcctcggtcaatatcctgttcggcttcctcaagttcggcggcgacagccagttcgccgacggcgtcacctacggcgcagaaagcggctcgggcctgagcctcggcgccttcgacccggtgtcctcggccaaggccgccgccgcgttcaaggcggtgaagaactccaatgccgacctgatcgtggcgccgcgctacgaggtttcggtgaacgactacttcctgttcaagaaggtcgacgtcaaggtcaccggcagcaagggcaccatccgctccatccgctga

SEQ ID NO: 324842 - DNA, 1506 bp, Pseudomonas aeruginosa
ttgtccgatctcgcccagaacccgcccgccgtccgtaccgtcctcgccggcctgatgctgtcgatcttcctgagcgccctcgaccagaccatcgtcgccgtttccctgccggcgatctcggccgacttcgccgacctcgacctgctggcctgggtgatctcggcctacatggtggcgatgaccgtatcgatgccgatctacggcaagctcggcgacctctacggccgccgccgtctgatgctcttcgccatcgtcgtgttcaccgccgcctcgctgctttgcgggctcgcgcagagcatgggccaactggtgctggcacgagtgctgcaaggggtcggcgcgggcgggctgatggcggtgagccaggcgatcatcggcgacatcgtcccgccgcgcgagcgcggccgctaccagggctacttcagcagcatgtacgccatcgccagcgtcgccggcccggtgctcggcggcctgctcaccgagtacctgtcgtggcgctgggtgttctggatcaacctgccgatcggccttctcgcgctggccatctcgcggcggaccctggtcggcctgccggtgccgcgccggcaaccggtgatcgactacctgggcatcgtgctgatggtggtgggcctcaccgcgctgctcctggccatcacccagatcggccagggcgtagcctggagcgaccctgcgctgctcggcctgttcgccctggcggcgctcgccctgctgctgttcgtcgcccaggagcggcgcttccgcgaaccgctggtgccgatgcaactgttcgccgtccgcgccgccaccctcagttggctggttgcgttcttcgccagcttccaggccatctcgctgaccgtgctggtgccgctgcgctaccagagcgttaccggcgccggcgccgacagcgccgcgctgcatctgctgccgctggtcatgggcctgccgctgggcgcgtactgctgcgggcggctgaccgccagcctgggacgctacaagccgctgatcctgctcggcgccgtcctgttgccctgcggcatcgccggcctggccctggtcccggtcggcgaccactggctgtccgggctgtgcatgctgctcaccgggatcgccatcggtacccagttcccgaccagcctggtggccgcgcagaacgccgtggagcaacgccacatcggcgtcgccaccagcaacgcgacgttgttccgctccctcggcggggcggtcggggtggcgctgatgtcggcgatcctgctggccctgctcaagcacctgcggatcggcggcgggctcgaccagggcttttccgagagcgccctgctgagcagcctggacgccgccagcgggccggcccgggtgatcctccagcatgtcctcgcggatgccttcaaggtgctcttcctggtcaacgcggcggtggcgctgctcggcctggcggtggcctcggcactgcccgacatgaccctgcgcggccgcggcgcgacgcaaccggcggcaggcgagtga

SEQ ID NO: 324843 - DNA, 435 bp, Pseudomonas aeruginosa; identical to SEQ ID NO: 320901

SEQ ID NO: 324844 - DNA, 642 bp, Pseudomonas aeruginosa
atgaacgactacatcgcccggctgcgcgagaaatacgacgaccatttcggctgtgcgccgagcatcgtcctggactgccgtgacttctggaggcactgcgtgacggcaccggaaatggcggtgttcggctaccgcctggaaagcagccggcgcccgcaccacgtggtgatcaccgcggggatgagccaggcacggatgcacttcgcgccctatatgggcagcgcgcgctggtccagcgagctgatctgctaccttgacgtcctcggcggtgaggacctgcgccacctgcagtggctcgccggcctgccgttccacgaacgcctggccctcggccacggacacagcgtggcattcggtttcccgctctacgagcacagcctgctgcgtcacttccttctcctgccgaccccgctgggcgaagatgccgccctgttcgacggtttcgacctgtccgcccatccggtcgacctgctctgggtcgtgccgctgaccgagcaggaataccaggtgaaagtgaacaagcacctggaaggcatcgccgaagtgctgaacgacgccggacatccgctcagcctcgaccggcatcgccattgctacgtcaccggccaacgtccggaagggttcgagcggatactgcattag

SEQ ID NO: 324845 - DNA, 1443 bp, Pseudomonas aeruginosa
atgtccgctgatgcttatcacccaccgacaacttcgccgcgcctggaaaccctggacgtgctcagcataggcatgagcctggatgtgtttcgccaggggcaagtgtggaaggccttgcaggagcagaatgccgcacaggccgaggcgttgcatgtcggcagcatcctgccgatggacccgaagaagtatccgacgtctgcggatgacaaggatatggcgtatgaaaagcgccaagcggacgccttggaactagggctgaaaaacttcctggagaaatggccgataccgacggtgacggtggtgcgtggttgggatccgagcactcctaacctacgcttcactccggaggagacgcgggaaagcctgtcagtaaaagtcaatgatctccgtgttccggctggactgcattggcatcggattgccaatttgcaggatggcattatctgtaacgatacgcctgaaggagtactggaggcgttgttcagtttattcgaacgcaaccctgacttgccagcagtgttggtgtatgcgaatgaaggcatcagtatggcgggggcgctttccagtagagatgtaacattcaagtcactaggcgctgtgtcaggccctcggatacctggaacgcttacggatgcaatggtcgccctgatcgtcggccgccccgagcgggtcgactggctacgccagttcgccccctacaccaaggtcaacgaaaaccggatcgaccccgagttccgtggctggggctggcgcaagccgccggtggagttccgccccacgccgttcattccccagccctggaccgagcgggctctggagcagtgggatgcgttgccggtgctggccaggctgcatcggccggtgagtgtgccgctgacccacccggataccggcgaacggctcaagcgcgaagctctcaccgcacaactggccgctgcctggaagacggccagtgccgggctcaggccggcgcccgcccggctgttctacgacggcggtttgaacgccacgccgctggccgaactcaccccggcgctgggcgccgcgcagagttcgctggacttgctggactcgcgggaaagctacgacctgacccagcgcctgggcgacaccggcgcggcctcgcccttcgttggcatcaccctggcgaccatggccagctacctcaacggcgacagcagcatggtgatgccgttgcggcgcaaggaccaggcgaccctgatcggcatcagctcgccgacgccggggaagaagcccgttcacgacccgttcggcgtcgacctgctgccgcagaccgccagcggcgacggtccgccgccatcggccgacccggtggcgcccgccagtcggctcacgacccggttgccgcccggcgaagactatgccctggaagagttcctgagcagcctcaaacccagcaccgactggcaggacgatttatag

SEQ ID NO: 324846 - DNA, 915 bp, Pseudomonas aeruginosa
atgagaacctccctgctcgtcgccgccctgggcctcgccctggcggcggccctgcccggcggcgcgccgctggcgcaaccggaccccgaggcgaccatggaccgcagcctgctgcaacgccaggacctgccctatcgcttcagcgccgtggacctggactccgtcgatggccagcggcattaccggctgtggctcggccgaccgctgcaggcaccgcccgccgccggctacccggtggtctggatgctcgacggcaacgccgccgtcggcgccctcgacgcgtccaccctgagacgcctggccgacggcgacgcaccgctgctggtcgccatcggctaccgcacgccgctgcgcatcgaccgcgccgggcgtaccttcgactacaccccggcgagtcccggccaggccgatcagcgcgacccgctcaacggcctgcccagcggcggcgccgacgccttcctcgacctgctgcgcgacggcatgcgcccggccgtggcggcgcaggcgcccctggacactgcgcgacaaaccctctggggacactcctacggcggcttgttggtgctccacgcactgttcacccgtcccggcgagttcgccctctacgccgcggccagcccgtcgctgtggtggcgcgacggggcgatcctcggcgagcgagcggggctcgaacagcgcctgcgcggaaagcgcgcggaactcctgctctggcgcggcagcgccgaaccggccagcccgcgcggctcgctgaaagccgagccgggccaggcgatggcgcggctggtagatgacctgcaccgggttgccgggctcacgctggacttccagccgctcgacggcctgggtcatggcgaaacgctgggggcctcgttgcgccttctgctcgcccgtccggcggtggaacgccagcgctga

SEQ ID NO: 324847 - DNA, 381 bp, Pseudomonas aeruginosa
gtgacaaacgcatcgcccccctcctccctggtagacgtcggccagctcgcagccgccctcgaacgtttcgccgccgagcgcaactgggcccagttccactcgccgaagaacctggtcatggccctgaccggcgaggttggcgaactcagcgagatcttccaatggatggacgaggagcagtcgaaagacgccgcgcgtcatcccgacaccgcccaggcggtgcaggacgaactggccgacgtactcatgtacctggtgcgcctggcctcggtcctcggcgtcgacctggatgccgccgcccggcagaagctggagcagaacaaccggaaatacccggtagaaaaagcccggaatagcagcaagaaatacgaccagttctga

SEQ ID NO: 324848 - DNA, 1857 bp, Pseudomonas aeruginosa
gtgatcgtttacgaagcgaccaagaagcagttcctgcaagacagcgacaacgacgatatcgaagaggtgatcctccagcatttcaaggcggtcaccggcaaaagcgtcggcaactcggaaatcaactcgtggaaaggctccctcggctacatggccaaggtgctgcgcgacgaggaagtgcccgacgacactggcctggccatcgagctgcatatcccccagacctccaagcgcatcgacatcaccctcactgggcgcgatgagtcgggagccaagaacgcggtgctggtcgaactgaagcagtggagcaaggccagcgccaccggcaaggacgccatcgtccgcaccaccctgggcaatggcctgcgcgaggtcgtccacccctcctaccaggcctggtcctacgccaccctgctggagggtttcaacgaggcggtctacgaagcaagcatttccgtccgcccctgcgcctacttgcacaactacccgcgcgacggtgtgatcgactccccgcactaccgcgactacatggaaaaggccccgctgttcctcaagggcaaggacgaactggcgcgcctgcgcagcttcatcaagcagcacatcaggaccggcgacgccaaggaagtgctctacgaactggccaacggccggatccgcccgtccaaggccctggccgactcgctcaagggcctgctcgccgcccaaccggagttcgtactgatcgacgaccagaaggaaatctacgagtccgccatcgccgcggccaggtcagcctccgagacgcatccccgtgtactgatcatcgagggcggcccgggcaccggcaagacggtggtcgcgatcaacctgctgatccacctcaccgggctcggcctggtcggcaagtacgtgtccaagaacgccgcgccacgcaaggtctacgaatccaggctggtgggttccatcacccgcagccgcttctcccacatgttcactggctccggcggcttcatcgataccgagcccaacaccttcgacatgctgatcgtcgacgaggcccaccgcctgaacgagaagagcgggctctacggcaacctcggcgagaaccagatcaaggaactgatcgaagcctccaagtgcgccatcttcttcatcgacgaagaccaacgcgtcaccctcagcgacatcggcagcaagcaggccatccgcgagttcgccaaggcgaaaggcgccacgatcgaggaatacagcctcgcctcgcagttccgctgcaatggctcggacggctacctcgcctggctcgacgacgtgctcgacatccgcccgaccgccaaccagcaactcgacgccagccagtacgacttcaaggtcttcgacacccccgaggccctgcacgccgccatcgccgcccggaaccagaacaacaaggcccgcgtcgtggccggctactgctggccatggcgcagcaagaaggatccccggcaacaggacatcgtcatcggcgactaccagcgccaatggaacctcgaccaggacggcagcctctggatcatcgccgagaactccatcgaacaggtcggctgcatccatacctgccagggcctggaggtcgactacatcggcgtcatcatcggcccggacctgatcgtccgcgacggcaagatcatcaccgcccccgaacaacgcgaccgccacgacaaatccatccgcggctacaagaagctgatgaaggaaaacccggaactggcgcgcaaggagaccgacctgatcatcaagaacacctaccggacgctgatgacccgggggatgaaggggtgctacgtgttttgtacggatgaggagacggcgaggtattttcgggggcgtggcggaaggtag

SEQ ID NO: 324849 - DNA, 1062 bp, Pseudomonas aeruginosa
gtggcagatctgtttgacgaatggatacgcgacggcgtctctcggcaggatggcaatgctgaactgatccgcagtttcaagaaggacgttctgccgctgattggcaagaagccgcttcgcagcctgacagaaaaagatttactcaccgtcctacgctcagttaaagcacgcggcctgaaccgtaccgtagtgatccgcagcaaggacatcggtcagatgctgcgctggggagaaaaacgtaagccgtggcgcaccctgatggcggacggcaatcctgccgacctgatcgacgtgagcaagctgctcgatcacgactacgaagaacagcgcgaccgcctgctttcgccagatgagattcgcgagctgcgcgatatcttcgagcgccttgagcgtgactacgaggccttgcccgccggccaaaaatactccggcatccgcccagttaatccgcgcgtgcaatgcgccgtatggatctgcctgagcaccctctgccgcatcggcgaactgctcaagtctgaatggcgccacgtggatctggagaaaggcacttggttcataccggccgaggccaccaaggggcacaagggtaagcgccaagatcaccacatctttctctccgcctttgctcttgagcagttcaaacggctgcacaaagaaaccagcaatactctgttctgcttccccagcaaggatggcaaaaaccacgtcgacaccaagacggtcagcaagctcatcggagaccgacagtgtcgctttaaaaaccgatgcaagcccttagcgggccgccataatgacgactcactggtgctgagtgagggcaccaagggcgagtggactccacatgacctgcgccgtactggggcgaccatgatgcaagagctgggagtcacactggagatcattgatcgctgccagaaccacctgctaggaggatccaaggtacgccggcattatctccatcatgactatgcaaaggaaaaaactgaggcttggcggctgttgggcgagaagctatcgctgatccttgctaacggagcattaggtactgcccagactcggtaa

SEQ ID NO: 324850 - DNA, 2733 bp, Pseudomonas aeruginosa
atgacgatcacccgtttgtcctcacgcacccatgcgctggatcagagttttctcgccgagcatctcaaaggagctcggcgctatcggcgaattgccggctatttcactagttcgctgtttgaggttgccggagagctgatcgatcagattcccgaggtgcagattgtttgcaatgcggacattcaggcagatgacttgcgggtggcccaggtgtgtgaggcgaagctgctggggaagctgaacgaacgctcggtcgagattgaatcgctgctgaatcgcgaacgctaccaacgactggcctcatttctggagaaacgtggccaggttatccgggttgctccggatagcgcctgtggctttgtgcatggcaaggctggggtgatcgatctggccgatggccgcaagctaggcttcattggctcaatgaacgaaaccagcagtggttggcagagccactacgaaatcctctggtcagatgattccccggagggcgtcgcctggatcgaggctgagtttgattacctatggaatgcagccaagcccctgccagaagcggtgtgccgggagattactcggcgcagtcatcgtcatgaggtatccatcgaagaggtggaagaacctgagcaaattgccccggctgccttgatcgagtcaccgctgtatcgcgaagggttttctctacaaccctggcagcagggattcgtcaccgaatgcctgaagcattaccaagaatatggcgttgtccgtttgctgctagctgatgaggtcggcttaggaaaaacactttccatgggcacggctgcattggcgttatgcctactggccgaacagaaaggacgcagtaagcccgttatcatctttgcaccggcaaccctctgcgagcagtggcagaccgagatgatggacaagttgggtatcccctgtgcgcggtggcagacccagcagaaagcctggctcgacgagcaaggacgagcgatctctgccgatggcgctggccatgttgcaaactgtccgctgaggatcggcatcatctcaaccggcctgatgctgcgcgactcgccggagaaggcgcatctgctcggactacgtggcggctttgggctggtgatactcgacgaagctcataaggcgcgcacccggcagggaatgggcaaggatgcgggcacaccgaatgagctattggcgttcatccgtgacattgctgcccgttcagaccatgtgctccttggtacggcaacgccaatccagactcgccgggaggatttatgggatttggtccgggttctgcaccagggcaaaggtaatttcgtcttgggcggagatttttcagagtggcacagacccaaggacattatcccgatcctctctggggaagaggacgtcacggatgcaggttatgcctggcggttgcttcgtgcgcctttacccacagtcaattcgactcaggatagccaggcgaggcggctttacagcctgattcgccaggatcttgggctatcgcagagcgagtggcttgccggctcatactccgagctgggtgaggatgctcgtgaggtacttgaggatgcgctggagcgtcgtgtcgctggggctagcttcttccagcgcgagaatccatttgtgcgccatgtcgtgctgcgcaaacgtaccacgcttgaaaatgaggggcttctcaaggccattggtgtggacgttcatcctgacgccggactggtaaaggatgttcatcgcttccatgcattgtttgaggggttggccctgcgttctagtgacgacttccgtgaggcttacagccaggctcgtggctttggcaaggctttggcaagcagcggacgtggaagcggcttcatgaagaacctgatggaacagcgcatctgcagcagcatcgttgcggggatcaacaccgcaaccaaactgctgggcggagagacgatcactgaagaaagtgacgagggcgaggtttcggtgcaagtacaaagcaccgatgagcagctggccctggagcggttgctggaccgcctgaagcgggtcaaggaagatccaaaacttaaggcgatcctgcactatctggagaacgaaggttggcgtgagcttggctgcattatcttcagccaatactacgatacggctcgctgggtggctgagtcgctcgctgcacgctaccccgatgaggcagttggtctgtatgcgggggctggtcggagccggctctatcgacaaggtgacagcgtggccattgagcgcgaaacgctcaagcgcatggtcgcagaccgcaagctccgcctgatgatcgctaccgatgctgcctgcgaaggcctcaacctgcagacgctgggtacgctgatcaacgtagacttaccatggaatccaaccaaactcgaacagcgcatcggccgcatcaagcgtttcggtcagacacgcgacaaggtggacatgctcaacctagtaaacgagcagacggtggacgagaaagtctacgaccgcctttccgaacgcatgaaggaccgctttgatctgttcggatcgttgccggacaccatcaaggacgaatggattgacgacatcgagcatctgggagaattgatggatcagtacatcaatgcccagaaacaggaaaccggcttcgatctgcgctacaacgccaccatgcgcccaaccgataacgactggcgcagctgcgcacaggtcttgtcacgtcgagattttgagacgctgatgaggaagggctggtga

SEQ ID NO: 324851 - DNA, 3039 bp, Pseudomonas aeruginosa
atgaccgcaatgacacccgtaaagctggtgcctttctctcttaaggacgcgcccgccctgatcgaaaccgtatttccagcacaaaaggtgtcttttgagtcacagcaagagcgaacctcggtacagagtcaaacgcttaccgggttgggttcttactggaaaggccgcaagcctctcatcttggtacgtgccatcgtgctggctagcttgctgccaccaaccgaagacgctcaggcagatcttgcgatctttgaaaaactgatggcttttgacgacgaaggcttggcgcggcgtgcgatggccagcaatgccgcatcacctgccgagattgcagcgcgtatccagctcgaagacccgtggaattacttcaaggccacgatcaagcgaggtgatgtcacaggaggggacgttcattggatgcgtttcccacttgaggcggatgcagaaggtatttctttgcgttggcagcgcagtctgagtgacgatgagaaactggtgatctatcgcaagttgctggaaacctacgccagctatgaggaaaaggccagcctgggcaagcgtccagaagagttggatcaggaatggctttatgccccggtttgggctgcggtcaatcgccactacgcccatttgggggtgaatgtaagatccttgtccgaactggtggagcagctaggtattcttcgctacggccattgcccgcgcgtgggtgataccttctcgggtggcggctccatcccgttcgaggctgcgcgaatcggttgtagcgccttcgcttccgatctcaaccctatcgcctgcatgttgagctggggaacatcagaaatcatcggtgcgcccaagcaaagacgtgaagaaattacacgggctcaaaccatcctagcaaaggccgtcgatgagcgtatctccgagctgggtattgaacatgatgccagcgggaatcgtgctaaggcatatctctggtgtcttgaagcacgctgtccagaaaccggctggatggtgcccctatccccgacctggacggtgtccaagacgcgcaatgcaattgcctgtttaaggccagaccccacaaacaagcgcttcgatatcgaaatcatctcgggcgcatccaaggcagagatgagctccgccgagaaaggcacagtgcaagatggcgacatggtttatgtccttgatggaaaaacctatcgcacccccatcaagaccctgcgcggtgactttcgacaagccggtggggtgacaggtaaccgcctacgccgctgggaaaaactcaacttcaagcctctcccggacgacatctttcaggagcgcctgtacgcgattcaatggatcagtaaggaaacgctggatgctggtcgtcagaacacctggtttgccgccccaactgactcagaccttcaacgtgagcagctcgtcgagcaacttgtcgctgaaaacttaaacaaatggcagacgcaaggcgtagtgccggacatggcaatcgaaccaggcgacgaaaccgcacgccttttccgtgagcgaggctggacacactggcaccatttattcagtcctcgccagattttggtggcggccctggtgcatgagcaaatccaacggatgcctgccgatgtgcaaccagcattgtgcttgtccttagccaagatgctggattggtctagcaagctttgccgttacggcactggggctgcgcgtgaatcaattacgcagactttctacaaccaagcctacaacactaattttttctatggcgttcgctcgtttgtaacaggtaagaactacctgttcctcactgaagcagcaagtagcattgcaggcagtctgtccgtcaagaataaggaggctgttggtcttcagcaggacgccgagctgtggatcaccgacccgccctatgcggatgctgttagctatcacgagattgcggagttcttcatagcttggctgcgtaagaacccaccggctcctttcaatgagtggaagtgggactcccgccgtgcaatggcgattaaaggagatggtgacgatttccggcgagggatgatcgacgcttattcggccatggctaaacacatgccggacaacggaatgcagtgtgtgatgtttacccatcaaagcactgaggtttggtcggacatggtgggcatcttctgggcggcagggctccaggtagtggctgcttggtacatagctacagaaaccagtactgagcttaagaagggaggatacgtacaggggactgtgacgcttatgctgcgtaagcgaagtgcaggcgaaaaagtcggcttcaagcagcgcattctccctgcggttcgcaatgaagtcgcgagccagatcatgcagatgatgcacctcaacgatgaggtggaagcccggatgggtgagcctgtattcaatgatgccgacctgcagatggccggctatgccgcagctctgaaagttttgaccgcctacaccaagatcggtgagaccgatgtcaccacgttcgccttgcggccccgcgtcaaaggcgagatcaccgtggtggatgagatcgtccagcaagcctccgaggcagccaacagcttgttggtgcctgaaggggtggcgctggacacctggcaagccattgatggcattcagcgcttctacttgcgcatgctggatatggaatcggtcggcgcctcaaagctggacaactaccagaactttgccaaggccttccgcgtgaatgactacacgaaagtcatggccagcatgacggccaatggttcgcggttgaagcaagttgatgagttcggctctcgtgagctaaccgatagcacggaaattggcccgacctggctgggccatctgatcatcgctattcagcagctgctagctgaggtcgaaccgcaatctgtggtcaaaacactgatggaggatctgcctgactacctcgaagtccgtccaaagctgatcgatctggttcgcttcttggaaaacaagtcccgcaatgaagctgttcgctcagccgctgaggtgcttgtttctcggatgcaaacgcagcggttggattcctga

SEQ ID NO: 324852 - DNA, 651 bp, Pseudomonas aeruginosa
atggccaacgcagtacgtaaagaggatttaggcatggctcgttccccgagtaaaaccataagtggggccaaaaaaaccaaggctcctgagcgccctaccatcggttttggtgtgccggccactactgaccctcatcactttatggtggaggtgcccaagagctcgactggcgcagttcgcatcatcgaaagcctcgggctgcaggctcaggatcagcaaaccagcatcatcgagcgcgttgtgattgagcgctcgcgctggacagcgattcgcagtgaagttcagcgggccttcaatgtgcgcctaaaggagcacaacctgcgcgtcagcgcttggaaggtgggcgataaccccgtggatcgcctgcttggcaaagagctttgcgtactggcctgggcggttgaagacatgagccccgagaagattccagttgcagtacgcaactggctggccttgcgccctgaagagcgctggtggctgttcggcatgaccgccatgagcacaggcggtgtgcatgacagcaacaaggggtggcgactggctctccggcacgcactgggcgacgtagcgcatacagaactattcaagccgcaggctgtgaaatcccgcaaaccagatactgagcgtccaacgctgggcctgttcgattaa

SEQ ID NO: 324853 - DNA, 3117 bp, Pseudomonas aeruginosa
atgctcaagacagtcaagcaggcatgcacattcaacccaatcattcgcgactaccggatgagcgaagggatcgagaacctttctgcgctcatctctgatgagggtgatgggcgtgagttctttgcacgaaactacatcacctcgggcatggagcagctctttcgcgaggggatgctgcggctggatggcaaatcagatcaggcagttttcgagctgacccaggcaatgggtggcggtaaaacccacatgatgatcgctctcggcctgctggccaaacacccgcatctgcgcagcgaagtgctgtcgcctgatcttgctaagcggatcgaaatcggtgaggtgcgagtagctgcatttaatggccgtaacaaccctgagaattacatctggggcgagatcgctacccaactaggtgaagaggaagccatcaagccctactgggtcaatggccctcgcgcggtcgaccaggctggatggaagaaaattatcggggacaaaccgaccctgatcatgctcgatgagttgccgccctaccttgaaaacgcgagcactactgtcatcggtggcggtacgctggctaccgtgagcacctacacactcagctgcctgatgagcgctgctctggagttaccgcgttgctgcattgtgattgccaatctatccggcagctatgtggctcagaccaaggcaattgccgaagcaatctctaacctccagcaagaagccagtcgccaagccagcaccatcacccccgtccagctggcgggcaacgagatctacgagatcctgaagaagcgactgatcctggagctacccgacgagtccgtcattaacgatgtcgccgaggaatatgcccagcgcatcaaggcagcagccgatggtggatacattgtcgcgaccagtctggagcaggtcgcccagcagatcagggaaacctaccccttccacccctccttcaagcatctggttgccttgttcaaggagaatgagggctttcggcagacacgaggcttgatgcagttcgctgcgcgtttgctcaagagcgtcgatgatcgcgaaactgatgatgtcttcctggttgggtcacaacacctgcgcctgaacgacgatgccgtgcgcgaagaggtcggccgtatcgccaactcgcttcgcccggccatggcccacgatattgccgacgatggtcaatccatcgcagaagaaatcgatgccaacctgggcagcgatgccgcccagcaggtcggtgccctgctgctagcgtcctcattctctcgggcagtaggtggtcgaatcggcctgaccgaggcagagatcattgagttcttggccgcacctaaccgtaagtccgatgagttcaagaccgctctggagaaactgcgtgagcaggcgtggtatctgcatcgcgaagaagagcgtttcttcattaaagaaacagaaaacctctctcgccagattgagcgaaatgctcgcgacatccctcagccgaagattgatcaggcgctgatcaacaagcttactgcggtattgcagccggttagcaaggctgcctaccaggatgtacaggtgctgccgcgactggacgatctaaagctaagcggacctcgtgttctgatcgtagtgcgcccggacggcaagctaccgccgagcgagctggtcaatttcttcgagtaccagcaagagaagaacaatttcatggtgctgtccggtcaggacagctacctcgccgataccgttgaagatcgtctgcgcgacctgtatgcaattgagtccatctgcaagcgtttgaaggacggtgacagcctcttcgaagaagcgcgtgatcgcctagaagatgcccagcagcgctttaacaaagctctttctggcacctacaaccggatctacttcccagccatcgacgagatgaccggcaatgcccaactcatgcaagccacaattgataatggcctgaacatgggacaaggcaccaactctgccgagcaccagattgagcagctcctggccagccctcgtgccaattacaaactgattctcaatctactggatgagccgggtacctactgggcgatggcagaagaggatctttggccggcgaatgaccgcagaacgccatggaaagacgtgctgatgcgcgccaaaagcaatccaatctgggcttggatgcccggcaccggtggcatggagaccctcaaggcagaagccctgaagcaaggtcgctggcgacaagggactgacggctacatcgagaaagggccgttcccggcagaaaaaactgcagtgaacgtgacagtgcatgccgcaaatgaagcgacaggcgaaaccactttggccctgatcccccgcaatgccggtcagagccctgtggttcattacgcgccgactgccaaggtcagcacaagcgatccgaaggtcgaagacctagataacttcacgaccgacgcggcaactctgtacttcctggcagtggacagcgaaggcaagcatgaaaccggtgagccacagcgctgggtggcggagcttcgtgtgcgtcatcaggtccaggccatcgccgacaagcgtatggtcactctctcctgcatgcctgctgccgatatgcgttacaccctagatggctcgaaccctaaagatggggaactgtacggagaccccttcgaagttggcccgcaggctgcccgtctaatggtctatgcctgctcgggcgaggctactcgtaccgctgacttccagatcccagctgccaacgacaaacaggttcagatcgacgatgccaagccggcaaagttggctgagaacaagaaggtgtcgctcgacagtaccgaaaaggtgttcggcgtactcaatagtttcaaaagctcgccggctaccttcaagggggtacgtatccatattggggaaggtgagaacgccgttagcatcaactttgctgagcgcggggttacggcttccgtgatcgaggcggcgattaacggtctgcgtaaggccatcgggaatgagcaagaaaccgttaccgtgcagattcgaagcggagcagccttcgagaatggcttcgctgccaaggagttcgccaaactcagtggtgttgaactgcgccctggtgatgtgattcaagaggaatga

SEQ ID NO: 324854 - DNA, 174 bp, Pseudomonas aeruginosa
atgaaaactagcaatcgcgttgtgatcgaggttgatcctgcccaaaagcagcagatctacgccgcactcaaggcgcgtgggttgaccatgcgcgagtggtttctgcagcaggtgagccaggaactttccattcccaagcccaccaccccctccagtcagtcgagcaacgattaa

SEQ ID NO: 324855 - DNA, 1791 bp, Pseudomonas aeruginosa
atgaagctcgcaggaatattcaaagaagcttttgagaaagccggtgtgcctttaccggagaccccgaagaaaaaggccgttccggtactggatcagcgaaagaagaaagttacccggccagatgccaataaggaacgaaaggcccggcccaagactgccaggaagaaagtcaatcagcctgcaaagtcggctccagaacaaaacggcaaaaaagttacggtgacggccaacggaatctgcatcacgcgttggtcaagtccggagtcagtcgccaagggagctaccagcaaggttgcggcccaatcttatggggctgaggggggtaaagggggctctgctgagagtctgcgcagtgatcccgactactcgatcaccgccaccgctggggcctgcgttacttggcatacgctccagcatggtcggctagcctctctcatggagtggccgctgggggggtatgagactcagttaaacaaatgcactgacgaaaagttcttgtgcctgggactggactttggcagctcgacgctcaaggccgtcatcagtgacggggagaggcagattacatacgcagttccgttcagagatatccagggcgttgagggctacctgctgccgtgtagggtttatctgggcgaaaacggatacagcctggaagggcagggccaggcctatcaggatctcaagcttgctttgttagctaacgccgagtcgttgcaagctcaaatgcctgtcgttgggtttcttgccctggcgctgaggatgatcagaggctggttgctgagcactcacggagaaacctactcaggagccatcgtctgggatcttgctattgggctaccagttgcaagtcgccgtgacgaaaaaactgtaagactttaccaactggtaagcactgcggcctggatcgcctcgaccgagaggcagttgacgccagagacgataggcctagcactaaaacgagcagaagccttgtgcggtggtgccgaggctgagtgtgacagcgaagacattgaagtaagggtggagccagaaattgctgcgcaaatttatggcttcgtcagttcaggtgcctacgaccctcacgccagcaatatctatctaatggttgatgtaggtgcgggaacactggatgcctctgtgtttcgtgtcgagcgcaagagtgggcagcgcaaagacagcttggtcatttttagaaccacggttgagccccatggagtgatgaattttcacaagaagcgtatggattggctgcagtcggcgctggtgcaaaagcttccggataggccggacctgcgactggccgtgcaggccatcagtcacttgactgatgccgaggaggcccttcccgatagggtagatgggtacttcagcggggttgatgtccagttcaaaggtcgaagtctcgatcagcttttttatgcgcaggtgagccgccaagttgtccaagatacctaccttcacgtggcaaatgagaggctactcgacaggcaacaaatggctggtatgcccatgtttctctgtggtggcggcagtcgtttggggttttacgccaagctgaggggcgacctacattctgcgcgagggttcagctggtttggtgttactccgaaaccgttacagaagccgcgaggattagtggcgccaggactgccccgtgctgaatatgaccgcctttccgttgcctttggtctgagccaattgaagctcgataagctggttatggatgttcctgctctgaccgagaagcccggcgcagtggacttcagtgaccgctacatcgagaagtaa

SEQ ID NO: 324856 - DNA, 1692 bp, Pseudomonas aeruginosa
atgtacgaactgtcagaggacgaaagtgatgatgaggtcgaagagcccccgatcctcggcagcctgattgagcagctagttgaggtctcgcaatcagttggtgactacgagcagctgagactgcatgacagcaagtatcggctgctacgagaacatctgcgtaaatactgtgcgcagttccctgggaaaaagatcgtgctcttctcattcttccggcagacccttgcctacctgcatgagcgtctgagcgaggacggtatctcctgcgtcgttcttcaagggggcgatgacaaagacgcgatactgcgggccttcaaagccgatacagggccccaggtgttgctgtcgtccgaggtcggctcggagggtgtcgacctgcagttctccgctctgttggtgaactacgatctgccctggaatccgatgaagatcgaacagaggattggtcgaattgatcggcttggccagcaatccgacaagatactcatctggaacctaatgtatgcaaacaccattgatgagcgcatctatgatcgactgctgatgcgcctggatatcttccggcaggcgctcggcagcatggagtccatcatcgggcgcgtcatcaaaaagatgaccaaggagcttttcagtcatcagcttagtcctgaggaagaaacgctacgtatcgaaaacaatctgcaggcccttgccgaaaccaagcttaggcaggagcgtttagaggccgaggctccaaatttggtggctcatggcgacttcatcatgaacaaggtacgtgcggctgagcaattggggcgttacgtgcgctctgatgatttacatgcctatgtgaccgatttcattctggacacctacccgggtactcgcttcatccctgtagatgatgagctggaactgtacagcgtcgaattgtcgatggatctgcgggtgcaactcagtcagtttattcaggataagggactgcaagggcatacgcagttgcttgatgccagggcgctcccggtactgttcgagaactgccatcgtgcaccttcttcgcgttttgaacgtgtggctcaagatcatccattggtgcgcttcgttaccagtcagctcggtagccaggatcaagccaaccagcgttatcccatcagtgctgtccagctgtcgcgcttggcatcggaaggtattgaacctggtatttacgccttcgtcgtttcgcgttggagctttagtggcgcacagacgaatgagcgactggtctatgccgccaaggagcttgatagcgagaatggactggaagcagagcgcgccgagcagctagtgaatctcgccgcgttagcaggggaggattggcctgcagcaaaaaatctgctggtgccgaattcggtagtagatgcctacgaagagtgccgcggccagattgctgaccagtttagggatgtcaggcaggcaatgcgagatgagaacaacgaccgcgtcaatctattaatcaagctgattcgcgaccgctgtgacttggaggtcaagcgtatcaatgagcgtatggtcgctctccggcagtctggtaaagaacgcatgatcccggctgaaaagggtaagcgtgatgctgcattgaaacgacgagaacagcgtgaggccgagttgcgcctcaaacaaaagcttgaggctgagaaccacttcgttacagctggagtcatcaagatcggttga

SEQ ID NO: 324857 - DNA, 144 bp, Pseudomonas aeruginosa
atggcccagaagattggtcttggttcccgtgttgcgcaggtagtgagcctcatcaatcaccagcaaatgcagcaacggatcaccggctgggtcggcatcctccaggaaacgagccagcttggccgcaccctgcttattgtttaa

SEQ ID NO: 324858 - DNA, 846 bp, Pseudomonas aeruginosa
atgcaatctgttacctaccgtcttgatcagagccccgtgacgccatttcagtaccagcaggatgtcgagaagtacgcgggcaatattgagtgctcagagtgcgaggccagtgcctggttcgtaagaagttcagtcagtggcggtcgggagcgtgttgcttgcttcgccgcgcaccaccaagacggttgccagatcaagacggtggtactggttgttgacgatgaaggggctgagccagatgaaggtacggacacgacgcgcatcaatgtcgatctagataagcgcaaaccccaggaaatcctggttccagagcccagagaacggcagcccgtcgattctccgtggggcgtgctacagcggaaatacgcaaacgctgcagactacccgatcaacaaatcactccggcagatcctgtcgtgcctgatcaagaaccccgactacccagaggatgatgtttcgatccggatcacaactgacggtggtcgagtcgctctggaaggggaagtccgtaagttgctctcccatcagcgacagcttgctgggatcgaactcggtacggttcgcttgttctgggggctggtcaccaacgtcaaccggaaggagggcgaggtctggctcaactgcggggattaccgtactgaaccaagcctgctcgtcagagatgagaaccttgaagaggaaatgctcaaggcgttccgcctcaaaagtttggatgagctcgagggggcctatttccttgtcatgggatggcttgccggctcggagcgcaagcccataatcaacttcggctttgcgaagtacatcgcctttgttaagtaccgcgtcaagcatgacgaagaggcttga

SEQ ID NO: 324859 - DNA, 471 bp, Pseudomonas aeruginosa
ttggagcctctgcaggagcgctttggactgatccacattcgctcggcttaccgagcgccggcagtcaacgccaagggagccgagaacaacaaccagtacagctgtgctgccaacgaaaaaaactacgcggagcacatatgggattatccggacgctgaagggcatctgggcgcgactgcctgcatcgtggtgccggcattactgccttggtatgaggagcgcaaggactggacaccgctggcctggtggattcacgacaacctgccgtatgccagccagttctggtttcccagacttgcggcatttaaccttcggtggagcgcaaacccgaacacgttacccagcatcagcacctacgttaccaacccccataccggtgacaagacagcgttggtgaagggcggggtggccacgctgagcttggatgagcgcaaggcgatcgttcgcccatggttggcgagtctcaactag

SEQ ID NO: 324860 - DNA, 1086 bp, Pseudomonas aeruginosa
atgctggagctagacgacactcgtaacacggttatcggctgtcctagacatatgctcgttcttggagggcctgggtcaggaaagaccaccgtagccctactaaaagcggaagcgctgatcggcgagcagcaattgaaaaccggtcagcgggtgcttttcctcagcttcgccagggcgactgtcgcgagggtagccgaacatgcgggtaagcttttgccggcattagggcgcggcaggcttgaggtcaatacctaccatggtttcacctgggggctactgcgcagccatgggtatctgttgcgcgcagatagccccataactcttctacccccgccagaggcagcatctcggttgtccagccttcccgaggatcagcgagaggctgaaaagcatcggctgctggcagaggagggtttgcttcatttcgaccttttcgcgagcaacgcagccctgctgcttgagagcagtaaagcgctgcagcgcatctccggatcaagctatcccctgatcatcttggatgagttccaagacacgaacgaagatgagtggcggttcatacgcgcacttacgccgcacagccaaatcatggcgctagctgatcctgagcaacgtatttatgaattccgcggagcgaatgcggcccggatccaagaataccaagatgctttcaatccggacgttttcaactttggactagagaaccaccgaagcaacggaacggacatcgttcagttcgggaacgacttactgaatggggtgaataaaggcaaggtctacaagaacgtcgcggtgcaaacgtataccccccggaaaggccagctgcacttagacttcaagagggtcgtgatcggcatcatacgccgcttgctgaaggccggcagagattggtccttgaccatcctcgtaccgagtaaagacttcatggcagaggtatccgcttacctctccagcgatgctgatgagctaccacggattcctcatgacgtggcgttcgatcaagaagctgctgccctggccgcggtgaccattgcggccctcctggagagggtgacctgccccccgatttcagtaccacgtcaaacttag

SEQ ID NO: 324861 - DNA, 822 bp, Pseudomonas aeruginosa
gtggtctgttcagctttcgatgtggcgcggtcttgctactacgtccaccgtcttcgacggcggcgtgtcgatgctcgccgcgtggcgctacgcagccaggtcaaccagttgttcagccagagtcggggctcggccggcagccgcagcatgctgggcatgctgcgcgaagagggcgtgaccatcggccgtttccgagtgcgtcggttgatgcgtgagctgggcctggttagcaagcaaccgggctcgcacgcctacaaacaggccacggttgagcggccggatatcccgaatcggctgaaccgcgaattcgcgaccgagcatcccaatcaggtgtggtgtggcgacatcacctacgtctgggcgcaaggccgttggcactacctggccgcggtgctggatctgcatacccggcgggtgatcggctgggcgttctcggccaagccggatgccgaactggtgatcaaggccctggacatggcctacgaacagcgcggcaagccacagcaggtgctgttccattcagaccagggcagccagtacgccagccgcctgtttcggcaacggctctggcgctatcggatgcagcagagcatgagtcgccgagggaattgctgggataactcggcgatggagcgcctgttccgcagtctgaagtcggagtgggtcccgtcaacgggttacctgacggcgcaggaggcccaacgggacatcagtcattacttgatgcaccgctacaactggatcaggccgcatcaattcaacgacgggttaccacctgcggtggccgaagaaaaactcaacccactgtccgggatgggttga

SEQ ID NO: 324862 - DNA, 1365 bp, Pseudomonas aeruginosa
atgcgtgttgcaagcttgaaagtagaaaattttcgcgggattagaacagcagagattctgcttcctgatcatgcggtgattgttggcgacaacaacatagggaaatccactcttctcgaggctatcgaccttgttctggggccggagcgcttgtcacgtcgcccggttattgatgagcacgatttctacgctagcgaatacatcggtcccgatgggcagcctgtccccattagcattgaactcgtggttatcggattgaatgccgaccaggaaatgcgcttcagagaccaccttgaatggtgggataacgagcactctgctgttctcgagggacctcccgctcaggggacagatgctgaaggtgtccagtcctgcctgcgcgttggtttcaccggtggatatgacgccgaggaagatgatttcaccggctcaacgcatttcgcgtctcctgcaaagcaggacggcacatttgatgcttttcgtaacaccgacaaacgggagtgcggtttcctttaccttcggaccgtgcgcactggaagtcgagctttaagcctagaacggggctcgttgctcgacatcattctgaggttgcagcaggaaaagaacttcaagatctgggaggacttgcttgtcgagcttcgcgaccttgaggttgccgaaaagccggagcttgggatcagcaacatcctttcaagtgtgcaggcctctatcaggaattacatgccatcagatggcggtactgatcctcacatgcgggtatctgacctcacgagagagtccctccgtcgaacactcacagtgttcatggccacgggtgctcaacgtagcgacggcagcgaacatgccgccccgtttcaacaccagggcaccggaacgataaacatgatggttttggctctgttatcactcatcgcggagctgaagcagaacgtgatctttgcgatggaagagccagaaattgccatccctccccatatccaaaaacgcatcatcaatggcgtccgaggtaagtcagcccaagccctgttcacgtcgcactctccgtacgttcttgaagaattcacgccacagcagatcgtcgtaattagtcgggaggaagggcatctgcaggcacgcgaggctgggatgccacctggcatcaaagccaagctttataggcaagatatccggcagcgggtctgtgaagccttgcttgcacggcgtgtgcttcttgcagagggacgcactgaatatgatgcctggcccgcagtggctcgcatgctccacaaggaagatcctaaccggttcatgccgttagaggcattaggtatccccatcctagacgcaggcagcgactcccagatagctgctatgggggctttgtag

SEQ ID NO: 324863 - DNA, 195 bp, Pseudomonas aeruginosa
atgcccatcgaaatcaggctggacgtcatgctcgccctgcgcaaggccatcggtatcaccgaacaaaacctgtcgctgctcaagcagggcaaggtaaagggcattcgcctcgctaccctggaggccatctgcgcctacctggcgtgccagccgggaaacctgctggagtacctgcccggcccgaccgaggagtga

SEQ ID NO: 324864 - DNA, 954 bp, Pseudomonas aeruginosa
atgtcccgccagtccgtggccgtggtggccttcgaccgcatcagtccgttccacctgtcggtgccctgcctggtgttcggccaggagtgctacgacccctgcgcgcaggccttcgacctgcgtgtctgcgccgccgagccgggccggctgcgaaccacggtggggttcaccatcgaggccgaggccgggctggaagcgctggccgaggcgcagaccgtgatcgtgccgagctggcgcgatccacacgagcgtccgccacaagcgctgctggatgcgttgatcgcggcccgtgcacgcggtgcgcaactggtgggcttgtgcctgggggccttcgtgctggccgaggccgggttgctcgacggtcgccgcgccaccacccactggatgtgggcggaggatttcgccgggcgcttccctgcggtgcgggtggagcccgacgtgctgtacatcgaggacgacggcctgctgacctcggcaggcaccgtcgccggcatcgactgctgtctgcacctggtccgccagcggctcggtgcgcagactaccaatcacctggcccggcgcctggtggtggcgccgcatcgacagggcggccaggcccagttcatcgagcagccgctgccggacagtgcccaggacggccgtctcggcgagctgctggtgtggctgcggcagaacctcgaccaggcgcacagcctggacagcctggcacagcgggtgctgatgagccggcggaccttcacccggcatttccgccagctcaccggcaccaccgtcagccagtggctgcaggccgaacgcctggccctggcccagcgcctgctggaaaccaccgagcattcggtgcaggcgatcgccgggctggccggcttcggttcggcggtgtcgttgcgccagcagttctccgccgctttcggcctgccgccgctgggctaccggcgcgccttcgcctcctag

SEQ ID NO: 324865 - DNA, 387 bp, Pseudomonas aeruginosa
atggaaccgcttatggacactatcaagaggcgcagcgcacagggctgtcgcccctctatagccctgcttgagctattggccgctgaagcccgtctggtaatcaccagggataatccaggccgcttgtgcgaactggcggtcgtggcggaaacaggccggagaggtatgcctgagaatgaagttgtagccgctcgccgagcatatgcggccagcttgggggtgacgctgtccggcccgaccaaagactcagacaaaccggcccatatcagtcacgccgttgaccactccaatcacaatccgaacgccagaaaccgtatcaatctcggaaacgccagagcgttcaggcagaacggacgcttctacatctttatacccgaaccgatataa

SEQ ID NO: 324866 - DNA, 1260 bp, Pseudomonas aeruginosa
atggcgcataacaacaattccgccagttacgaaaacgtcctgctctgcgtgctgttcctgaccttcggcttcgtcttcttcgaccgcctggcgctgtccttcctgtttcccttcatggaacaggagctgcaactgagcaacagccacctgggcatgctctcctcggtgctggccctggcctgggcggtatccggcgcgctggtcggcgcctggtccgaccgccgcgggcagcgcaagccgctgctgatcgtggcggtgatcctgttctcgctgtgctcggcgctgtccgggctggtcggcggcttcctcagcctgctgctattccgcggcatcatgggcctggccgaggggccgatcctgccgctctcgcaatcgctgatggtcgaggcctcctcgccgcatcgccgcggcctcaacatgggcctgctacagggctcggcggccggcctgctcggcgcggtgatcggcccgccgctgctggtggccctggccgaagccctcggctggcgtcacgccttcatcgtctcgttgctgccgggtctgctgatcgcctggttgatctggcgccatgtgcgtcccgacccgccccgcgcgcagcgcccggcgccgcgcgcagaagaagcgaaaggcaagcgcctggcactgctgaagagccgcaacatcctgctctgcaccctgatcagttgcgtattcgtcacctggttcatcgtgctgatttcctttaccccgaccttcctggtcaacgcccgcggcttcagcccggcgaccatgggcaggctgatgagctgcctgggcgtcgcctgggtggtctggggcttcgccgtaccggcgatatccgatcgcatcggccgtcgaccgaccctggtggcgttctccctgctcgccgcgtgttgcccgctggcgctgctctatgcgccgaacgcgaccagcctcggcctgctgttgctgctgacctacaccgggctcggctgcttcaccctgttcatggcgaccatcccggcggagaccgtctcgcgcggcgtcatcgccaccgccctcggcctgatcatgggcctcggcgaactggtcggcggtttcctcgcgccgaccgtggccggcttcgccgccgaccgcttcggcctgtccatcgtcatgtggatgtcctgcggcggcgccctgctcgccgcgttcctctcgctgttcctgcgcgaaaccgcgcccgccgtgctggcgcgccagcgcagcgcgcctacctccgtcctgcaaggaaaccaaccatga

SEQ ID NO: 324867 - DNA, 1113 bp, Pseudomonas aeruginosa
atgagcctgcccaacgccaatctcatcgccagttcacgcaaggccgccgcgcagatggccacgcgcgacacgtcgttcatcttcaacgagtggtacgtcgccgccttcgccgaggaggtcggccgcgaactgctcgcgcgcactctgctcggcaagcgcgtggtgctctatcgcaccctcgccggccaggcggtagccctggaagatcgctgcgcgcatcgctccttcccgctatcgcgcagtcgcctggagggggacgggatcgtctgcggctatcacggtttccgctacgacagccagggcgagttgatcgagacaccgtcgcagaaagcctgtccgcgcggcgtcggcatccgtcactacccgcttctggagcgcggcccgctggtctggatttggctcggcgacccgcgactggccgacccgaagcgactgccgcagcggccctggctggaggatccgggctgggcctgctccaagggctacttcctacacccgggcaactacgtgagcatgcacgagaacctgatggacctgacccatctcacctacctccacgccaataccatcggcaccccggattacgccggggcgccctatgagctggacctgaaggaaggccactaccggctggtacggcacgtgctgccgaccaccctgtcgccggtctggggccgcaccaccggcctcgacggctgtcccacggcggcgcgcatcaccacctcggagtttctctcgccaggcctgcaccaggtcagcgcgaccttctacgacacagccctgcccgccgagcggcgaccggaattccacatccgcacggcgcacatcctcaccccggagacccacggcagcatgcactacttcatcgtccacggacgcgatttcgcccaggacgacgagaccgtcggcgctttcatgcacgagcaactgttcgccgccttcgtcgaggacgtggaaggcctcggcgcgctggaaaaggtactcgcggaggccgatgaggatagctacgagatctccgtcgccagcgacgcgccggcggtggccacccgcacctacctcaagcgccgcgccgatgaggaagcgcgccagcgcgcggcgcaccgggtggcctga

SEQ ID NO: 324868 - DNA, 966 bp, Pseudomonas aeruginosa
atgagcgcatcgccttcctcccgcctgcacctgcaggtcaccgatttccgcgctgttgcgcgcgacgtggtgctggtcgagctggccgccgtggacggcaccgagctgccggccttcacccccggcgcgcatctggagcttcacctgggcaacggcctgatccgccactactccctgctcaacgactgccgcgaacgccagcgctaccaactggcgataggccttggcgacgacagccgtggcggcgcccgcttcatccaccgccaactgcgcacgggcgaccgcctgcacgcggcggcaccgcgcaaccacttcatgctgcgcgaagacgccgcgcgctactgcttcgtcgctggcggcatcggcatcaccccgattctctcgatggttcgctggtgccaggcgcagggcaaggactggcgcctactgtatgcggtccgcgaacgccagcgcgcagccttcctcgccgaactgatgacgctcggtggcgaacggacgcggctgcattgcagcgacgaaggcgacccactcgacagtaccgcgctgatcgccggcctaggtgccgacgaagaactctattgctgcggacccgacgggttgatgcaggccatccgcgacgccgggagcggctgcgcggaacgcctgcacttcgaacgcttcgacgctccagtagcgccggcgtcctcgtccggcggcaccgacgccttccgcctggagttgcgccgcagcgccctgagcctgcgcgtcgaaagccaccagagcatcctcgaagtcctcgaggaacagggcctggagcctccctacgcctgccgcgccgggatatgcaggacctgcgagacacgcgtctgcgccggcgagccggagcacttcgaccatgtgctttccgacaccgagcgggccagcggggaaaccttgctgatctgcgtatcacgctgccgcggcaactacctggaactcgatctctga

SEQ ID NO: 324869 - DNA, 780 bp, Pseudomonas aeruginosa
atgatcagcttctggaatgccccgccggggttgccgtcggcggacctgcgccccttcgtcgagctggcctgcgccttgggtggcgaaggcttccccgccgctctgctggaaacccttggccattgggttgccgcccgtcatttcaacgtgctgcgcatcggtgcaccgcgccccgaactgctcctggccggcactcgccatcgcgacgcgcaactagtgtggcgctgctggcaggcctattcgcggtactaccacagccatgacccgctgttcctgcgcatgcagcgccagcgccgcggcccggtgccgctgctgggccacctgctggccgaggacatcgagttcgatgcttaccgcgaggcgatctatcgggacaatggcctgagcgagcggctgtcgagcctgcattgggacgaggaaggccggccgctgctgttcaatctctaccggcaccgcgaggacggctatttcagcgagcgcgagatcgccgccttcgagcagtgggtgccggccctgctgcaactgctgagggggcacctggccttgcgccggggacgcagcgcgaccgacgagtggcggctggcgctgttgcaccgggcgacggacctgacaccccaggagctggcggtctgcctgcacctgctgcgcgggttgagccatgccggtatcgccgccgagctggggctcaaggaaagcacggtgaaaacctaccgcaaccgcgcctttgcccgcctggacatccattttcgcagccagcttttcgccctggtgcagggctga

SEQ ID NO: 324870 - DNA, 1386 bp, Pseudomonas aeruginosa
atggacaccaccttcggcctcgacctggcccgcgtcgaagcgctgttcaagcgcgagctgcgacgcttcgacgaactgcatccgcgctccgcccaggcctaccgggaaaaccgccgccactggctgtacggcgcaccgttgcactggatgcaacagtggccgggcaactgcccgctgctggtgaaggaggcccagggcgcgcgcgtcaccgacatcgacggccagcagtacgtcgacttcgccctcggcgatagcggcgccatgttcggccacgcccaaccggcggtggccgacgccatcgcccgccaggcgcggcgcggctcgaccctgatgctgccgaccgaggacagcctgtgggtcggcgccgaactggcgcggcgcttcggcctgccctattggcaggtgaccacctcggccaccgacgccaaccgtttcgtcctgcgcctgtgccggatgctcagcggacgtgacaaggtggtggtgttcaactgcaactaccacggcagcgtcgacgaatcgcaggtggaattcgacgccgccgggcgcatggttccgcgcgcgggcgttcaccccaatggcgtacgccacgacgccaccacccgcctggtggagttcaacgacctcgacgcgctggaggccgccctcgcccatggcgacgtcgccgcggtgctcaccgaacccttcatgaccaacgtcggcatggtcccgccggccgaaggcttccacgccggcctgcgcgaactgacccgccgccacgacgtggcgctgatcatcgacgagacccacaccatctcctgcggtcccgccggctatagcggcgcgcacggcctcgagccggacttcttcgtcctcggcaaatgcatcgccggcggcattcccagcgccgtctggggatgcagccaggcgcaggcggagcggatctgggcggtactgccgcacttccgaccggggcaggcgatcaaccatttcggctttggcggcaccctggccggcaacgcgctgcaactggcggcgatgcgcgcgaccttcgccgaagtgatgacggaggacgcctatcggcacatgttccagctcgccgcgcagctcgaggcgggcgtccgcgcgacgctcgaggaactgcgcctgccctggcacgtgacgcgcatcggcgcgcgcgtcgagtacctgttcatgacccgcgccccacgcaacggcggcgaggcccaccacgcacgcaacggcctggtcgaggcctgcctgcacctctacctgctcaaccgcggcgtgctcttgacgccattccacaacatggcgctgacctgcccggcgacccgcgcggaggacgtcgaactgcacgaccgcctgctccgcgattgcctgggcgaactgttggagcgcccatcgtga

SEQ ID NO: 324871 - DNA, 501 bp, Pseudomonas aeruginosa
gtgaagacattcgaccagctttccgtcatcggtctgcgcgagtggatcgcctttcccgaactgggcatggtcgggctgcgcgcgaagatcgacaccggcgccagcacctccagcctgcatgcctcggacatcgttcccttcgagcgcgacggcgagaagtgggtgcgcttcaccgcccacctcggcacgctggtgcagcgccggcaccgttgcgaagcgccgatggtcgcgcgcaagagcattcgcagctccaacggccaggcccagacccgctacgtgatccgcaccaccctggcgctgggcgatcgcatgtggccggtagagttcaccctggcctgccgcaagtccatgcgctatcgcgtgctgctcggctccaaggcgctgatcgccgggcaactggtggtcaacccggccctggcctacgtccaggatcgtcccgagtcgccggccgccctgcccgcggcgacgagcatcgacctgctcgacgggagcccggtttga

SEQ ID NO: 324872 - DNA, 906 bp, Pseudomonas aeruginosa
atgaaaatcgccgtgctgtcgcgcaatccccggctctactcgacccgtcgcctggtggaggccgggcgggagcgcggccatgaaatggtggtcatcgatacgctgcgcgcctacatgaacatcgccagccacaagccgcagatccactaccggggacaaccgctggagggcttcgacgcggtgatcccgcgcatcggcgcctcggtgaccttctacggctgcgcggtattgcgccagttcgagatgatgggcgtgttcccgctcaacgagtcggtcgccatcgctcgctcgcgggacaagctgcgctcgctgcaactgctgtcgcgcaagggcatcggcctgccggtgaccggcttcgctcattccccggacgacgtcccggacctgatcgagatggtcggtggcgcaccgctggtgatcaagctgctggagggcacccagggcatcggcgtggtcctctgcgaaaccgagaaggccgccgaatcggtgctcgaggctttcatgggactcaagcacaacatcatggtccaggagtacataaaggaagccggcggcgccgacatccgctgcttcgtggtcggcgacaaggtgatcgcctcgatgaagcgccaggcagcgcccggcgagttccgctccaacctgcaccgaggcggcagcgccagcctgatcaagatcaccccggaagaacgcatgaccgccatccgcgccgcccgcgtgatgggcctgaacgtcgccggggtggacatcctgcgctccaaccatggtccgctggtaatggaggtgaactcctcgccgggcctggaaggtatcgaatccaccaccggcaaggacatcgccgggatcatcatccagtacctggaaaagaacggcggcccccacctggccaggacgaagggaaaggggtga

SEQ ID NO: 324873 - DNA, 924 bp, Pseudomonas aeruginosa
atgacctctcgtccttcctccgaccagacctggcagcccatcgacggccgggtggcgctgatcgcgccagcctcggccatcgccaccgacgtgctggaggcgaccctgcggcaactggaagtgcacggcgtggactaccatctcggccgccacgtcgaagcccgctaccgctacctcgccgggacggtcgagcagcgcctggaagacctgcacaacgccttcgacatgccggacatcaccgcggtctggtgcctgcgcggcggctacggctgcggccagttgctgccgggcctggactgggggcgcctgcaggcggcctcgccgcggccactgatcggtttctccgacatctcggtgttgctcagcgctttccaccgccacggcctgcctgcgatccacggcccggtggccaccggactcggtctgtcgccgctgagcgccccccgcgagcagcaggagcggctagcctctctggcctcggtcagccgcttgctggccggaatcgaccatgaactcccggtgcagcacctcggcggacacaagcaacgcgtcgaaggcgcgctgatcggcggcaacctcaccgccctggcctgcatggccggcacactcggcggcctgcacgccccggcggggtcgatcctggtcctggaggacgtcggcgaaccctactaccgcctggagcgcagcctctggcaattgctcgaaagcatcgacgcgcgccagctcggcgcgatctgcctgggctcgttcaccgattgcccgcgcaaggaagtcgcccacagcctggagcggatcttcggcgaatacgccgccgccatcgaggtgccgctctaccaccacctgcccagcgggcatggtgcgcagaaccgagcctggccttacgggaagaccgcggtgctcgagggaaaccggttgcgctggtag

SEQ ID NO: 324874 - DNA, 1320 bp, Pseudomonas aeruginosa; identical to SEQ ID NO: 321804

SEQ ID NO: 324875 - DNA, 744 bp, Pseudomonas aeruginosa
atgtcgaaccctgccgccctggccgaaggtgaaaagatcctcgtcgtcgacgacgacgcccgcctgcgccgcctgctcgaacgtttcctcgacgagcagggctaccgcgtccgcgcggtggagaacaccgagcagatggatcgccttctatcccgcgaactgttccagttggttgtgctcgacctgatgcttcccggcgaggacggcctcactgcctgccgccgcctgcgcgaacagaacaaccaggtgccgatcatcatgctcaccgccaagggcgacgagggcagccgcatccagggcctggaactgggcgccgacgactacctggccaagccgttcaacccgcgcgaactgctggcgcggatcaaggccgtgctgcgccgccaggcgccgctggtgcccggcgcgcctgccggtgccgacgaggtggtgaccttcggcgactaccagctgttcctcgccacccgcgaactgaagaagggcgacgaggtacacatgctgaccaccggcgagttcgccgtgctcaaggccctggtgcagcacgcccgcgaaccgctgacccgggacaagctgatgaacctcgcccgtggccgcgagtgggatgccctggagcgttccatcgacgtgcagatctcgcgcctgcgccggctgatcgagccggatccgtccaagccgcgctatatccagacggtctggggcgtcggctacgtgttcgtgccggacggcaacgcgcgcaaggcctga

SEQ ID NO: 324876 - DNA, 390 bp, Pseudomonas aeruginosa
atgagcgagatgcccgcccgcgagcagatgatcagcgcctacagcgaactggtcggcctggacccggtcagcctcggcgacggcgtcgccgaggtacgcctgccgatggccgcgcacctgcgcaaccgcggcggggtcatgcacggcggcgcgctgttctcgctgatggacgtgaccatggggctggcctgctccagttcccatggtttcgaccgccagagcgtcaccctggaatgcaagatcaactacatccgcgccgtcgccgacggcgaggtgcgctgcgtcgcccgcgtcctccatgccgggcgccgcagcctggtggtggaagccgaggtgcggcaaggcgacaaactggtcgcgaaaggacaaggtaccttcgcccagttgtaa

SEQ ID NO: 324877 - DNA, 1584 bp, Pseudomonas aeruginosa
ttgagcgatcttctctcccgccgcctggctctgctcggcgccgcagccaacctgcccctgctgaccgagtgcctgcatggcatcgagcgcgaatgcctgcgagtcgatagcgacggcaagctggcgctcaccccccacccccgggccctgggttcgaccctgacccatccgcagatcactaccgactactccgaggccttgctggagttcatcacgcccacggaaaccgacgtcgccgacactctgggcgatctcgagcgcatccaccgcttcgccagttcgaaactggacggcgaatacctgtggagcccatcgatgccctgcgagctgccggacgaggagagcatcccgatcgcccgctacggcagctcgatgatcggccgcctgaagtacgtctaccgcaagggcctggcgctgcgctacggcaagaccatgcagtgcatcgccggcatccactacaacttctccctgccggagaggctctggccgctgctgcgccaggccgaaggcagcgagctgtcggaacgcgactaccagtccgccgcctacatcgccctgattcgcaatttccgccgctacagctggctgctgatgtacctgttcggcgcctcgccggccctcgacgccggcttcctgcgtggccgcccgagccagttggagcgcctcgacgaacacacgctctacctgccctacgccaccagcctgcggatgagcgacctgggctaccagaacaacgcccaggccggcctgacgccctgctacaacgacctgcagagctacatcgacagcctgcgccaggcggtcagcacgccctacccgccctacgagaaggtcggcaccaagcaggatggcgaatgggtgcagctgaacaccaacatcctgcagatcgagaacgagtactactcgagcatccggccaaagcgcgtcacctacaccggcgagcgtccggtgcaggccctggccgctcgcggcgtgcagtacgtggaagtgcgctgcctggacatcaacccgttcctgccgctgggcatcgacctggacgaggcgcgcttcctcgacgccttcctgctgttctgcgcgttcagcgacagcccgctgctgaacggcgagtgcagcgacgccaccaacaacttcctcgccgtggtcaaggaaggcaggcggccgggcctgcaattgcaacgccgcggccagccggtggaattgcaggtctgggcgaacgagctgctcgaacgaatcgccgacaccgcggcactgctcgaccgcgcgcgcggcggcgaagcccacgcggcggcgctggcagcgcagcgggcgaaggtggccgatgcggaactgacgccttcggcgcaggtgctgaaggtcatgcgcgagcgcggcgagagcttcgaagcgttctccctgcgccagagccgcgaacacgcggagtatttccgccagcatccgctggccgccgaagagcaggcgcgcttcgagaagatggccagcgactccctggccgaacagacggagctggaacgcgaccaggatggcgacttcgataccttcgtcgccgcctaccaggcgagcatcctcggcctgatcagcaactga

SEQ ID NO: 324878 - DNA, 1299 bp, Pseudomonas aeruginosa
atgcccgactacgtcaactggttacgtcacgcttcgccctacatcaactcgcaccgggaccgcaccttcgtggtcatgctccccggcgaaggggtggagcatcccaatttcggcaatatcgtccacgacctggtccttctccacagcctcggtgcgcgcctggtgctggtgcacggttcgcgtccgcagatcgaggcgcgcctggccgcgcgcggcctggctccgcgctatcaccgcgacctgcgagtgaccgatgcaccgaccctggagtgcgtcatcgacgccgtgggtagcctgcgcatcgccatcgaggcgcggctgtcgatggacatggccgcctcgccgatgcagggcgcgcgcctgcgggtcgctggcggcaacctggtcaccgcgcggccgatcggcgtggtcgagggtgtcgactatcaccataccggtgaggtccgtcgcatcgaccgcaagggtattggccgccttctcgacgagcgcagcatcgttctgctctcgccgctgggctactcgccgaccggggaaatcttcaacctggcctgtgaagacgtggccatgcgcgccgccatcgacctggaagcggaaaagctgattctctacggcgccgaacagggcttgctggacgcatccggcaaactggtccgcgaactgcgcccgcagcaggtgcccgcgcacctgcaacggctgggcaacagctaccaggccgagctgctggacgccgcggcgcaggcctgccgggccggggtcaagcgcagccatatcgtcagttacaccgaggacggcgcgctgctcagcgagctattcacccgcaccggcaacggcaccctggtcgcccaggagcagttcgagcagttgcgcgaggcgggcatcgaggacgttggcgggctgatcgagctgatccgcccgctggaagagcagggcatcctggtacgccgttcccgcgaggtgctggaacgcgagatcgaacagttcagcatcgtcgagcgcgaagggctgatcatcgcctgcgccgcgctctacccgatcgccgattccgaggcgggcgagctggcctgtctggcggtcaacccggagtaccgccacggcgggcgtggcgacgaactgctggagcggatcgaggagcgcgcgcgcggactcggcctgaagaccctgttcgtgctcaccacgcggaccgcgcactggttccgcgagcgcggcttccagcccagcagcgtcgaacggctaccggcggcgcgggcctcgctgtacaacttccagcgcaattcgcaggtattcgagaagagcctttga

SEQ ID NO: 324879 - DNA, 702 bp, Pseudomonas aeruginosa
atgagcgaatacttccatcacgtcctggtcggcctgctcgccgtgctcccggtagccaacccgctgaccagcgtctcactgctgctcggcctcggcggcagcctgccgccggcggagcgcaaccggcagatattcaaggccagcctctacgtggcgctgatcatgctggtcagcttctacggcggcagcctggtgatgcaggtgttcggcatctccattccaggcctgcgcatcgccggcgggctgatcgtcgcctatatcggcttcaccatgctgttccccgccaccacgccggacgagaccgaagtccagcacgacctgctgtcggacgaggaaaagaacaccccgcacttccgcgacctgtccttcgttccgctggccctgccgggtaccgcggggccggggaccatcgccctggtggtcagctcggcgtcgacgctgcaatccacctacggaagcattccgctgttcatccacctcgcggcgatcaccgtcaccctgctcaccgcgctgatcttctggatcgccctgcaaagctccgggcgcatcatgaagttcctcggcgaatccgggatcgacgccatctcgcgagtggtcggcttcctgctggtggcgatgggcgtgcagttcgtcatcaacggcggcttcgagctggtcgccggccacgccgcgcttcagtcggcggcgggcgtcaggcagtaa

SEQ ID NO: 324880 - DNA, 1155 bp, Pseudomonas aeruginosa
atgccgttgccgtctctgaaagaccagttcggcgcgctgatcgccgcgtcttccgtcagttgcacccagcccgagctggaccagaccaaccgcccggtggtcgacctgctggcctcctggctgggcgatctaggcttccgctgcgagatccgggaagtctcgccgggcaagttcaacctgctggccagctacggcagcggtcccggcgggctggtgctggccggccacaccgataccgtgccctacgacgaagcgctgtggagcagcgatccgctgcgcctggacgagcgcgacggccgctggtacggcctcggcagttgcgacatgaagggcttcttcccgctggccatcgaggccttgctgccgctgctcgaccagccgttccgccagccgctgatgatcctcgccacctgcgacgaggaaagctcgatggccggcgcccgtgccctcgccgaaagcgggcgaccgctgggtcgcgccacggtgatcggcgagccgaccaacctgcggccgatccgcctgcacaagggggtgatgatggagcgcatcgagattctcgggcagagcggccattcgtccgatccgaacctcggccgtagcgccctggaggccatgcacgcgaccatcggcgagctgatggcgctgcgcggggaatggcagcgggcctggaacaacccgcagttcagcgtgccccagccgaccctgaacttcggttgcatccacggtggcgacaatcccaaccgcatctgcggccagtgttcgctggaattcgacctgcgcccgctacccggcatgcagcctgagcagttgcgcgaggcgatccgccagcgcctgcggccgctggccgaacggcaccaggtgagcatcgactaccagccgctgttccctgccgtgccgccgttcgaacaggcgcaggacagcgaactggtacgcgtcgccgaacgcctgaccgggcatcgcgccgaggccgtggcgttcggtaccgaggcgccgtacttccagcgcctgggcagcgagaccctggtcctcggcgccggcgacatcgcctgtgcccaccagcccgacgagcacctcgaactggcgcgtatcgaaccgatggtcggcgtgctgcgccggctgatccagcattactgcctgacgcccgccgccgactga

SEQ ID NO: 324881 - DNA, 945 bp, Pseudomonas aeruginosa
atggcgcggatcctgacgattaccctgaaccctgcgctggacctcaccgtgcgcctgcgccagctggaactgggggcggttaaccgcagcgaggcggtgctgacccaggccgccggcaagggtctgaacgtcgcccaggtgcttgccgacctcggccatcggttgacggtcagcggcttcctcggcgaagacaaccagccgccgttcaccgccatgttccagcgtcgtggcttcgccgatgcgttcgtgcgggtgccgggcgaaacccgcagcaacatcaagctggccgagcgcggcgggcgcgtcagcgacctcaacgggccgggcccggaggccgacgagcgagcccaggcggcgttgctcgaacgcctcgaccggcttgccggggagcacgagctggcggtggtcgccggcagcctgccgcgcggggtcgagccggaatggctgggagaactgctgcggcgcttgcggcgcctcggcctgaaggtcgccttcgacagcagtggcgcggccctgcgcgaaggtgtgaaggctgcgccgtggatgatcaagccgaacgtcgaggaactggccgatctctgctcggcgccgatggatgacctggtcgcacagcgccaggcggccgaacgtctgcgccaggacggggtaggccaggtggtgatttcccagggcgccgcgggggtcaactggttcgccgccgagggtgcctggcaggcgcggccgccggcggtggaagtggccagcacggtgggcgccggcgattccctgctggccggcatgctgcacgggctggccagcggctggccggccgagcgggtgctgcgtcaggccaccgccatcgccagcctggcggtaacccagttcgagttcggcatcggcgatccgcagcgcctggcgcggatcgaagcgggcgtcgtggtacagccattggtcgaggaggcctga

SEQ ID NO: 324882 - DNA, 303 bp, Pseudomonas aeruginosa
atggacgaggaactgaaccgggcggcgagcctggccatcgagctggcggacgtggacagcgccgcgcgcttgcacgaacgcctgcgcgaggccctggcgttgccgccgtggtacggatgcaactgggatgccttctgggacgccatcagcggcctggtgccgatgctccggcgattgcgtctgcaaggctggagcgacttcgcccggcgcctgccggaggaagcggcgcagctttcggcctgcctggaggcgttgcgcgagacgtacccgcaactggcgccggaagtcctgcgcgacgcttga

SEQ ID NO: 324883 - DNA, 1887 bp, Pseudomonas aeruginosa
atgacgtacctgcagcagcacgcccgctcgatcgccgagccggccgcgttctgggccgaacaggcccgttccctggcctggtaccaggcgcccgcgaacatcctcgaaagcctgcccgacggcacccatcgctggttcgccgatggccgtctgaacagcgcctacctggccctcgaccggcagatcgaggaggggcgcggcgaacagaccgcgctgatctacgactcgccggtgaccggcacccaggaccgctacagctacctgcggctgcgtgacgaagtggcgcgcctggccggcgccctgcgggccctcggggtcggcaagggtgaccgggtgatcatctacatgccgatggtgccgcaggcggccatggcgatgctcgcctgcgcgcgcctgggcgcggtgcattcggtggtgttcggtggcttcgctccctacgagctggccctgcgcatcgacgacgccacgccgaagctggtgctcaccgcttcctgcgggctggagttcgatcgggtgatcgaatacaagccgctggtggacaaggccctcgaactggcgatccaccagcctgcccacgtcatggtctggcaacgcccgcaggcgcccgcgcgcctgcacccgggccgcgacctggactggcaggactgcctcgccgccgccgagccggccgatccgctgccggtggccagcggcgatccgctgtacatcatgtacacctcgggcaccaccggtaagcccaagggtatcgtccgcgacaacggtggccacgcggtcgcggtgcgctacgcggtccgcactatctacggcatgcaggccggcgacgtctggtgggggatctccgacgtcggctgggtggtcggccactcgctgatcgtctacggcccgctgatgtgcggctgtaccacggtgttctacgaaggcaagccggtgcgcacgccggacgccggcgcctactggcgggtgatcgaagagcacagggtgaacagcctgttctgcgcgccgacggcgatccgcgcgatccgcaaggaagacccgcatggcgaacgggtgaagcgctacgacctgggttcgctgcgccacctgttcctggccggcgagaagctcgacagcagcacccagcactggctggaggagcacaccgggcggccggtccacgaccattggtggcagaccgagaccggctggccggtgaccgcgccctgcatcgggatcgccggccacgacctgcgggccggctcgaccaaccgcgcggtgcccggctaccacgtgcaggtgctggacgacgaaggccggccgctgggagcgaaccgccagggcgcgatcgtcatcgccctgccgttgccgccgggctgcgcgcagaccctctggggcgaccacccgcgctacctgcaggcctacctgggcaactatcccggctactaccacaccggcgacggcggttatctcgacgaggacggcttcgtctacatcatggggcgcaccgacgacgtgataaacgtttccgggcatcgcctctccaccggcgagatggaggaacgcgtggcgcagcaccaggcggttgccgagtgcgcggtgatcggcgtgcgggacgaactcaagggccacgtgccgctgggcctggtggtgctcaaggacgatgccgggatcgccgccgagcaactgcagcgcgagctggtggcgctggtccgcgaacagatcggcgcgctggcctgcttccagcgggtggtggtggtcaagcggctgccgaagacccgctccgggaagatcctccgcgcggtgctgcgcaagatcgccgatggcgaggactacgcggcgccatcgaccatcgacgacccgacgatccttggcgagatcgaggctgcgctgagggtgcgcaaggcgggatag

SEQ ID NO: 324884 - DNA, 213 bp, Pseudomonas aeruginosa
gtgaaaaagcgttttaccgaagagcagattctcgacttcctcaagcaggcggaggccggtgtgccggtgaaggaactgtgtcgccgacacggcttcagtgatgcctcgttctacacctggcgggccaagtttggcggtatgaccgtggcggacgccaaacggttgaaggatgacgatgacggcgctgctgcagcaagcgccgtcctgcattga

SEQ ID NO: 324885 - DNA, 1080 bp, Pseudomonas aeruginosa
atgccaaagctgatagttgccatctggtcggtcaatacgaaaaatcatgcggctacgccagacgcaaggtttgcaagcctgactgttgcaatacagagtgcctggactacgatgatgacccttgcggatggggaaacggtatcttatctaggggctcagccacacgcgataacaccacaaagcgtcagcgttcatacagcaagaaataaaagcgtcaattacctgttcattgcccctgaatacctgtttacagcaaacaaggacatccctagccatttcatgacggaaacgcaatttgaactaatcagggcgcagcttgtattcctcagtcttcgctttccaaacctgataataattccaggtagtgctggatggttcaaaacgaggatgcgctcagccgtgaagatattccgtaagtcacttgcacagccgcaacgtgagcgcggcccggaagcgtcccgcgacatgaataaatacctggagcgataccagcgctcgatcgatacgccgctcgactaccgcggggtcgtacccgacctgcatttatcttcctacacaaatcaatataaggatcttaaatatggacagacatacgatctcgagcaggcttcaccaaagagcggccagcatgcggcaggattgaaaatagccaagaacacatgtttggtgctcaagagcgcgacgatcattcatcgttacgacaaaatcttcgaggctcaggatagtaccgataccgatatgtcgaaagccgataggcaggagccttttctattcatgccaggcgaagccagcccgattttcgagtccgctggaataaaatacggcgtcgaattgtgtgtagatcataattttgctgccttgcaggtgtggtgcaagaaaatatgccaccctccttcgccggtagatattcaaatcctcatgtctgcaagcacagggctcgagagttcaaatatcgcggccacgcaattcgttctccatgcagattgccatggtgccagcgtcataaaggcaaacggggaagacgtctcgcctgcacgatctgccgcagaggatctccccgtctatgtcctggagtggtag

SEQ ID NO: 324886 - DNA, 780 bp, Pseudomonas aeruginosa
gtgaagaagattttcgtattcgccgcgcttgccggcagtgccctgctcgcgggctgtgccagcccgcagcacggggcaatcccggtggtggattccggcactccggtttccaaccaggaaagcggcggtttccgcatcacccgtacccaggtaccgcgtacccagcaaggcgccgccacccagggcattccccagggcggcgactccggcgtggtggtgatggtgccgcagggcgccaattccgcaccgatccagactttcccggcgcagtccggcgccgcgccgatcagcagcgctccgctcggcaccggcacccagtaccaggctccgcccagcagcgcctccactccaccgctgggcggcagctacaacatgccgcccagcggcgccagtcgttccgcgcccaccggcattccggcctccggctcggccggcagcctggcggccgacgagcagttggacgggccggtcctggcgatgctcacaaccgcccagcaacagcagggtagcggcgacctgaacagtgccgccgccagcctcgagcgagcccagcgcatcgctccgcgcgagcctcaggtgctctatcgcctggcccaggtgcgcctggcccagggcgatgcggctcaggccgagcaggtcgcgcgccgtggcttgagctacgccaatggccggccggccttgcaggccgggctctgggaactgatcgcccaggcgcgggagaagcagggagactccgccggcgctgcgctggcccggcagaaggcaaaggtcagctcctga

SEQ ID NO: 324887 - DNA, 801 bp, Pseudomonas aeruginosa; identical to SEQ ID NO: 320635

SEQ ID NO: 324888 - DNA, 852 bp, Pseudomonas aeruginosa; identical to SEQ ID NO: 320634

SEQ ID NO: 324889 - DNA, 876 bp, Pseudomonas aeruginosa
gtgtcgatcactaagagcggatctttcagcggagtgaagcccaatgagcgtgacagcgttccattccactggaagcgcacgcagttggtcccggacatttcgtggaagtatcaccacatcatcccctggcagacactgcgcgatacttggcaagccttgctgatgtgcgactactggaaagggtgcgtgctctacgtaaaagtcatcggagtggtttcgtgggggcccttgatttccaggctgatgaatgcccagatgacccaagaggactgcgatgagctttacgccaaactctcctggcctgcctggaacattgtcgaagggcccgccgacagggacgatgagggtggcaccgacctagatcttttcaggcacggccttcaggggacagagccggcaagaatgcaggcgttgcagcggctgtatgacgccatggaagactttctctcactattcaaccggagagaatttgaggctacacggctgacagtctacaacccccgagggggagcaccagcagtcgacgaagctcgccgcgaggccctacacaccgcgctacaaggcatgctgccgtacaaggatcaggccttcattccctatcggccagagatgtggatcgtgactttggaagggcgcgagcatcgcaagtatccaacttggctgcggacgcccagatacaaaaaagccgacggctccccacctaaagcagcaccgcacgctgtcgagcaaactggcctgacgcaatgccccaaatgcggcaataaattccgtacaaatactgctgtccagatattcgccgagcaccgctcctgccccaggtgtggcactgcggtgtatgtggcgaaacatgcctttaaggaccctaccttcccctga

SEQ ID NO: 324890 - DNA, 786 bp, Pseudomonas aeruginosa
atgccctccatcagaatcctgacctggaatagtactggcgaaagctttccgaaggcggcaagtctggctgccgaggctgccacccatgccgctcacgccacacacccggtgatcgatatttacctcattcaggaggctcaacaaggtgcaggaggcgccatcagtaactatctgactggcctcgctggctacaccgtgcatcacatccatgaaaatcttggaggtgggggcaagggttatatctgtgctacgcgcaatgcgagtgtgactgtgtccactccccttgcactctggaactatgcagccgatccgggattcatggcctgggcaggccatactgccttacaggcatccagttggacgccacctgccagaacacccgcctatagccttctgcaggtcggcggcagcaacatcctgctaatcacctggcatgccccccttggcgtgtccttgctaccgatcatcgtgggctcgatgagcggtggagccttgatcgacgcttatctggcgctggatcaaagcggactgctcaacaacccgatgctcgcgatcggcgtcgtcccggacttcatcgtcatcgcaggcgacatgaacgccaagccggcagcactgggcaagagctatgccggctataccccactggacaacttcaccggggttgccaataacctcgaccacattatggcgacatcgccgccacataccgcattcaacttttccgaggactacagcaccgccactgctagtacccacgacattctctgcgcccgaatgaactggtga

SEQ ID NO: 324891 - DNA, 921 bp, Pseudomonas aeruginosa
atgctcaatcccgacgatttccgttttccttccatcgaagcgttgcaggcgttcgaagcggctgcccggctgggtaccttcgagcgcgccgccgaactcctgtcgatcaccggcagcgccgccagcaagcgggtttccggtctcgaggggatgctcggggtgagcctgttgcagcgcgacggccgctcgctggcgctgacctcccacggccgcgagtacctcgaacagatcgcgccgatcctcgcccagctcgcggcggttccgctgcatcgtcgccaggtccagcgccagcagcggctgaccctgcgcacgccgccgaccttcgcccggcagatcctgattccgcgcctggcgtccttcgccgaggcctgtccggaaatcgagctggagattctcctgtcgagtccttcggacggccaggacctgccgctggccgatgtcgaggtgcgcggcgacagccatggcgtggcggccggcgagcggctgctggaggagcgcgtgctaccgatggccgcgccggggctgctgctcggcctgccgcggccctggacgccagccatgctcgccggcctgccgttgctgcgctcgccgctggagccctggcagccgtggttccgcgtggccgggctggactggccggagccctgcgccgggccgcgcctgctcgatttgggcatgaccctggaagccgccgccaacggccagggcgtggccctcgcgcgaccctcgctggcgcgcgcctggcttgccgaggggcggctggtggtgctgttcccgctgcgttcggcgcccacccaccattaccacctgcgcagccaccaggcctcgccggccagtcagcgtttcgccgcctggctggcggcgatctgccgcgaggcggtggcccagggcagggaattccttccggcggcggacgactga

SEQ ID NO: 324892 - DNA, 1332 bp, Pseudomonas aeruginosa
atgactcaggcaactgcaaccgccgtggttcacgatctcatcggtgtcggcttcggcccttccaatatcgccctggcgattgccctccaggaacgggcccaggcgcagggcgccctggaagtgctgttcctggacaagcagggcgactaccgctggcacggcaacaccctggtgtcgcagagcgagttgcagatctccttcctcaaggacctggtgtccctgcgcaaccccaccagcccgtattccttcgtcaactacctgcacaagcacgatcgcctggtcgacttcatcaacctgggcaccttctatccctgccggatggagttcaacgactacctgcgctgggtcgccagccacttccaggagcagagccgctacggcgaagaggtcctgcgcatcgagccgatgctgagcgccggccaggtcgaggcgctgcgggtgatctcgcgcaacgccgacggcgaggaactggtgcgcaccacccgcgccctggtggtcagtcccggcggcaccccgcgtatcccgcaggtgttccgtgcgctcaagggcgacggccgggtgttccaccacagccagtacctggagcacatggccaagcagccctgcagcagcggaaagccgatgaagatcgccatcatcggcggcgggcagagcgcggcggaggccttcatcgacctcaacgacagctacccgtcggtgcaggccgacatgatcctgcgtgcctcggcgctcaagccggcggacgatagcccgttcgtcaacgaagtgttcgcgccgaagttcaccgatctcatctacagccgcgagcatgccgaacgcgagcgtttgctgcgcgaataccacaacaccaactattcggtggtggataccgacctgatcgagcgcatctacggcgtcttctaccgccagaaagtctccggcatcccgcgccacgccttccgttgcatgactactgtggagcgcgcgaccgccaccgcccagggcatcgagctggcgttgcgcgacgccggtagcggcgagctaagcgtagagatctacgacgcagtgatcctggccaccggctatgagcgccagttgcaccgccaactgctcgaaccgctggcggagtacctcggcgaccatgagatcggccgcgactaccgcctgcagaccgacgagcgctgcaaggtggcgatctacgcgcagggcttcagccaggccagccatggcctcagcgacaccctgctgtcggtgctgccggtacgtgccgaggaaatctccggctccctgtaccagcacctgaagcccggcgctccggcccgcgccctgcacgagcacgccctggccagctga

SEQ ID NO: 324893 - DNA, 213 bp, Pseudomonas aeruginosa
ttgctggccacccaggtcattggccgcctacgcgaacgactgcacctggaggtgccgatcaagtcgatgttcaccgcggagacactgggtgagttctgccacggcgtcgagaccctcaaggccgagagcgcgccggtggaagatgccctggctaaatccctggaggcgctcaaacgtctatctgccgatgaacttgaaaaactgatttcctaa

SEQ ID NO: 324894 - DNA, 2415 bp, Pseudomonas aeruginosa
atgcccgtacgcacgcttcgtccccgttcgctgtccctggccatccacgccgccgccatgaccctcgccctcgccggcgcggcccccgccctgcttgccgccgaggcgcccgccgccagctcggcgcgcagctatgacatcgcccccggcccgctcggccgtaccctgtcggccttcgccagcgacaacggggtatccctggcgttcgacccggcgctcaccgagggtcgccgcagcgccgccctgcgcggccgctacgcgccggtcgaggcgctgcaccgcctgctgctgggcagcggcctggagttgcagcagcgcagcgatggcagctacaccctggtgccggcagccaccgatggcgcgctggaactgcaatcctcgctgatcaccgcccaggccgccggtgccgagactctgcccgccgagtacgccggcggccaggtggcccgtggcgcgcgcctgggcatgctgggcaacgccgacgtgatggatgcgccattcagcatcaccagctacaccgccaggaccatcgagcagcagcaggcgcgcagcgtcgccgacctgctacaggccaacgatccgtcggtgcgggtggtcggcgggcgcggcgacctggtggacagctacacgattcgcggcttcagcgtgcagaacgccgacgtcgccttcaacggcctctatggcctgctgccgttctggcgggtaccgatcgaattcgccgagcgcgtggaagtgctcaagggaccgaacgccctgctcggcgggatttcccccggcggcagcgtcggcggcaccatcaacctggtgcccaagcgcgccgacgaccagccgctgacccgcgtcagcgtcgactggacccagcgcggccagctcggcactcacctcgacatcggccggcgcttcggcgagaacaacgccttcggcgtgcgcttcaacggcgtctaccgcaacggcgataccgccgtcgaccatcagagccgcgagtttcccatgctctccctgggcctggacttccgtggcgagcgcctgcgcctgtccagcgacctgctgtaccagaaggaaagcctggaaggcgtggtgcgcccgctgctgaccggcccgggaaccacccacatcccccacgccccggactcgaagacacgcttcggcctgcgcgattcctacctggaccaggaggattactccatggtcaaccgcggcgagtacgacctcgccgacaacctgacggcgttcgccagcatcggcggccgccagagcaactacgaaaccatcgccgccaacagcatcctcgtcggcaaccagggcgatatcgtcaacagcctggcacgccagcgcggcgaccgccgcacctattccgccgaggtcggcctgcgcggcaacttcgacaccggcccgctccgccacgactggacgctcagcgccaaccgcctgcacgaacggctgggcatggtctatgccttcaccgggatgcagccggccaacctctaccagacctcgccgcatacgccgctgccggacttctccagcctcgacgggagcattccgaagaccaatgaaaccgacctcggcggcgtggcgctggccgacaggctgtcgttcctcgaggatcgcgtgcaggtcaccctgggcgtgcgccgccagcagatcgagtcgcgcaactacgaccagaccagcggcgcgcgcaccagccacgacaagcggcacgtgtggacgccgatggccagcgtgctggtcaagccgctgcaggacctgtcgctgtacgccaactacatccagggcctcagccagggcgaggcggcgccgatgaccgcggccaacgccggccaggtgctggcaccatacaaggccgagcaatacgagatcggcgccaagtacgacctgggcggcttcaccaccaccctggcgctgttcgagatcaggaaaccgaacgcctataccgacgccagcaacgtcttccgcgccgacggcgagcaacgcaaccgcggcgtggagctgagcctctatggcgaaccgctggacggcgtgcgggtgatggccggcgccacctacatcaagcccgagcagaacaagaccggcgaccctgccagcgaaggcaaggacgcgcccggcgtggcccgtcgccaggccaacctgggggtcagctgggacaccccgttcgtcgacggactgaccctcgacagccgctggatctacaccggctcggcctatgtggacagcgccaacgccctctccgtgccgcactggaaccgcgtcgacctcggcgccgcctacgccttccaggtcgccggcaagccgctggtggcgcgcgccaacctggagaacgcgctgggcaaggactactggaccgcagccaacggctacctgtcgatcagctcgccgcgcaccctttccctttccctcacggcggacttctga

SEQ ID NO: 324895 - DNA, 1548 bp, Pseudomonas aeruginosa
atgccgcagagcatccgccacctgatcgccctccccgaactccgttcgcgcctgctgagcggagccggcggcctcgaccgcccggttcgctgggcgcatgtctgcgaactcgacgaccccaccgaatggctcggcgagggtgacctgctgatgaccaccgggctgggcataccgagcgaggccgagcggcaacggcgttacgtccgaagactggccgaggccggcctggcaggcatgatgatcggcgagaacatggaagccccgagcgacctcgatgccctgcgcgagacggccgaggccctgggcttcccgttgattctcacccactacggcgtccctttcgccgccgtgacccgggccatcgtcgatgcgggacagaaagacgaatacgagcgccgcaacgccctggcccggatatacgaaagcgcccggttgagcatgcagggactgggcctgccggcgctgctgcaacgcctcggcaaggacgtgcgaagcagcctctacctcatcgttcccgacaccctggcggcctggcagccaggcctgccagggctgcccgcggagttggccgacgcgctgcgcaaccgccgtcgcgagcaggcggagccgcagccgatggtccttcgccatccgctcgcggaaggcgaagcgctcagcatcggcattccttccgaccggaactgcctgctgatagccctgggcgagcggctgccggactacagtctcctgcaccacctgacggcagtgctcggcatagagatcgaacggctgcgcgtcgaaagcgaacgccacctgcgcctgggttcggaattgctcgacgacctgctgcaacgacggctataccgggaacaagccgaggagcggctggaggaactgctgcccgggctcgatctcgacgatgcagtcgtttccgtggcaagttccgaggggctcgcgaccgaccctatcggtcttttccggggccacgactcacgcctgctggttcgcgcgcaaggccaggaaatcattctgctgcaccaggccggcctcgcctcgacactgcaggaagccctggacagctcgctgggcgtgagcgctccgctccgtcgtgccgaacgttgcgccgaggccttgcgcgaagcgcgcctggccctggcccacagccattcccggcggccgttgtgtcgctacgcggaactggacgacgaggcgccctggctacccagaagcctcgccgaggctgagcgggcgttccgcctggtcctcggcgccctccacgactatgacgcggccaatggctctgcactgctatacacgctgcaggtctttctcgaggaaaacaggtcctggttgaacgccgcgcagcggctacacatacacaagcagagcctggtctaccggatacgccgcatcgaggaaatcagcggtcgctcgctggacagcaccgccgatgtggcgaccctctggttcgccttgcaggcaacccggctgtcgccggaagcgaggggcaggacggcgaagggcagcctcctggagcagtccgcgcaccatggcggcgacatggactga

SEQ ID NO: 324896 - DNA, 990 bp, Pseudomonas aeruginosa
atgacgcccttcgcctatgccaagccggccgacatcgagcaggcgctgggcctcgccggtccggagtcgcgctacatcgccggtggcaccaacctgctcgacctgatgaaggaaaacgttgccaggccccggcgactcatcgacatcaccggcctcccgctgcgcgacatccgccggacgcccaccggcggcctgctggtcggagccctggtcagcaacgccgaactggcctggaatcccgccgtggaggcggactatcccttgctagcccaggcgatcctcgccggcgcctcgccgcagttgcgcaacatggccagcaccggcggcaacctgttgcagcgtacccgctgccagtatttctacgacaccggcacgccatgcaacaagcgcgagccgggcagcggatgccccgcgcgcagcgggctgaaccgcaaccatgcgatcctcggcgccagcgaacactgcgtggcggtacatccatccgacctgtgcgtggcgctggcggcgctggaggctcatgtacgggtgcgcggccgcgctggcgagcggcgggtcgctttcgccgacttccatcgcctgccggcggacacgcccgagcgcgacaactgcctggccgtcgacgaactggtcaccgccatcgagctgccagcgccgcgcttcgcccggcattgccactacctgaaggtgcgcgaccgggcctcctacgccttcgccctggtctcggtggcggcggccctggaaccggacggcgagcgcattggcgaactgcgcctggcgctcggcggcgtggcccacaagccatggcgcgtcgcagagctggaggaacgtttcaggggccacccggcgaaccgggacagctatgtccgcttcgccgaagcgctgctgcgtgacgccaggccgctggcctacaacgccttcaagatcggattggcgcgcaacgccatcgttcgcgcactggaagaagcccactcgggagggatcggccaatga

SEQ ID NO: 324897 - DNA, 666 bp, Pseudomonas aeruginosa
atgcgcagttatctctcaataagccatatttctgctgcaactttatttgcacaaaaatgctccaagattgaagaaagtgtggacccgctaaaaattgaagcaagcgttcgcagcagccacaacgcatacgtcatatcaagcataattctctcagttgcgtttttagaggccgtcataaatgaaatattttccgattgtgcggatgatcatgtgacagagcgcattaaagagctgcctgcaaaagaccttatggcgcgactttggaagcttgggataccaagaaccgccgcataccctatcttggaaaaatatgaaattgcgcttgagctgaataataagcaaccaatagatcaaggtcttaatccatatcaaaacgcaaaaatcctcattgagctaagaaatgcattaattcactttgagccagaaactataatcagccaatcagctagtgagggacgaagaattcataaatttgaaaagcgcctcactggaaaatttgaagtaaataaactaactggcataggcaatccattctaccccgacaaggttctaggggcgggctgtgccaattgggccgtttcaagtgctgtaagtttcgcagatgtattttttaataacataggaatcactccaacgtatgaacacgttcgcggtgagtttctgtaa

SEQ ID NO: 324898 - DNA, 156 bp, Pseudomonas aeruginosa
atgtatccaagcttccagagccacccgcgcttgctctgtaatctcgaactgcactggacgctgggttttctgctgcatcacgatcgctcgcgaagatacgtgttccccatgggcaacatcgcggacgcgaagcgtggtcaaatcgcaggctcgtag

SEQ ID NO: 324899 - DNA, 603 bp, Pseudomonas aeruginosa
atggaggatgaggcatttagtatctggacgccgcaccaggcgttctacattcagtcgatgctcttcaatacggcctctgccttccagtcgtgcaacattgcagaaaagatcatccagaagatctcagatgggaagattgatccgcaagagaagaaggacatactactggactgcttgcagaacgtcgtcaaccagtctggagctatatcgcgatacttcttcccgtcgcgtgatggtgtgaaaggaacggacaagaagaccattcacagggatcgcggacagtatctatcaaaggtctttggtgtaaaggacgacagccccctgatgaatagggcgttaagaaattcgattgaacactttgacgagcggcttgatctttatcttcaagacgggatagtcggatacatctttcctagcctcattcttcctgagcctgaagactcggatgtgcctcatcacattttcagggcttactacttgaaggaaggcatttttcaagtgctaggtgaacgatacgagatccagccaattgttgatgagatggccaggattcatgatctcttagtcaagtttgacggcaatggcggtgtcttccgctcgtaa

SEQ ID NO: 324900 - DNA, 780 bp, Pseudomonas aeruginosa
atgaaacagaagcgaatcctggtgaccggggccggcagcggcttcggtcgggaagtggcgttgcgcctggccgcccgcggccatcggacgatcgccggcgtgcgcggcgccgggcaggccgccgacctgcgcgaagaggccgggcggcgtggcgtcccgctgcgggtggaaaccctcgacatcaccgtcgccgccgatcgcgaacgcgcctgggaatgggatatcgacgtgctgctgaacaacgccggcagcgccgaggccggggcaagcgcggagatcccgctggaactggtgcgcgcgctgttcgagaccaacgtgttcgccaacctggaactgacccagggtttcgtccggcgcatggtcgagcagaagcgtggcggcaaggtgctcttcgtgtcgtccatcgccggcctgatcaccggaccctataccggcccctactgcgcctccaagcatgccctggaggccttcgccgaggccctgcatgccgaactgaagccgttcggcatccaggttggcaccatcaatcccggcccgtaccagaccggcttcaacgatcgcatgatggaaacctggaaacgctggtacgacccgcagcgccacttcaccgaccacagcggcgtgcgctttcccttcgagcagtacgatccggaggaaatgatcgcgcggatggtcgagctggccgaggctgacgaaggcccgttccgcaccctgttgccgcaagctttcgtcgaggtggtgaaggacgagcaggcgcaggcctggcagcgccgcctgtag

SEQ ID NO: 324901 - DNA, 1548 bp, Pseudomonas aeruginosa
atggaatggatagctgacccgactgcctggctcggcctggcgaccctgatcgtgctggagatcgtcctcggcatcgacaacctggtgttcatcgcgatcctcgccgacaagctgccgccgcacctgcgcgaccgcgccagggtcctcggcctgtcgctggcgctgctgatgcgcctgggcctgctggcgagcatctcgtggatggtgaccctcaccgagccgctgttcgaggtattcggcaagagcttctccggccgcgacctgatcatgctgttcggtggcgtgttcctgctgttcaaggccaccatggagctgcacgaacgcctcgaaggccatgtcgcccagcacgccggcaacaagacctacgcgctgttctggccgatcgtcgcgcagatcgtggtgctcgacgcggtgttctcgctcgacgcggtgatcaccgcggtgggcatggtcgagcacctggaagtgatgatgatcgcggtgatcgtctccatcggcctgatgatcgtcgccagcaagccgctgacccgcttcgtcaatcgtcacccgacggtgatcatgctgtgcctgggcttcctgatgatgatcggcttcagcctgaccgccgagggcctgggcttccatatcccgaaaggctacctgtacgcggccatcggcttctcgatcctcatcgaggtgttcaaccaggtcgcccgcaagcgccgcaagaagagcctgcagggccaccgcccgctgcgcgcgcgtaccgcccatgcggtgctgcgcctgctcggcggccagcgcctggaggccgacgaggtcggcgaggaagtcgccgacctgttcgaggagggcgacgaccaggtggtcttcgaccgccgcgagcgggtgatgatcagcggcgtgctgcaattggccgagaagcccatccgcagcctgatgacggtacgcgccgaggtcgactgcatcgacctcgacagcggccgcgaggcgatccgcgcggcgctgctcgaatcgtcctactcgcgcctgccgctggtgcgcgacgggcgcgtcgaggagccgctgggctacgtgcacaagaaggaactgctcaaggagctgctcgccggcgcccagccggacctggaaagcctggcccgccagccgctcaacctgttgcaggactgctcgatcctcaacgccctggagcagatgcgcgaggcctcgacccacgtggccttcgtggtcaacgagttcggcgagttcatcggcctgctgaccctgaccgacattctcgaatccatcgccggcgagctgcccgacgccagtgagatcgacggtccggacgtggtcgaggagaacgacggctatctggtcagcggtgccatgaacctcagccaggtgcgtcgacgcgtggggttcgacgcgcgcgccacggaggactaccagaccctcgccgggctggtgatgagcctgctcgaccgcctgccggtgatcggcgaccgcctgcagtggcaggactgggaactgcgggtggtggaagtggaagaacgccgggtgacccgggtcctgctgcgcaggggctga

SEQ ID NO: 324902 - DNA, 1113 bp, Pseudomonas aeruginosa
atgctgttcagcccctatgcccttggccacctgaccctccccaatcgcatcgtcatgccgccgatgacccgttcccgcgccgccagtggcgaagtcgccaccgcgctgatggccgagtactacagccagcgcgccggcgccggcctgattgtttccgaaggcacccagatcagccggcagggccagggctacgcctggacaccgggcatccacagcgccgagcaggtcgccggctggcgccaggtcaccgacgcggtgcacgccgccggcgggcgcatcttcgcccagctctggcacgtcggcagggtctcgcacacctcgctgcaaccgggcaacgccgccccggtgtcctcctcggcgctggtggccgaaggcgtgaaggtcttcgtcgatccccagggccgcggagcgcaggccggcggcggcgagatggtccagcactcggcgccgcgcgcactggccgtggaggaaatccgggagatcgtcgccgactatgcccaggccgcacgcaacgccctcgacgccggcttcgacggggtcgaactgcacggcgccaacggctacctgatcaaccagttcatcgactcccaggccaatgcgcgcaacgaccaatacggcggctcgctggagaaccgcctgcgcttcctccgcgaagtcgccgaggcggtcaccgcggtggtcggcagggagcgcatcggcgtgcgcctggcgccgctgaccaccctgcagggcgcggtcgacgacaccccgcaagccacctacctggccgcggcgcggctactggacgagatccgcgtggcctacatccacatcgccgaggccgactgggaagacgccccggccatgccggcggcgttcaaggaagcgttgcgcatcgtctaccgtggcagcctgatctactccggcatgtacaccaaggcgcgcgccgaggaagccctggccaggggctgggccgacctgatcggcttcggccggccgttcatcgccaaccccgacctgccctaccgcctggagcacgacctggcgctggccgacggcgaccgctcgacctacttcggtggcggcgccgccggctacaccgactacccgagcctgccgcaggcggccggttga

SEQ ID NO: 324903 - DNA, 225 bp, Pseudomonas aeruginosa
atgcttcatccgacatttctcacccgcctgcgattccgctcggcggataacgccgggggcgttattcgccctacccgcctgacgcagcgcgtcataggccattcctcctccctcggtgcgccctacccgccggtgtggggaacgcgctatccgggcattcatgaattgaactcaagtgtcattttccccggcagcggtttttcgcacgaatcgttccgccaataa

SEQ ID NO: 324904 - DNA, 1326 bp, Pseudomonas aeruginosa
atgaacgagccgctttccgtcctgatcgtcgaagacgatccgcatgtcttgctcggctgccagcaggcgctggagctggaggacatcccctgcatcggcgtcggcagcgccgaggaggcgctgcaacgggtcgaccgcgacttcgccggcatcgtcgtcagcgacatccgcctgcccggcatcgacggcctgaccctgctggagcgtctcaaggccctcgacccgagcctgccggtggtgctgatcaccggtcacggcgacatctccatggcggtacaggcgatgcacgccggcgcctacgacttcatggagaagcccttctctccggaacgcctggtcgaggtcgcccgccgcgccctggagcagcgcgggctggcccgcgaggtcagcgcgctgcgtcgccagttggccggccgccaggacctggcgcaacggatcatcggccgctcgccggcgatccaggcgttgcgcgagctgatcgccaacgtcggcgacacctcggccaacgtgctgatcctcggcgagaccggcaccggcaaggagctggtggcgcgttgcctccacgactatagccggcgccaccagcatgccttcgtcgcgctgaactgcggcggcctgccggagaacctgttcgacagcgagatattcggccacgaggcgcacgccttcaccggtgccaacaagcggcggatcggcaagatcgagcatgccaacggcggcacgctgttcctcgacgagatcgagagcatgccggtcaacctgcagatcaagctgctgcgggtgttgcaggaacacaccctggaacgcctcggctcgaaccagtcgatcccggtggactgccgggtgatcgcggcgaccaaggcagacctcgccgccatgggcaagagcggccagttccgcagcgacctctactaccggctcaacgtggtgagcctggaactgccggcgctgcgcgaccgccgcgaggacatcctgctgctcttcgaacacttcctccagcagtcctcgctgcgcttcgaccgccccgcgccggaactcgaccgtgccaccgtggccagcctgatggcccacgactggccgggcaacgtacgcgaactgcgcaacgtcgccgaacgcttcgccctcggcctgccggtgttcaacaagggcggccaggccgtacagaccggcggcccgcgcttcgccgaagcggtggaggcattcgagaaggccctgctcggcgacgccctggcccgccaccacggcaacctgacccaggccagccaggacctgggcatggccaagaccacactgttcgacaaggtgaagaagtacggcctgcaatag

SEQ ID NO: 324905 - DNA, 1089 bp, Pseudomonas aeruginosa
atgaagccattgctccacgcgttcgcccccggtgttatggccctgatgctcctgctgccgcaggccgcccaggccaaggaagtcgcaccgcaacagaaactgtccaacgtggtcatcctggccaccggcggcaccatcgccggcgccggcgccagcgccgccaacagcgccacctacaccgccgccaaggtgccggtcgaccagttgctggccagcgtgccgcagctcaaggacatcgccaacgtccgcggcgaacaggtgttccagatcgcctcggaaagcttcaccaacgagaacctgctggaactgggcaagaccgtcgccaagctggccgatagcgacgacgtcgacggcatcgtgatcacccacggtaccgacaccctggaagagaccgcctacttcctgaccctggtcgagcacaccgagaagcctatcgtggtggtcggctcgatgcgcccgggcaccgcgatgtccgccgacggcatgctcaacctgtacaacgccgtggcggtggccggcgacaagtcggcacgcggcaagggcgtgctgatcaccatgaacgacgagatcctctccggccgcgacgcgagcaagatggtcaacatcaagaccgaagcgttcaagagcccgtggggcccgctgggcatggtggtcgagggcaagagctactggttccgcgcaccggtgaagcggcacacggtgaactccgagttcgacatcaagcagatctccgcgctggctccggtggaaatcgcctacagctacggcaacgtcagcgacaccgcctacaaggccctggcccaggccggcgccaaggcgatcatccatgccggcaccggcaacggctcggtgcccgcgcgcgtggtgccgaccctgcaggaactgcgcaagcagggcgtgcagatcatccgctcctcgcacgtcaatgccggcggcttcgtcctgcgcaacgccgagcagccggacgacaagaacgactggatcgtcgcccacgacctgaacccgcagaaggcgcgcatcctggccgcggtcgcgatgaccaagacccaggacagcaaggagctgcaacggatcttctgggaatactga

SEQ ID NO: 324906 - DNA, 1674 bp, Pseudomonas aeruginosa
atgcaacctgtgctcttcagaaccctgtccctcggcgtcgccattgccgccgcatcctcctcggccttcgccgccacgctcgacggcggcgccgtcgccgcgcccgacgagtacggcgccaaggtcgccgcgcagatcctcaaggccggcggcaacgcggtggacgccgcggtggccaccgccttcaccctggcggtcacctaccccgaggccggcaacatcggcggcggcggcttcatgaccctgtacatggacggcaagccgtacttcctcgactaccgcgaggtggcgccgaaggccgcgagcaagaccatgtacctggacgacaagggcgaggtgatcgagaacctcagcctggtcggcgccaaggccgccggcgtgccgggcaccgtgatgggcctctgggaagcccacaagcggttcggcaagctgccctggagcgagctgctgaccccggccatcggctacgcgcaaaagggcttcaaggtcgccgacaagcagttccagtaccgccaggacgccgtcgccctgttcaacggcaagaccaacttcggcgactacttcggccacatgaaggccggcgaggcgttcctccagccggacctggcgaagaccctggagcgtatcgccgacaagggaccggacgagttctacaaaggccataccgccgacctgctggtggcacagatgcagcaggacaagggactgatcacccaccaggacctcgccgactacaaggtcaggtggcgcgaaccgatgcgcgtcgactggcagggcaacacgctctataccgcgccgctgccaagctccggcgggatcgccctggcccagttgctgggcatcaaggaaaaccgtgccgccgacttcaagggcgtcgagctgaactccgcgcgctacatccacctgctggcggagatcgagaaacgcgtgttcgccgaccgcgccgactacctcggcgacccggacttctccaaggtcccggtggcgcgcctgaccgatccggcatacctgaagcagcgtgccgccgaggtcaatccgacggcgatctcgccgaccgagaaggtccgtcccggcctggagccgcaccagaccacgcacttctccatcgtcgacgccgacggcaacgcggtgagcaacacctacaccctcaactgggacttcggcagcggcgtggtggtcaagggcgccggcttcctgctcaacgacgagatggacgacttcagcgccaaaccgggcgtggccaacgccttcggcgtggtcggcagcgacgccaacgccatcgagccgggcaagcgcatgctctcctcgatgagcccgagcatcgtcacccgcgacggcaaggtcagcctggtggtcggcactcccggcggctcgcggatcttcacctcgatcttccaggtgctgaacaacatctacgacttccacctgccgctggagaaggccgtggccgcgcagcgcgtgcaccaccagttgctgcccaaggacacgatctactacgacgcctacgcgccgctcgccggcaaggtcgccgaggagctgaaggcgatgggctacaccctggaggaccagggctggaacatgggcgatatccaggccatccgcgtcgacggcaaggccctggagaccgcctccgatccccgtggccgcggcgtcggcctggtggtgaaaccctga

SEQ ID NO: 324907 - DNA, 735 bp, Pseudomonas aeruginosa
atgatttccatcaagaatgtcagcaagtggtatggcgacttccaggtcctgaccgactgctccaccgaggttgcgaaaggcgaagtggtggtggtctgcgggccgtcgggctcgggcaagtcgaccctgatcaagtgcgtcaacgcactggaacccttccagaagggcgacatcgtcgtcgacggcacctccatcgccgatccgaagaccaacctgcccaagctgcgctcgcgggtcggcatggtgttccagcatttcgagctgtttccccacctgagcatcaccgagaacctgaccatcgcgcagatcaaggtactcggccgcagcaaggaagaagccaccaagaagggcctggccctgctcgagcgcgtcggtctcaaggagcacgcgcacaagcaccccggccagctctccggcggccagcagcagcgcgtggcgatcgcccgcgcgctggcgatggacccggtggtgatgctgttcgacgagccgacctcggcgctcgacccggaaatggtcaacgaagtgctcgacgtgatggtccagctggcccacgaaggcatgaccatgatgtgcgtgacccacgagatgggcttcgcgcgcaaggtcgccaaccgggtgatcttcatggaccgcgggcagatcgtggaagactgcgagaaggaggagttcttcggcgacgtcagcgcccgctccgaacgcgcccagcagttcctcgccaagatcctcccgcactga

SEQ ID NO: 324908 - DNA, 525 bp, Pseudomonas aeruginosa
gtgccgttcgatcccgccaagccgacgctgttgtccacactggttcgtcactacgaggaactggtcgaccatgttcgccggcgcttcggcgaccggggcatggcgcgcgaagtggtgcacgacgtgtgcgtgcagttgctcgaacgcgacgagaaggaggacgtgcacacgcccctggccctgctgcggaaaatctcccacgacaccgccgtgagccgctatcgtagcgaccgtcgtcgaaccgcctgggtggaagccgtcgccgagcttccggaagtcgcctgcatggcggcgacgcccatgggtcgccatgaggccgagcgcgagttccaggcactggtcgacgccatcgccacgcttcctcctcgctgccaggccgttttcgtcatgcacaagatccacgaagttccccaggcgcaagtcgccgaccgcctcggcatctccgtcaagaccgtggaaaagcacctgcgcctcggactggcggcctgccgggaacggctcggccgcggcgaggcacggccatga

SEQ ID NO: 324909 - DNA, 771 bp, Pseudomonas aeruginosa
atgagtttcgatccctttggtgacttcgaaacgactggctacctgcgcaacagcttgggtctgaaagatccggcggaagtgaaggaaaacgaacacttctccttcgaaatggggctcgatgaagccctttcctatctcgaacgcacaaagaacctgaactaccaggcccttttgcaggtacacaggttgttgttcgagaaattctacccctgggccgggcgtgaccgtctcgagctggtccctcatctttctgtctggaaaggtcccaagggcgctcccagacgtaccttcttcgaaagtcccgcgatgatcgaacgcgcggtggactatgccctgagcctggcgagcaagaagcagggattcatgcagaagcccggtgaggtcatgggacttctttgctttgcgcatccctttctagacggcaacggacgctcgattctgctgttctacatggagctcagttatcgagccggctttgccatcgactgggccagcacacgcaaggacgactatctccaggccctggacgatgagattcacaatcctggcaagggtcacctggaccgctaccttgtcccattcgttgtgcctatccacagccgtgatcagtggcctgagatcatcgggcaaatcaacggactcgatggtatggatggtgagaacattacctacgagaacctcgatgatcccgaggttcagaaagtctatgcggtgtatcacgccgagcatccctacccagccaaagatggcacacccgactccgagccctaa

SEQ ID NO: 324910 - DNA, 261 bp, Pseudomonas aeruginosa
atgaaaaagagcaaaggcttagtcgcaaccgaaattcagagacttgcccaggccaatggcgttagcgcggagcgcgatggtctgagccggatggcactcaccatcacgtgcctggccggcgactcggtatctctcgatagcgttgagcagatgctgatcaacctcaagcgcaaaggcgcactaagcaagtcccaggcgttcgatctccagcgccgctacgtcatcgagaagcgcaaggcgaaagagatacctggtggatga

SEQ ID NO: 324911 - DNA, 804 bp, Pseudomonas aeruginosa
atggtagaaatccacctaccgctttacgcgccggccaagccgaatgccccgccccctccatctcaccgaaccctgaagacgaccatgcccgagcacgccccgatcctccccgtcatcgccgccgaggtggccgccctcgcccccggtttccgcgccctgagcctcaccgtcgaggcggcgccgatcgttcgtccggaaatcgccggccgcgccatggagcgcgcctgccaggcgctggcgcgtggcgaaccggactgggccgaggcgcacctggcagcctgggccgaggcgttccgccgcttcggcgccaagccgcagcgcaccccctgctccgccgaagccctgcgcaagcgtgcgctgcgcgacggtgggctgccgagcatcgacccggtggtggacctgtacaacgccatcagcgtgcaattcgccattccggtaggcggcgagaacctcgccgcctatgccggcacgccgcgcctggtggtcgccgacggcagcgagaccttcgacaccctgaagaacggcgaggcggtcgacgaatcccccgaccccggcgaggtggtctggcgcgacgacctcggcgtcacctgccgccgctggaactggcgccagggcgtgcgcacccgcctggatgccagcgcccggcgcatgtggttcatcctcgagagcctgccggaaatgccgctggcggccctgcacgaagcgggcggcctgctgctcgacgaattgcgcctgatgatgcccggcatgcgcgccgactcgcgcctgctgtgcgtggcgacggaacccaccgacagcgtataa

SEQ ID NO: 324912 - DNA, 984 bp, Pseudomonas aeruginosa
  misc_feature (27)..(36): n is a, c, g, or t
gtgctcgggatggatgcagcagcggtnnnnnnnnnngcacgggcgcgggtgggcttcctgctgctcgaacacttttccctgccggccttcacccaggcgctggacaccctggtgaccgccaacctgatccgcagcgagtccttcgcggtgagcaacttcagcctgagcggcgagccggtgaccagcgacctcgggttgctgatctgcccggacctggcgctcgcctcggcggcgttgcaaggactcgacctgctggtggtctgcggcggtttgcgcacgcccctgcgctcgtccgccgcgctgcgggaagcgttgcaggacgtggcgtcgcgcggcgtcgccctggccgggctgtggaacggtgcctggttcctcggcgacgccggcctgctggatggctaccgctgctgcatccatcccgagcaccgcgccgccctcgccgagatcgcccgcaacagccaggtgaccagcgacagctatatggtcgaccgcgaccgcctgaccgcggccagccccaccggcgccttcaacctggcgctggagtggatcgcccggcgccacgggcgcgacctggtggaggcggtggtggatatcctcgccttcgaggagtcgcgctaccggcgggtgcgccccgccctgcacgagaagatgagcgagccgctgcgcgaagtgatcaacctgatggcggcgaatatcgaggaaccgctcagccaggagcagctcgcccactacgtggggcgctcgcggcggcagatcgagcgattgttccagcagcagctcggaaccacgccggtgcgctactacctggagttgcggatcaccgagtgccggcgcctgctgcaacattccgacctgaccatgctggaggtcctggtcgcctgcggcttcgtctcgcccagccacttcagcaagtgctacaccgccttctacggctacccaccgtcgaaagaagtgcgctacggcaacgtccgctcgacgaaatga

SEQ ID NO: 324913 - DNA, 729 bp, Pseudomonas aeruginosa
atgaaagcccaacccgacgtcgactcgaacagcgccgatgcccccttcgaccgcaaggcggtgctgggcgatgcgctgcgccggcggatcctgagcatggaactggcgcccggcgcggtcgtcgacgaactcgccctgtgcgacgagttcggcctctcgcgcccgccggtgcgcgaactgctgcggcagatcgccgccgagggctacatcgaactggaagccaaccgtgcgccgcgcgtcgcggccatgagccacgactcgctgcacgccttctttctcgccgcgccgctgatctacatcgccaccacgcaactggcggccacccatgccagcgaagcggagatcgagacgctcaaggcgatccaggaagatttccgcaaggccatcgaagagaagcatgtggaaaaccgcgtcatccacaacgacgccttccacctggagatcggcaggatggcccacaacgactacctcatgccgagcctgcgccgcttgctgatcgaccatgcgcggctgggcaagatcttctaccgccatccgaccaccgacgacatgcaacgcgacctggaactcgcctgcgaccagcacgaccagatcgtcgatgccatccagcggcgcgatccggatgcggcggcggacatcgtccgtgcgcatttcgagctgtcgcgccggcgcatggccgagtacgcggcaccggccggagtggaggtggcgctggtctacgagggttag

SEQ ID NO: 324914 - DNA, 1320 bp, Pseudomonas aeruginosa
atgacgaaagtaacccaccttccggccgacgaccgttcctgcggctggtatcacctcagcccgccgcggcggccgaagccggcccactacggcaggagcgccgcccgttgggtggtggtcggcgccggcttcaccggcctcgccgccgcgcgccagctggcgctgcattttcccgacgaggagatcgtcctggtcgaggcccaggaagtcggcttcggtaccgccgggcgcaacgccggcttcgccatcgacctgccccacgacatcggcgccgacgactacatcggcgacatagcgaccgcccggatcggcctgaagctcaatctcgccggccagtcgctgctccgcgaacaggtacagcgccatgccatcgactgccagatgaaggcctgcggcaagtaccaggcggccgtcgaggcgcgcggcgtggctgtgctcgacgcctaccggcgcggcctcgatcggctcggccaggcctacgaggtgatcgaggcggacgacctcccgggacacatcggcaccgctttctatcgcaaggccctgttcacccccggtaccctgctggtgcagccctcggccctggtcaagggcctggccgacagcctgccgggcaacgtcagcctctacgaacacacaccgatcaccgccgtggaatatggcgacaggaccctgctgagccatccccacggcagcatcctggccgaccgcctggtcctcgccaacaacgccttcggcatgagcttcggcttcctccaggggcggatgctgccgatcttcacctacgccagcctgacccggccgctcgatgccgaggagcaggcccgtctcggcgggcgcccctactggggcctgatcccggccgacccttacggcaccacggtgaggcgtaccccggacaaccgcctgctgatccgcaacagcttcagtttcaaccctgacggacgcagcgccgggaagtaccttgagcgcttcgccgtacgccatcgcgcctcgttccgccagcgcttcccgatgctcccggaagtcggcttcgactacacctggggcggctcgctggcgctgtcgaggaaccacatggggcacttcggcgagctggcgcccaacgtctatggcgccctgtgctgcaacggcctgggggtaacccgcgggaccgtcaccgggaagctgctggccgactggctggcgggcgaacgcaacgagctgatcgacttcctgctgcgcgcgcccggtcccagcggcaatccacccgaaccactcctttcccttggcgtgaacctcaacctgaggtgggggcagtatcgagcaggtagagaaagctag

SEQ ID NO: 324915 - DNA, 1329 bp, Pseudomonas aeruginosa
atgacaaatcctacgacctcgatcgaagacgtacccctcaacgccttccaccggctgttgaccctgcgctccggcggcggctccttcgtcgacggctacgtgctgagcatcatcggcgtggcgatgctgcagatgaccgcggcattgcaactgagcagtttctggcagggcatgatcgccgcctcggcgctggtcggcatcttcttcggcggtttcctcggcggctggctgaccgaccgcctgggccgccgcaggttgttcttcgtcggccccagcctgttcgtcctcgcttccctggcgcagtacggggtcgactcggcggcggcgctgttcgtcctgcgcttcctgatcggcgtggcggtgggcatcgagtacccggtcgccaccgccttgctggtggagttcctgccgaagaagtatcgcggaccgcgcctggccaccctgaccatcctctggttcgccggcgccgccttcgcctacctggtcggcgacctgatcctgcgcagcggcggcgaggacgcctggcgcctggtactggccagcaccgcggcgatcggtgccgtgctgttcctgctacgcatcggcacccccgagtcgccgcgctggctgctgagcaagggccgcgacgcggacgcagagcgggtcatccgccaggtctacggcgaagccttctcgctggagaacctgcccgaacaggcgctggaacggaaggtcaccatctggcacctgctctacgccggctacggcaagcgcatgctcttcgtcaccctgttctggacctgctcggtgatccccgtgttcgccgtctacgccttcgcgcccaaggtgctgctggcgctgaacctgaagggcgactgggcctcctacggttcggtggcgatcaccctgctgttcgtcatcggctgcatcatcgccacccgcctgatcaaccgcatcggccggcgctgcatgctgctgcacagcttcctctggtccggcctggcgctgctcgggctgggcgtcttccacgccggctcggaggcgaccatcctcggcctgttcggtgcctacgcgctgttcatcggcggcgcccaggtgctgcaactggtctacccgaacgaactgttccccaccgagatccgcgccttcgcggtcggcgtcggcacctcgttatcgcgcgtcggcgccgcggtgggcacctacctggtgccgctttccctggaaaccctgggtaccgcccagaccatgtacgccgccgcgctggtgaccctgctcgggctgctcgtgacctgggccctggcgccggaaacccgttcgctgaacctgcagcaggcggcttcgctcacctga

SEQ ID NO: 324916 - DNA, 324 bp, Pseudomonas aeruginosa
atggttaagaaattctccgaccttcgggcgcaaatgtcgcctgaggcacaggcccgcgtcgaggccaaggcccaggaactgttggctgaaatgcccctgaatgagttgcgccaggctagaggcttgtcgcagaagatgctgtctgaagtgctgcacgtgcagcagccggcaattgccaagatggagcggcgtacggatatgtacatctccaccttgcgcagccacatcgaagccatgggcggtcagctggaagtgattgcacgcttcccggatggcgcggtgaaaatcagcaacttcgcggatatcgaagaggcaggcgcctaa

SEQ ID NO: 324917 - DNA, 681 bp, Pseudomonas aeruginosa
ttgcggcggaagcggctggaggaggggatatccgggaagaccctgaacaacgaactgggatatatccgcgcggtgttcaatgagctgaaggacctgggccagatcgactacgacaacccgctggccggagtgaagctgctcaagctgcaagagcgtgaactgtcgtggctgatgaccgagcagatcggcgaacttctcgaatcaatccgcagccgttgcgacaacccgcatacggagctggtgacactgctctgcctggctacgggggctagatggtccgaggcggaaaagctccccgcgcaacgactccagggcaacgtcgtgacctatgccggaacgaagtcagggaaggtgcgccacgtaccgattccaccagagctggctgaccgggtgagggcgcattggcgaatgcatggtccgttcacatcctgcatcacatccttccgacgcgccctggagcgaaccacgattcggttgccgcaagggcaagcctgtcacgctctacggcacaccttcgccagtcactttatgatgaatggcagcaatatcctcaccctacagaaaatcctggggcattcgaccctgacgatgaccatgcgttacgcgcatctgtcgcctggtcatctgcaggatgccatccgttttgggccgaatatagatattacccttgcttcatactag

SEQ ID NO: 324918 - DNA, 1383 bp, Pseudomonas aeruginosa
atggcgctagaaaaaatacaaatcagtggttaccgcggattcaaggagctagcaacggtaaattttgccgtgccagtccaaaacaaagaaggcagcgggcttagcatcataaccggagcaaataattctggtaaatcaaccatccttgaatgcctaagagcaagatcaggctataacacacctagcttttcttcaggtgttcggaatgcgtcaacagaatttataaatatagtatattcattcacagatattgaagagagaattcactccatccaaaagggatcaagcgaagcgatccacaccattccaagatcagactcaaaaatattctgccttccctcaagacgaactttctcccctttttttgggaagggaggtattaatgatcgacaaactagaattcagcaatttgtccttcccagcgctcgatcaccaatgctggatggctttgagtccaggttatttaaaatcaccagctcagaagagctaaagacagaattcaacaaattactatctgaagttctgggttttacccccgactgggctattgacctctcggagcaaggggggtatttcctaaaattctttaactcaggacactcccactctagtgatggccttggagaagggatagtaagtatattctctattatcgactccctatacgactctaccgccaaagacataattgtcattgacgaacccgagctttccctacacccatcgttacaacggcggctttcagatgtattttacagatattcaaaagatcggcagattataatatccacgcactctccctatttcataaatatatccgccctaaaaaatggcgcaaaaataacccgagtcatctccaccaaaagcggcagcaaagtccatcagctcacacctgaatcgacagaagctataaataaactttcttctggcaacatttacaacccacacacttttggactggatgccagagagttgttctttcaagatgatggaattattctcactgaaggacaggaagacgttgtgctattccctcaaatagcaaattccttagagaaaaaaatttctggtaatttttttggctggggtgcaggaggagcgggaaatatcatacatctctgcaaaatactctctgacctaggttttaaaaaagtaacagccatactcgatggagacaaattagaggaaactgaaaaacttcgcccactcttccccaattacaatttctgcaatattccagcagatgacattaggaccaagagcgccagagaagccacagaagaaaaagctggacttcttgacaaaaagaacaacatcagacgagagcacatagaaagcattaaaactctattcgaatcaataaataaatatatgcgcgactag

SEQ ID NO: 324919 - DNA, 639 bp, Pseudomonas aeruginosa; identical to SEQ ID NO: 324178

SEQ ID NO: 324920 - DNA, 1725 bp, Pseudomonas aeruginosa
atgaccctgttcgaacgaatgcgtgcgctgcccgaagactgccgtgccgcgttgcgccgggcgagcgcctgggcggtcctggcggcgctgctggacgccgcttgcggcgtattgctggtgccgctggtcgaggcctggttcgccgaaggcgcgttgccctggcgctgggtcgccgcgttgctcggcttgagcctggcgcaggcgctgttgcagtacctggccctgcgtcgcggtttcgccgccggcggctcgctggcggctggactggtgcgcagcctggtggcgcgcttgccgcgcctggcgccgccggcgctgcgccgggtcgcgccggccgaaggcctgctgcgcggcccggtgatgcaggcgatgggcattccggcgcacctgctggggccgctgatcgccgcgttggtgacgccgctcggggtgatcctcgggttgttcctgatcgacccgtccatcgccctcggcctgctcgttgccggtgccgtcctcgctgcgctgttgcgctggagcgggcggcgcaatctggcggcggaggatgcccggctggccgccgagcgcgacgctgcacggcagttgcaggcgttcgccgaacgccagccgctgctgcgcgcggcgcagcgcgaaagcgtcgcccgccaggggctggaagaggccttgcgcagtctccaccgcagcaccctggatctgttgcggcgcagcctgcccagcggcctcggcttcgccctggcggtgcaggcggcgttcgccttcgccctgctcggcggcgcctgggcggtggagcggcaatggctggacggcgctcggctggtggccgtgctggtgctgctggtgcgcttcatcgagccgctggcccagctcacccatctcgaccaggcgttgcgcggcgcctggcaggcgctggataccctgctgcgggttttcgccctggctccgctgcgcagccccgagccgggcgagcggccgcacgacgccagcctggcggccgaggccgtggaattgcgtctggaagatggccgcgccttgctcgaggacatttccctgaggctggagccgggttcgctgaacgtcctcgtcggaccctccggggccggcaagagcagcctgctggcgctgctcgggcggctctacgacgccgacgccgggtgtgtcctgctgggtggcgtggatatccgccggttgagcgaaacgaccctcgccgccagtcgcaacctggtgttccaggacaacggcctgttccgcggcagcgttgcctggaacctgcgcatggcgcgagcggacgccgatctcgaagcgctgcgcgaggcggcgcgggcggttggcctgctggaagagatcgaggcctggccgcagggctgggacagcgacgtcggtcccggcggcgcgctgctgtccggcggccagcggcaacgcctgtgcctggctcgcgggctgctctcggcagcgccgttgctgctgctcgacgagcccaccgccagcctcgatgcagccagcgaggcgcaggtgctgcgcagcctgctcgggttgcgcggccggcgcaccctgctggtagtgacccaccgcccggcgctggcgcgtcaggccgaccaggtactgctgctggagaaggggcggctgcgcctgagtggacgtcacgccgatctgctcgtccgggacgactggtatgccggcttcgtcgggctggcgggcgaggaaagttccgcgacggccgtggatcgatag

SEQ ID NO: 324921 - DNA, 216 bp, Pseudomonas aeruginosa
atggaactggaagagcttaaccccagcgccctgacagggccgcaacaggatgtggagtccatcgaacggtgggcggagcgcaacggcattagctatggcaccgcccgcgcctgggtttaccggggtgtgctgccgtccgtgaagcttggaaagctgcgcatggtgaatagcgcgctgcttcgcaactggctgttggaacaggagtggacagcatga

SEQ ID NO: 324922 - DNA, 699 bp, Pseudomonas aeruginosa
atgaaagctgacaaggatgatgcaccggaatacttaagaagaaagcagagccagagccttggtaagtgggcgcttgcaatcgctctagggctgggactttcaggattagctttatacatggcaggaaacaacctctctttccttccaaaaccacaacccagccaaccctctaatcttgagaaatctgctcacacccctaacgctcacactccccaagaccagccccaaaagacatcagaagaacttttttgggaaagtgttaatgcacgcaatcatcagcagaaccagcctaagcaaactgtttataacgatagtaattacaggccgcaaaaaccggccaatacctacacaccgccagcatcccatcgagtagtatctgcgccccagcaaacacagcaacgccaaaccaatcgagcaaaccgcgaacgaacctctaagtggatcaaaagctggaatggcggtacaaactacctagcagaatggctatccgtaaaaaatcacatagatggctccagtgtctgcgccaatcaccgacgcggctcaatcgactaccgcgagtgtcgtaaggctgccaagcagcacttccatgagcagtgcagagtctggcgtgtgcgctatgacaatgaccgcaaagtaggcagtgatcgaatgaagacacgctactgtactgcagcgagcagcttcaatccaatgggataa

SEQ ID NO: 324923 - DNA, 3621 bp, Pseudomonas aeruginosa
atggatttattaaaaaaactcttatttaaaaattcaaaaaacaaagaaactccatcgacattagagaattttcatgacttagcaccagttaaagccgccgacccggatgggatttataccaaagcactaaactttgccatgcaaaaccgatctgtccgaaatctggccataaccggcccatatggatcaggaaaaacaagcataataaatacttacgaaaacaattcaaattataaattcctaaacatatcattagcaacattcaacgatccaaattcaaacgaaacatccgacgacaatccagaagcaaccgcaaaaatcgaaagaagtatcctgcaacaaatgctatacggggccgactcaagaaaactcccttactcccgattcaaaagaattacaaaacctcgccaactaaagctcaatgccatcatgctttctggatggctagcattaagcgcagctctatataaaaaacaagacgacctttcattcagcgactctctaaaagaggtagactggctgtggacttcaatagtcgtgctttgctttctataccttgcatggattacaactagagcacttcaaacttttcacaacctttctgtaaagaaactctcgctgcaaaatggcgaagttgaactagatggaattccagaaagctctatactcaacaaatatctcgacgaaatcatctacttcttcgaagaaaacaactatgacctagtagtcttcgaggaccttgatagattcggagagccagagatatttattaagttacgagaagtaaacaaaataattaatgacaaaagaggaaacaacaaaaagctagcaaaaaaacaaccattaaaatttgtttacgcaattaaagacgatatgttccttaacaaggaccgcgcaaaattcttcgacttcatcatccccgtcattccaattataaacagttcaaactcacgagagatgctgaagcagtgcctccagcgccctgaggctatagctatagatgagaaatttataggcgaagtttctctttatctagacgacatgcgcctcataaaaaacatcagcaatgaatttttgatatacgaaaaaaagataaacgcaaaaaaacttaatagaaacaagctgctcgccgccatactttacaaaaacacttacccaaaagactttgaagccctccactacgaaagcgggttcctatatgagattataaagacaagatcaaacctaatccttgacctatcagaaaagatagataaaaaaattgaagaaatcaaagctgatctaatcaaaatagaggacgaaccattaaacgaaagcagcgatttagcaaagctattcctgggacacatcataagtacaaacccttcgatatcaatacttgggatatattgcgaaagcagtatcatctcactagaaaaccttctcgattggaataacttcaaacgtcttttcaaagaaaaaaaagtttcagtacataccagaccacagtacggttcacctcagatgcattcgctctcaaaatcattcagagaactggaagaagattgctcacctagagcaagttttgaggagcgctataaaagaatccaagaaaagaacatcaacactcgcttaaagctaagcgaagcgatagagaaactgaaagaggaaaagctagaaacagccaggcgaccgctataccaactgcttagagatgccaaatttacaacagacagcatagaggaaaaacacagcatcaatgacccgcgcttacttcgctatctaatacgaaatggctacctcgatgaaacctataattcctacatatcgatattccacgagggcagactatcaagaaatgactgggaatttattctttctattcgcgattttaaaccactcgcaccggaaacacagttaacctcccctcaagaagtctcggcagaaatgcgccgtgaagactttggtacacgttacgctcttaacgtaaaccttgtcgactatctcatagccacaaaagagaaaagtaacgacaagataatttcacttataagattcatatcaaaagacatctcaataacagacgagttctttcagacatattggttaacgggaactgaagttgaaaacttcacaatagcaatatccaatgagtggccgcaatatgcgatctcagctatcgaaagtgagctcgcggtaaaacacgtcgcacacataatatcttacgttgacccaaaatacataagtactgaaatgaatgaaaaatcgaaactcaccaaattcctatcggaaaaggcggcgctagtattcaatgaaaacataccattcaaaatgggatactcagccctagagtttctagatgtaaaaataagttcacttcatgatatatcaaccctagataaactaatagagtttgcgcaccaaaaaagcctatacaaaatatccattgacaacataaatctcttgctctctagattcaatgatgaaaccgctgcccaacatcagcctgatgcgttgaatgtggagacctcaaattattcttacattctcaactttggcagcacgcacctcaagagctatatacacaaaaacatagacagctatttagaaaatatagctctaaccttgagttcaaacacaaaggaatcgaagcaagcaatattggaagtattgaataacgatgacgtcgatgtggatctagcactgcaatacataataaagcaagactacattactgaagactttgataaagtccccgatttctattggggcgatattctcataaatagaaaaataaagataaactggaaaaatattcttgactactatggaagtgtagaatttgaagtagaaaaactcaatgaaattttaaacaacaaagaaacatctagcgaattatccaccaataaaatacccgcaccaagcacaaacaacgagcagagcaagtccctttcgcgatttataataacgaacaaaaaaatagacatcgagaactaccaactggtatgtagaagcataccctacacatataaagaaatacctgaagacctacccgagaatagagaattaattctaattgatcttgggataatctcactgactgaaaaatcatttgcgcaagtttcgaagtccacgttgctcgcccagaaactgttagctcgaaaaatcacaacatacctacaatcaccagaaaaattccaagtaaccccagaaataaaagccgctctcatctccgcaccgatggaaatagcacacaaatccaaaataattgaagcaataagtattgttgatttgcagcaaagcaatattctagctcgaagcgttgccactgcgattgcaaatgaagatcttccaaaaaacaatatcaccatacaaacaatatcttattgcatcgtgctagctagcaacaatgaaaaaatcgaaatactgcacaaatacatccagcttctcccaactgaggatattatctctaccctaagtagtttgcccgagccatatcactctatatccgtgaaaagaaaaagaccaaaaatagataacaacttaaataatatagactttgtgcaaagtctaaaaaccagagggctaatctcatcgtggaagaaagaaggcgactcaatccgaataaacacattccgttaa

SEQ ID NO: 324924 - DNA, 1461 bp, Pseudomonas aeruginosa
atgaagaagtctatgatttcttgtttgtgttttgtgcttcttctgcactttttattggtttcgaaagttgcggcggaagtcttttgtgagtcttgtctacaggtgcgggtggagcgcccgctagtagttaggggtgggtctaacgagcctggcctggatactaagttttatgtaataaagctctctgaaaatttattcagaggctacagttccggaggtggtgatgcttacgcaataaccgggccggaggcctggtctatgggctggcctgccaataaggtgttaagtaaaggtgccgcagggtcctacagcgagtgtggagtatggataaattctccggttaagatcggagatgtctatgttgcagccgtgcatcaggagcaaaagtgcgactacatcaatggtgggcaggcgcacaagtcaatgggagtatcgttttcttatgacggtctatcttgggttaatccaattactgtgttgaccagccctgaggcaccgaagatggggacccaatctggggagggtgactgttcactggttcgggcccccgatgaaggctacctctatatgtattgtttcaggccggggcgatgggataatatcgtggcgcgtgctccggaggcatcttatatgttcccgtcaagctggaggaaattatataaaggaaattggagtgagcctgcgattggtggtatggcagatagtttgggtgctatagggagtagtgttgggtattggcgggctggacgtaaagttattgcgcttgatctcgatccatggtttggcgggataaagctgtcattgtcctcggattataagaatttttttactcttaaggatcctcttgttccgtttgttaaaaatgattgggatcgaaatttaattgggaagtcaactgacttaatcgcatatgtgggggtcgtgaatctatttggtggcgggaatcgagttgataattccggctgtggtatcacctatacttatataccgcatggaggaacgctaaaggaaaagtatctcgtctttcaaggggttaacatgaaggtggttagtgaacctaaacaggcttccgtaggtttggctcttacccgctgggagcacaggagtgggaaatacagagttactactctgcctgtggtgagacaatccgagtacaccgagcgtaatcgtatcgcatatctcctgactcgtcctgtcgttggtattgaaacgcttgaggtggaggagtgtgtgaatagacaggatcccgatgattatctcgtgactgatgcaggaggatgtgacgggagcggacatgatcgaatcgccactatcggttgggtgtataaatatccacaaaaaaatacggtccctatttatcgctgttactctccgcttggcgaaaatcattttctatcatcgaatgcagggtgtgatgatttgggaagcttggaatggaagcttggatatggtttgaagtaa

SEQ ID NO: 324925 - DNA, 807 bp, Pseudomonas aeruginosa
atgagcagggaggtttttagggtgaaatttttatccggtttctgggagcgccgtcgtgcgaatggcactcctctagtgtgtatcgaagagcgtggcagtggtgcaggcgaattctcgtcggtgtcccgtagggttgaaactgctcctgacgtacgtagcgttgcgtctgcagattcggagcagtggatacattcccaggagtacgagctttctttctggaaggataaatggccctatcgccatctgtctgtcgaggaactacaagaggcccggcataaggatgcaatgtggtttcttgggaagatggggttcacgtacggctcctcgcattatcgctacgaaggttttgaaggtaaggttttggaagtaggtagtgggccgatcggctttttcgagaaggtcgaaggcgtgacagtgactgcccaggactcattgatggggctgtatgcagagaatcttccattctcgattctcggggaaagaggttcttcttgttatataagggatggtgttgccgatatagagagtgcgttcgatttcgtcgtttgctcaaatgtgcttgaccatacggccgactggatccagttcctggttgactgtgtgggcaggttgaggacgggcggtgagctactgttggtgactgattctcgcggagttccagcaatcgggcatacacagatattcagtcatgatcaactggttcgtgtcttggagttgctgggagcaaagcagttcaaggtgaaagccgtcgagcgggaggatggcgttcactgtgactatcgtcattattttcgggtggttttctga

SEQ ID NO: 324926 - DNA, 483 bp, Pseudomonas aeruginosa
atgctaccggcgcggccggcgaggttggcggcgatcaatgcggtaccggcctgctggctgatcttgccggcggtgctggtctgcatccacagggtgccgctgcccaggtcgacgatgccgctggtctgcggcgtgccgccgctgaggaagctgatgttgccgccggcgcggattgccaggctgccgttgcggaacaggatcggcgcagagatatccaccgcaccggcaggtccggtggcgatcagctccaggccgcgactggcgccgcccaggttgctggtgatcagcggcgcttccaccgacagccggtcgctggcgctgagggtcaccttgccgcctgccagcgccccggtaaccaccgaggcattcaccgtcgcgtcgccgctggcgccgttggcgccccccaccgaacctgaggtgccgccggaggcgacgatgcgcagggtggtcgggtcgagcagccaggtgccaccgttgccgtag

SEQ ID NO: 324927 - DNA, 729 bp, Pseudomonas aeruginosa
atgtcgaagcattcccccaccgatcgcctgctgcagatcctcattgccctcggccaggctcccgaagccctgtctgccaaggagctgtcgctgaccctggagcagccgctgagcagcacctaccggcacctgaagaccctgttgcgctggggcctggccgaagaacaggccggccagggccgctacctgcccggcccggcctgcctgcaactggcgaagaaattcgatcgcgaggcctcgctgatcggtctcgccaaaccagaactcaagcgcctggccgacctgagccaggagagcgtggcgctgatggtggccagcaaccagcaggcgatctgcctggaactattcgacagtccgcagccgctgcgctgctgctaccagaaagggctggcgcagccgctgttgcatggcgcctcggccaaagccctgctggcgcacctggaggacgaacggcgcgaggagctgtacctcgcccaggaactctccgccgagcgtatcgacaagctggagcaggaactccggctgatccgcgaacagggctacgccgtcagccagggcgagatcgacgaaggcgtctggggcatcagcgtaccgctgctggacagccgccagcgcctgcacggcgccctcagcctgatggcccccgccttgcgcgcccagtcgcgcagcgaacgcttgcggcaatggaccctcgacgccgccgcgcgactttccgcgcggctggactga

SEQ ID NO: 324928 - DNA, 936 bp, Pseudomonas aeruginosa
atgtaccccgcccccgacatgagcctctggcaaggccggatcgatagccaggaaggcgccgacgcgcggcgctggcaccaatggatgcgtccctacgcagacgacgccgaagcggccagcgtgctgctcgggttcgccagcgacgaaggcgtgcgccgcaaccagggtcgccagggcgcgcgccacggaccgccagccttgcgtcgcgcgctggccaacctggcctggcacggcgagcaagcgatctacgatgccggcgacatcgtcgccggcgacgatctggaagccgcccaggaatgctacgcgcaacgcgtcgccgacctgctcgcgcgcggccaccgggtggtcggcctgggcggcggccacgaaatcgcctacgccagcttcgccggcctcgcccgccacttgagtcggcatgagcgcctgccgcgcatcggtatcctcaatttcgacgcgcatttcgacctgcgccacgccgaacgggccagctccggcacgccgttccgccagatcgccgaactctgccaggccagcgactggccgttcgcctactgctgcctgggcatcagccgcctgagcaacaccgcggcgctgttcgaccaggcccagcgcctgggtgtgcgctacctgctggaccgccagttgcagccatggaacctggaacgcagcgaagccttcctcgacagcttcctgcaatccgtcgaccacctctacctgaccgtttgcctcgacgtactcccggccgcccaggcgcccggcgtcagcgcgccctcggcgcacggcgtggagatgccggtggtggagcacctggtccgccgcgccaaggccagcggcaagctgcgcctggccgacatcgccgaactcaacccgcaactcgatagcgaccagcgcaccgcccggatcgccgcgcgcctggtcgacagcctggtcaactga

SEQ ID NO: 324929 - DNA, 561 bp, Pseudomonas aeruginosa
atgccgacattgcccctggacgccctgtccaccaccgccctcgccctgctcctgctcgccctcggcagccaattgaagaagcgcagccgctggctgacacgtctgtgcgtaccgtcgccggtgatcgccggcttcggcttcgccttcctggtctggctgctcagggatcgcggctggctcgacatcggcctcgacaccagcctgcagacacccctgatggtggcgttcttcaccaccgtcggcctcggtggcagcctcggcctgctgcgcaagggcggcaagaccctgctggtctacctgtcggcctgctgggcgctggcgatactgcagaacctgatcggcgtcggcagcgccggactgctcggcctcgacccgttgctcgggatcatggccggcgcggtctcgctggaaggcggcttcggcgcggcggcggccttcggcccggttgcggaagggctcggcgcccagggcgcgaccaccgtggcgctggcctcggccagcaggagcgacgccagcatgcggcggccacgctggacggcaatctcctgctgcgcctgctga

SEQ ID NO: 324930 - DNA, 378 bp, Pseudomonas aeruginosa; identical to SEQ ID NO: 321690

SEQ ID NO: 324931 - DNA, 564 bp, Pseudomonas aeruginosa
atggaccactacctcgacattcgcttgcgaccggacccggaatttcccccggcgcaactcatgagcgtgctcttcggcaagctccaccaggccctggtggcacagggcggggacaggatcggcgtgagcttccccgacctcgacgaaagccgctcccggctgggcgagcgcctgcgcattcatgcctcggcggacgaccttcgtgccctgctcgcccggccctggctggaagggttgcgggaccatctgcaattcggagaaccggcagtcgtgcctcaccccacaccgtaccgtcaggtcagtcgggttcaggtgaaaagcaatccggaacgtctgcggcggcggctcatgcgccggcacgatctgagtgaggaggaggctcggaaacgcattcccgatacggtcgcgagagccttggacctgcccttcgtcacgctacgcagccagagcaccggacagcacttccgtctcttcatccgccacgggccgttgcaggtgacggcagaggaaggaggattcacctgttacgggttgagcaaaggaggtttcgttccctggttctga

SEQ ID NO: 324932 - DNA, 1029 bp, Pseudomonas aeruginosa
atgtccaagccaatactgagcaccgcttccgtcctcgccttcgaacgtaagctcgacccttccgacgcccttatgagcgctggcgcctgggcgcaacgcgacgcctcgcaggaatggccggccgtgaccgtgcgcgagaagtccgtacgcggcaccatctccaaccgcctcaagaccaaggaccgtgacccggccaagctggacgcctcgatccaatcgcccaacctgcagacggtggacgtggccaacctgccgagcgacgccgacaccctcaaggtccgcttcaccctccgcgtgctcggcggcgccggaacgccgtctgcctgcaacgacgcggcctaccgtgacaagctgctgcaaacggtcgccacctacgtgaacgagcagggcttcgccgagctggctcgtcgttatgcgcacaacctggccaacgcccgcttcctgtggcgcaaccgggtgggcgcggaagcagtggaagtccgtatcaaccatatccgccagggcgaggtggctcgcgcctggcgcttcgacgccctggccatcggcttgcgcgacttcaaggccgacgccgaactggacgcgctcgctgaactgatcgccagtggcctctcaggcagcgggcatgtcctgctcgaagtggtcgccttcgcccgtatcggcgatggccaggaagtcttcccctcccaggaactgatcctcgacaaaggcgacaagaaaggccagaagagcaagaccctgtacagcgtgcgcgatgccgcggccatccactcgcagaagatcggcaatgccctgcgcaccatcgatacctggtatcccgacgaagatggcctcggccccatcgccgtggagccctacggctccgtcacgtcccagggcaaagcctatcgccagcccaagcagaagctggacttctatacgctgctcgacaactgggtactgcgcgacgaggcgcccgccgtggagcaacagcactatgtgatcgccaacctgatccgtggcggcgtgttcggtgaagccgaagagaagtaa

SEQ ID NO: 324933 - DNA, 984 bp, Pseudomonas aeruginosa
atgagcgtgactgatcccgaggcgctgctgttgctgccacgcctgtccatccagaacgccaacgccatttccagccccttgacctggggtttcccttcgcccggcgctttcaccggattcgtccatgccttgcagcgtcgagtcggaatctccctcgatatcgaactggacggtgtcggcatcgtctgtcaccgcttcgaagcgcagatatcgcaaccggccggcaagcgcaccaaggtcttcaacctgacccgcaatccgctgaaccgcgacggctccaccgcagccatcgtcgaagaaggtcgcgcccatctggaggtcagtctgctgctcggagtgcatggcgatggtctggacgatcaccccgcacaggaaatcgccaggcaggtacaggagcaggctggcgccatgcgcctcgccggtggcagcatcctgccctggtgcaatgagcgcttcccggctccgaacgccgaactgctgatgctgggtggcagcgacgaacagcggcgcaagaaccagcgccggcttacccgccgcctgctccccggcttcgccctggtgagtcgcgaggcgttgttgcaacaacatctggaaaccttgcgtaccacgctccccgaagccaccacgctcgatgcactgctcgatctttgtcgaatcaacttcgagcctcctgcaacctcgtccgaagaagaagcatcgccgcccgatgcagcctggcaagtgcgcgacaagcccggctggctggtgccgatcccggctggctacaacgccctgtcacccctgtacctccccggcgaagtgcgaaatgcccgtgatagggaaacaccgctgcgcttcgtcgaaaacctcttcggtctgggcgaatggctcagcccccatcgcgtcgccgcgttatcggacctgctttggtatcaccacgtcgagcctgacaaagggctctaccgctggagcacaccccgtttcgtcgaacacgccatcgcataa

SEQ ID NO: 324934 - DNA, 1305 bp, Pseudomonas aeruginosa
atgacctctcccctcccaacgcctacgtggcaggagcttcgccagttcatcgaatccttcatccaggagcgcctccagggcaagctggacaaactccatcccgacgaagacgacaagcgccagacattgctggccacccaccggcgggaggcctggctggcagatgccgcccggcgggttggccagttgcagttggtgacccacacgctcaagccgatccatcccgacgcccgcggcagcaacctgcacagcctgccgcaagcacccgggcaaccgggcctcgccggttcccatgagctaggtgacaagctggtcagcgatgtggtgggcaatgccgcggcgctggacgtattcaagtttctcagtctccagtatcagggtaaaaatcttctgaactggctgacagaagacagtgccgaggcattacaggcgctgtccgataacgccgaacaggctcgcgaatggcggcaagcgttcatcggcatcacgaccgtcaaaggcgctcccgcgtcccacagcctggccaagcagttgtactttcccctgcccggttccggctaccacctgctagcaccgctgtttcccaccagtctggtgcatcacgtccacgctctgctccgcgaagcgcgcttcggcgacgcggccaaggcggcacgcgaagcgcgcagccgccaggagtcatggccccacggattcagcgagtaccccaacctggcgatccagaagttcggcggtaccaagccgcagaacatcagtcagttgaacaacgagcgccgtggcgagaactggttgctgccaacgcttccgccgaactggcaaaggcaggatgtaaacgcgccgatgcggcactcttcggtcttcgagcatgacttcggaagaactcctgaagtatcccgcctaacccgtaccctgcagcgttttcttgccaagacagtccataacaacctcgccatccgccagcggcgtgcccaattggtggcgcaaatctgcgacgaagccctgcaatacgccgcccgtctgcgcgaactggagcccggctggagcgcaacccccgggtgccaactgcatgacgcggagcagctctggctcgatccgttgcgcgtacagaccgatgagacgttcttgcagcgccgactacgaggtgactggcctgccgaggtcggaaatcgcttcgccaactggctgaaccgggcggtcagcagcgacagtcagatactgggtagcccggaagccgcccaatggagccaggagctgagcaaggaactgacgatgttcaaggagatactcgaagatgagcgtgactga

SEQ ID NO: 324935 - DNA, 3231 bp, Pseudomonas aeruginosa
atgaacatcctgctggtgtcgcaatgcgaaaagcgcgccctgagcgaaacccgccgcattctcgaccagttcgccgaacgccgcggcgaacggacctggcaaacgcccatcactcaagccggactggataccctgcgacgcctgctgaagaaaagcgcacggcgcaacaccgccgtagcctgtcactggatccgcggccgcgaccacagcgaactgctgtggatcgtcggtgatgccagccgcttcaacgcccagggtgcggtgccgaccaacaggacccgccgcgacatcctgcgcaaggaagacgagaacgactggcacagcgccgaggacatccgcctgctgacggtgatggcagcgctgttccacgatatcggcaaggccagccaggccttccaggccaaactgcggaaccgcggcaaaccgatggccgatgcctatcgtcacgaatgggtatcactgcgcctgttcgaagccttcgttggcccaggcagcagcgacgaggactggctgcggcgcctggcggacaagcgagagacgggcgatgcctggctgtcgcaactggccagggacgaccggcaacccgcgccacccggcccgttccagaaaagccggctaccgccgctcgcccaggcggtcggctggttgatcgtcagccatcatcgcctgcccaacggggaccatcgcggcagcgcctcgctggcacgcttgccggcccccatccagagccaatggtgcggcgcacgcgacgcagacgcaaaagaaaaggccgcctgctggcagttcccccacggcctgcccttcgccagcccccattggcgcgccaggacagcgctatgcgcgcagagcatgctcgagcgtcccggcctgctggctcgggggccggccttgttgcacgacgcctacgtcatgcatgtgtcccgactgatcctgatgctcgcggatcaccactattccagtctccctgccgactcccggctgggcgacccgaacttccccttgcacgccaacaccgaccgggacagcggccaactcaagcagcgcctggacgaacacctgctcggcgtcgccctgcacagtcgcaagctcgccggcaccctgccacgcctggagcgacaactaccgcgccttgcccggcacaagggcttcacccgccgggtcgagcagccgcgcttccgctggcaggacaaggcctacgactgcgcgatggcctgccgcgagcaggctatggagcatggattcttcggcctcaacctggcgtcgaccggttgcggtaagaccctcgccaacggccgcatcctgtatgcgctggccgatccgcaacgcggcgcgcgtttcagcatcgctctcggcctgcgcagcttgaccctgcaaaccgggcaggcctaccgcgagcggctcggcctgggcgacgacgacctcgctatcctggtcggcggcagcgccgcccgcgaactgttcgaaaagcagcaggagcgcctggagcgcagcggtagcgagtcagcccaggaactgctggcggaaaacagccatgtacatttcgccggcacgctcgaggacggccctctacgcgagtggctcggcaggaacagcgcgggaaaccgcctactccaggcgcccatcctggcctgcaccatcgaccacctgatgcccgccagcgaaagcctgcgcggcggacaccagatagcgccactgctccgcctgatgacttccgacctggtgctcgacgaggtcgacgacttcgatatcgacgacctgcccgccctgtcgcggctggtgcactgggccggcctgttcggcagccgcgtgctgctctcctccgcgaccctgccgccagccttggtgcagggcctgttcgaggcctatcgcagcggccgggaaatcttccagcgccatcgtggcgctcccggacgcgctacggaaatccgctgcgcctggttcgacgagttttccagtcaatccagcgcccacggcgccgtaacctccttcagcgaagcgcacgcgaccttcgtcgcccagcgcctggcgaagctcgagcaactgccgccacgtcgccaggcgcagctatgcaccgtgcatgccgctggcgaggcccgtcccgcgctgtgccgcgagttggccgggcagatgaatacctggatggctgacctgcatcgctgccatcacaccgaacaccaaggacgtcgcatcagtttcggcctgttacggctggccaacatcgaacccctgatcgaactggcccaggccatcctcgcccagggtgcgcccgaggggttgcatgtccatctgtgtgtctaccattcgcggcatccccttctggtccgctcggccatcgagcgacaactcgatgaactgctgaagcgttcggacgacgacgccgccgcgctgttcgctcgtccgacgctggccaaggcgctccaggccagcacggagcgggatcatctgttcgtcgtactcgcctcgccggtggcggaggtcggtcgcgaccacgattacgactgggccatcgtcgaaccctcctccatgcgctcgatcatccagttggccgggcgaatccgccgccatcgctccggcttcagcggcgaggccaacctgtacctgctatcgcgcaatatccgctcgctggaagggcagaatccggcgttccagcggcccggcttcgagacccccgacttccctcttgacagccacgacctgcacgacctgctcgaccccgccctactcgcccgcatcgacgccagcccacgaatcgtcgaaccgttcccactgttcccacgcagccggttggtcgacctggaacaccgacgcctgcgcgcgctgatgcttgccgacgacccaccgtcgtccctgctcggcgtaccgctctggtggcaaaccccggcatcgctcagcggcgccctgcaaaccagccaaccatttcgcgcaggcgccaaggagcgatgctacgccctgctgccggacgaggacgacgaggagcgcttgcatttcagccgctacgaagaagggacctggagcaaccaggacaacctgttgcgcaacctcgacctcacctatggcccgcgcatccagacatggggcacggtcaactatcgggaggagctagtcgcaatggccggccgcgaggacctcgacctgcgtcaatgcgccatgcgctacggcgagatgagattgcgagaaaacacccagggatggagctaccacccttatttggggttcaagaaatacaactga

SEQ ID NO: 324936 - DNA, 975 bp, Pseudomonas aeruginosa
atggacgacatttctcccagcgaactgaagacgatccttcactccaagcgtgccaacctgtactacctgcaacactgccgggtactggtcaacggcgggcgggtcgagtacgtcaccgacgaaggccggcattcgcactactggaacatccccatcgccaacaccaccagcctgttgctgggcacgggtacctccattactcaggcagccatgcgcgaactggccagggccggggtattggtaggcttctgcggcggcggcggaacgccgctgttcagcgccaacgaagtggacgtcgaggtgtcctggctgacgccgcagagcgaataccgccccaccgaatacctgcagctctgggtcggcttctggttcgatgaggaaaaacgcctggaggccgcccggcacttccagcgggtcaggctggagcggattcgccacagttggctggaagatcgcgtattgcgcgacgccggcttcgccgtcgatgccaccgcgctggcagttgccgtggaagattccgcccgagcgttggagcaggctcccaatcatgagcatctactgaccgaagaagcgcgcctgagcaagcgcctgttcaagctcgcagcccaggccacccgctacggcgagttcgtccgcgccaagcgcggcagcggcggcgacccggccaaccgcttcctcgaccatggcaactacctggcctacggcctcgcggcgaccgccacctgggtgctgggcattccccatggactggcggtactacacggcaagacccggcgcggaggcctggtgttcgatgtggcggacctggtcaaggactcgctgatcctgccgcaggcatttctttccgccatgcgcggcgacgaggaacaggacttccgccaggcctgcctggacaacctgagccgcgcacaggccctggacttcatgatcgacacgctgaaagacgtggcgcagcggagcacggtgtccgcatga

SEQ ID NO: 324937 - DNA, 966 bp, Pseudomonas aeruginosa
atgcgtttggacattgacctaccgaggagtaccatctatctcaccagagagaccggcaggctaaatattttcagcctgaacaacggaactattacggcagaagcaaccgaactgggcagcctgatcaagctagacaatcgctggatatattccgcgaaaaacaacgaccagttcattttcaacgacaggggtgctctgatacgacagaacctacagtcgggagtacagcgcagcatctcctatagtcagaacaagctcttcgtgacagacaacttcggaaactctcttgaactcactcaagacgagaacaaccagccacttggtttccgatcaagctctgttgaagggcgttacgactacagtacgagtgggcagttgatcaagtcccaaatcaccttgaatggcatgagcaaaacacgtctctatcattacgaggacgagcacaatcctcgactactaaccggcctcaccgatgaacgcggcatacgattcgcgacttggtcctacgacgatcaaggcagagctatctcgagcgaacatgccggcggcatggagaagattcaaatcgtctacaacaatgatggttcgactaccgttaccaacgaactgggcaaagtgacccgttatcgattccaaaacctacagggtctccaacgtatcatcgcgataattggcgagccttcggtcgactgccccagtagcaactcatccttcacctataccagccgcggtcaactggccagcaaacgcgacaacaacggcaacctgaccacttaccagtacaacgcccgtggtctggaaacctcgcgcaccgaggccgccggcactgcgcaggcgcgcaccatcacaaccgactggcacccgaccctgttcctcccggtgcaggtcagcgagcccggccggatcacccgctaccagtacgacgccgagggacgcaagaccggcgagaccgtcaccacccgctga

SEQ ID NO: 324938 - DNA, 2670 bp, Pseudomonas aeruginosa
atgcgcatccccccatacttcccccgcctcggcgccctcgccctggcctgcgccctcgccctgcccgcgcaggcggccgagcgcgcctggagctacagctacaacgccctcggcctgatcgagcgcgccgacggtccgcgcaccgatgtgcaggacgtcaccctctatgcctacgacagtcgcggcaacctgacccaggtgaccaacgccctcggccaggtcacccgcctcggcgactatgacgagcgcggcaagcccggcagcatcaccgatgccaacggcgtcaccagcagcctcgcctacaccggcgtcgacggctggctggcctccgtcagcaccgccggcagcaccacccgcttcgactacgacgcggtcggccagatcacccgcgtcacccgtggcgacggcagttggctgagctacgaatacgacgacgcacggcgcctggtggcgatcggcaacaacctcggcgaacgcctcgaatacgacgtcgacaccaagggcaatcgcaccgcccagcgcatcaaggacgccagcggcagcctggtgcgccagcagcaatgggcctacgacgagcttggccggctgctccgtgcggtcggcgccggcggccagacacgcagcttcgcctacgacctcaacgacaatccggtcggcgaaaccaacccgcgccagttcgcccacagccaggccttcgacgccctcgaccggctggtcggccagagcgatcctctcggcggcaagacccaactcgcctacgacgcccaggacaacctcaccgaggtcaaggacccgcgcggcgtcaccacccgctacgaatacgacggcctcggcaacctgacccgactggtcagcccggacagcggcaccaccaccttcgagcacgacgccgccggcaacgtcatccgccgcaccgacgctcgcggtacggtcaccgagtatcgctacgacgccctcaatcgcctgatcgagcgccactcgccgagcgacccgagcctcgacgtacagtaccgctacgacctcaccgccgatggcaacaagggcatcggccgcctgggcgccatcgaaggtgcccgcgacagcctggtgtaccgctacgacgagcgcggcaacctggtcgagcaggtacgcagcatccgcctcgaccagcagaccctgctcgaccgcgtgacctaccgctacgacgcggccaaccaactgctggagatcggctacccctccggcctcgccatcggctacccgcgcaatgccggcggccaggtcgccagcgtgaccctggcagtgggcgacaaggcaccgagcaccctggtcgggcagatcgcctacctgcccttcggcccgctgcagcgcctgacctggggcaacggcatcgccctcagccgcgagtacgaccaggactaccaactgctgcggcagaaggtcggcccctggcagagcgactaccagcacgatgccaatggcaatatccagcagcaccgccacagcctctggggcaccctggactaccagtacgacccgctggaccgcctgaccgaggaacgcggcgtccagggcgggcgcagctacgcctacgacgcggtcggcaaccgcacccaacgcagcgacaacccggcctcaggcggcaccgccagcagccaggactaccagtacgcgcccgacagcaaccgattgaccgccatcggcgcgcaagcggtgaccagcgacgccgccggcaacctcacccaggaccgcgccgcgcgcaaactggcctacgacgcccagggccgcctgcaaagcgtcagcctcgacggccagcaggtcgccgaataccgctacaacgccctcggccagcgcatcgtcaagctcacccccgagagcgtcaccacctacctctacggtcccgacggccagttgctcggcgaagccgaacacaacggcagcggccggaaactgcgagcccagtactatctgtggctggacagcctgccgctggccaccatcgacgccgactacgacgcccagggcaaggtcggcaacccgaccctgctctaccttcatggcgaccacctcgacaccccgcgcctggccaccgacgccagcggccagatcgcctggcagtggcagtccgacgccttcggccgcggcgaagcgctgagccagggcagcacccagatcaacctgcgcttccccgggcagtactacgatgcggagagcgggctgcactacaactacttccgcgactatgatccggagactgggcggtatgtggagagtgatcctgtagaaactctaagaaagctaaacaaccctgaaatgacatttttaaattctggcgagagcatgctgcaagccactccgtattgggaacatggattcacgccgaatcataactacacatactccgataacaatccaactgcaaaaagcgacaagcatggtctttcaccaaaccctacggacaacttgatctacacacctgacaccaactgcacatgtacattagagtgcaagaaaaaatttactggaaatggaaagtctttccttgtgggagctctatgtagcaaagccaccaccccgttctttgggggagtagtatgcaatagcacaatagtaatgatctgcggagcatcttgcagccaagagtgcaatagagcaccaagctgcgaaaaagaaggaagcggcaatgagtag

SEQ ID NO: 324939 - DNA, 333 bp, Pseudomonas aeruginosa
atgagtagcctctacaacataatagcagttctgtgcgccatcacactggtagtattagagctaaaaagaacaacattcataagaactttaaagaaagaagagccaaacgcctgggagaagcttggcaggccatcagggtatttcttatcctatctagtaaaaatagacggattcaagcttgagaaatttatattccgaaagcaatacaatgccttggaaaataacgaaatcagaaaaatagggaggcaactcctctacctgcaatcaactttcctcaccttaattattgcactcatcgccttgatgattttacagtttacaataaaaaactga

SEQ ID NO: 324940 - DNA, 1017 bp, Pseudomonas aeruginosa
atgcagaatcaactaactgccatagatttattttgcggatgcggagggctaacaaccggtctaattgaggcaggtttcagcgtgctcgcatccatagaaatagatcccaaagcggctgcaacatatcgggaaaactatccgaaaataaatcttattgaagatgacatccgcaatgtcaatatcaaacagctactcgagaaaatccagataaatccaggtgatcttgatcttttggcaggctgccctccctgccagggcttcagtaggattagaaaattaaataaaaatcgaccagcaatggatgagcgaaactctttaattgaagagtttacgagatttgctttggagctcaagcccaaacgaattatgcttgaaaacgtccctggcttagcgagccactacagattcaacaactttgtatcgaaactgaaaaaacatggctacttcgttaactttaagatagtagacgtagctgaatatggtgtcccccaacgcagaaaacgcctaatccttactgcatccattgaccacgaaataactcttcgtccgccgcacgaccgaagagttactgtaagagatgcgatctctcatcttcctctgcccggaaactctggcgatgaacttcatgacatcccagagaatcgctccgaaaaggttatggagataattaagaacatccctaaaaacggcggaagcagatctcaacttccagacgaactcgtattggagtgccacaaacaaacaaaggggttttatgatgtttatggcagaatgtcttgggatgacgtcgccccgaccataaccagcggatgccacaatccctccaaaggaagattcctgcatccgatcgagaatagaactattactttacgagaagcctcaatacttcaaggcttcccagaaaactataaattcataacatcacacggcaaagagtccattgctcttatgatcgggaatgctcttccgccaccattcatcaaagctcatgctgagcagctagctcaaagtatttag

SEQ ID NO: 324941 - DNA, 1764 bp, Pseudomonas aeruginosa
atggaagaactaataaaaaaactggacgggatgtcgatagaaaaccactttgacggatttattaccgacgcaactttcccaaacttcaaaaacattgcacctttcacaaaaataacttttgattatccgataacctttctcgtaggcgggaacggctcgggtaaaagctcaattctacacgctctttggggcatgcctctaaggtacagtaccagtagattctggttctccactgcaatcgaccccatccaagagggtggagacaacggtattaatcggtactggtacacacattggtgcaaagagctgaagcaacatcttcaaaccaagaaagttcggggtcgcagacggagtggctactgggagccagcacgggccctaaaaagtgatgggatggatgagctaccagtcgaaatccacccaagaactaaagattaccgctcaaaagatcgctggaatcccgtaaaacgaaaagtccgatatattaatttcaaatgcgagttcagcgcattcgacaaattcttctactttgctaccgacctaaccaacgaagaacgccaagaatcaattaaaaaatctgcagaaaagcttaaaagagtaatttcaaccaaaaggcaatcctataagccgggtggaaaagaagcggtatttatcaaccgaaacctgacagaagaagagctttccgctgtaagtttcattctgggaagagagtactcagaagcaacatatgtactgcatcgactttacggtaacaccgaagctcccagtgtaatattcaaacggaagaatttagtttattccgaggcatttgctggaagcggggagctttcagtagttcgcgccgtaatcgaaatcctagagtgtgacaacaacactcttgttctcttggatgaacctgaaacatcactacaccccggagcgcaaaagcgactcataaagttcatccttgatcagataattaagaaaaagcttcaagtcatcgcatccactcactctcccaccataatcgaagatatgcctcctaaatctattaaggtgatggaggaagcaatcacaggaaaaatgcagcctgtggaggtcacacacccacaggtagcctttaatcgtctcggccacaacaacgaagacaaaatcacagtcacggtcgaggatgatctattatgcaccctcgtcgaaatagcaatgatcgacctagatgcgggagagcaagaagcgatcaaactctacattccgcccgccggcgcttccgatatatttaaaaacctaataccaaatagcttgcacgagaaaagaaatatattcttcattgtagatggcgaccaagagactgatttagacttttccgaggtagagaatctaggaaagaaacagctacacacgctatttacaaatgcaaagaaagcatttaactgcacaccaaactacgtcggcgatgatgatgaagaactcaagcgagagtaccttgtctggatcagagacagagtaagatacctagacagcatctgccctgagctagtacttctacgcgcaatgattggcgatgcggcggctaacaaagcggctaccacaaatcaagctgcgaaggatgaattacgaaagcatttccataaaatccatctccctcatgatgcagcgactcttaggactactgcgaagttgaaattgaccgaagacaggggcagaaacccttccatagtggcaataagagaaactctaaaagaaataatcaagcaacggaagaagaaacccaaggtcaagccttaa

SEQ ID NO: 324942 - DNA, 1425 bp, Pseudomonas aeruginosa
atgaagcgtttcatccaaggcgagcatcgaggccaatgcacactgctgcccgagagactggatgattacgtcgcggacaccaatccggtgcgagtagtcgatgtgttcgtcgatgaactcgatctcgggcggttgggtttcggcggcgtggttcccgccgaaactggccgccctgcgtatcacccggccgtcctgctgaagatctgtatctacggttacctcaaccgcatccagtcgagtcgccgcctcgaacgtgaagcacaacgcaacgtcgagttgatgtggctgaccggacgcctgatgccggacttcaagaccatcgccaacttccgcaaggacaacggcaaagccattcgtggtgtctgccggcagttcgtggtgctgtgccagcaactcagtttgttctccgaagcgctggtggcaatcgacggcagcaagttcaaggcggtcaacattcgcgaccgcaacttcaccagtgccaagctgcaacggcgaatggaggagatcgaatcctgcatcagccgctacctcactgcgctggacactgccgaccggcaagagcctgctgtggcacgggccaaatccgagcgtttgcacagcaagattgccgccctgaagatgcaggaactcagggatatcgaagttcagttggaggccaccccggacaaacagatttcgcttactgatcccgacgcacattctatgatgacgcgcggcactagcatggtcggttacaacgtccaggctgcggttgaggcgaagcatcatctgatcgtgacgcacgaggtcaccaacaatggcatcgaccgcgatcaactgagtgcgatggccaagcaggcgtgggtggcaatgggaacgcaatcgctgtcggtggttgccgatcgtggatacttcaaaagcgaagaaatcctctcctgccaagaggctggcatcaccaccttcgtccccaaagccaagacttcaggcgctgccgcagcgggtcgctttggtcgagatgattttatttacgacacagcccagaacgagtaccgctgcccagcgggagaacgcctgatctggcgttttgcgacggttgagaaaggcctgaagcggcaccgttactggaattcgaattgccaaggctgtgcgttgaaagatcagtgcacaccgagcgcgcagcggcgagtgagtcgctgggagcacgagtcggtgctcaacgcggtgcagtcccgcctggatcaggcaccggagatgatgcgtatccgccgccagacagtggagcatcctttcggcacactgaaggcatggatgggcgccacccatttccttaccaagacgctcaaccgcgtgagcacggaaatgagcctgcatgtgctcgcctacaacttcaaacgggtgctgaacctgctgggcaatagtgcgctgatagcggcaatgaaggcctga

SEQ ID NO: 324943 - DNA, 753 bp, Pseudomonas aeruginosa
atgaaccaggagcagttggcgtcagtaaacctaaagataggcaactgtgactttaagggcgcagccgacgaaatgttggcgattgccaaatctttatccgagtccggcagtgagtctttgtctgattttttagccagctatgcgcacggcttggcgggaaggaaatctgacaccagcaagttttcacagagcctcaaggataaaattgagaggggtgaaaaagacctgtcggacaagggagatcaggtaaatactctcatgcatgaggtatatggctattttctggaatttgagaagatatccatcctccagaatgcgctgctattgcgccccatgtttttcaggcttgagaatcgggaaaatttcccgttcattgaaaagtttgttaatggtagcgacacttatataacgggtgagaatttttacgaagtattcaagaagcaaattaatttctacttaaatctgagtgcgtatggggagaagtcagttttacatatagggcaaaggaagaccaatattgctaaagggaaatactggaagttcgtcgagcttagtggccagtataaacaaaaaatatcctgccttgatcgggttcaggttttgctagatgagcaagagtccttggaaaaggagttgacgggacttagaagcaagctcagaagtaataatgccgctgctcatttgtctcaatcagagtttaatagggatttagagtcatttatgactggtttggccactgaagagactaaataa

SEQ ID NO: 324944 - DNA, 1866 bp, Pseudomonas aeruginosa
gtgtcgagcaaggatgaaaataagaagaattcgctgatggatctggcgactctggacgattttgcacgtatcaatccagcctcaattatggcgatgagtaactcgttgcactttcataccctggagcatacgtttagagaggcggcccagaccgcaaaaaacgctggcgatgtcgctgcttttagggcattcaacgtcttggcggttgtctgtagctaccacttcaatcccagtagaccagataccttctctccccagatcatttttaagggcaagcggacgcttattccgagtgattacctaggcgaacaacagggaattcttgtccagatagccgagcagattgaccatccattgcttcgggctcggatcgctgatagctgttggcacgtcaaccgaagactccatgctgtcgccgcacttgccgcgagttcgtatttgaatgcggtagagctctttttcaaaagagagctgctcgatcaatacgagtcagattttgcggttccattcaaggtagttgatctcattgatcgggcgtttgctatttacgccttagctggcaagcagaaagagatcccggagagtgccaaggatgtgctgaaactggcctatgaaacagccaaggacaatgagtgccttgtcgccttcgtgaagttgtcatccattgcccagacctgtgggttacttgagtggcaagacattgctggcgcagcagaagcgatagcgaacgccacgaaagataagctgtatgccgatgccgttaagagggtgtggctccaagcggctcgtgcttatctcaagatggacgacaaggaatctgctgttagatgcagggtgaatgcggtcgagcagacgctgcgaatgcgggacgcagtcagctccgccatggcaaaagcctcatggacacgcagcgctattggtgaactccgtgcaattggcggtatggcggtaagagtcgagagcctcaagatagaactccagcagtacgaagaggattcgctttccgagtttggctcgttcagtgtgccggtggacttaacggatgagcgccaggcgacgatagaggaattcgagtcacttgatgttcacgaaatgctgcttaggttggcattcacatgtcgtgccccagaaaaaattgcccttcataaaaactgcctggagaagagagaaaaatacttcttttcgtcgatgtcgggtaagtcctatgctgacgaacgaggaaaggtgatcgcgacagcgccgcctgtgcctctaggtagtcaaccgccagaggaatggtttgctcacgaaagccttagtgaagcggggcttcactaccatattgcgacagaggcctttattcggccagcgtgcataacgatgagccgttgtcagctcattgatgagcggcattttgagcccattgtctgtagcagtggattcgtgccgccagggttcgaggcaattttctcacagggcttttctaagctagtacagggggacatggtctcggcagctcacatgttgatcccgcaacttgagaacgcccttcgacatgtgctgaacaatcgtagatcgaataccgccaagctaaatgtagatctcacgcaggaagatcagtcgctcaagcagttgctctcgaactactggagggaaatagagcaggtgttcggggtagataacacgtatttattccacatcctgttcaacctaaagggtggccctatgctaaggcacgaagtggcgcacgggaagctctcaacggcgcaatgctatgagccttcatgcatatatgcgtgttggtttattttccaccttacgtgtgttcctctagccccgcagtggaactcagtaatggcaggagcgattcaagaaaatgcgagctaa

SEQ ID NO: 324945 - DNA, 702 bp, Pseudomonas aeruginosa
atgaatagaacagacgtaaccagggggattaataagacctgggagatcgcctcaaagttaaatttgaacgagtcctttgcaaacgctggcttactgcctttaaacgaagaatttagagatctaatactttcctccaaaactacttactcaagtgtttatgtggcaggcctcagtttgtcgcactataacatactgctaacagactactcgtactttcagtttagctgggatcgtgaaaattacgtacgctatgcgtactaccctaatccatttatttccggaaaggataatgagctagagtcgtttagacgcttgcaggagctagtagagtccgggctattgcagcacgaggaatatctaacaattctttcagaaaggtctgcaatgagtggtatacctatgctcaggtatgaaaatgctccagaccaaagaaagaagtttgcacatccgtgctcgcactttcatattggctttcactcggaaaacagatggccagtcagacgcatattgactccctacgctttttcactattggtattcaaaaactattacggtagtttttggagagcatctggagataatggggaaatggaagaaggcaacagccatgaagaagagctgatcagtgaaaaagcattgtgccggctcgttgattatatcaattttgaagagattgaggaaagatcattctatttcgcgtaa

SEQ ID NO: 324946 - DNA, 2136 bp, Pseudomonas aeruginosa
atgtcaatagatattctggtaactaccgacagactaaacaaagatccgctaggtcgagaattcattagctatatagaaagtaatagtgaccgattaaacctggcgggaagtgctctttattacgattttccggcatactccgactacgacacggtaactcacaagccagatgtgcttatacttagtcccgcccacgggattttagcaatacgactaataaacctggcgagactaaatcaaggtgcactctcacaagccgatgagtcacttaatcaattctgcagcatactgattggccgcctgctaaaaagcaagccactaagagaagggagatcaaagctttcctttgaagtcacacccgttatatattgcgatcaaaaaacagatgtattacccgaagatcttgattgtgagctcgtgtcgtcgtatggcgcatttgaagccttaattgaaaaacttaaagacagagagtctaacgcagagactctttcagagattcgatctgttctggaaggtgcaaaagcgctaaccagagcctccaaaaggattgttgaagatccggaagttacaccagcagctgccgccctagccaaacttgagtcagaaattgccaactttgatcagaagcagagacgggcagcacttgtaacaatagatggccctcaacgaatacgaggcctggccgggtcgggaaaaacggttatcttggctatgaaggcagcacaccttcatatgacaaggcccaacgataaaatactggtaacttttttcacaaaaagccttagatcaccgattaaagacttagtaacaaagttctataggcattacaaagagattgatcccgactggaacaacatccacataaggcatggctggggaggtagcaatagcagcggaacctacgcagatgcttgcagaagatcaggtagaatgccccgctcatatagttcagcaagggatgctgcgcccaggggagtcgagccatttagcttcgcatgtgaggaattgatcaatagcgctcaaagccttgaatactacgaccatatactcatcgacgaagggcaggactttccagacgggttttataaactttgctttgaactggcaaagggcgatagagacaaaaaaaatatagtatgggcatatgatgagctgcaaaatattctaaatgtaaaaatgcgctctccagcagagctattcggacaggacgatgatggagagccccgtatctctctagctagggccgaaaagaatctaccgcctggagcaactaacgatacagtacttagtaaatgctatagaaaccaaagaaaagttctcgtagcagcacatgccctagggtttgggatatattcaaatattgttcagctacttgaaagccctgatcattggcgtgacgttgggtatgatgtgctaacaccagattttcaagtcggaaatgacattgaaattcttagaccagtagagaatagccctgtagcccttgatacggatggcctcccccctttaataggtaacttcatagcaagcagttttgaaaaagaaataagctggataactaaagagataataaactttcttgatatgggacttcttccggaagatattattgtggtggcgttagatgaccgtcacatgagaaattatttccgttatttgtcagaaagtctcgcatcgcatgaaatatcagtgaataacatacatgcagacccctattcagaaccgccattcagtataagcgggaagatcacgctatctacggtgtatcgtgcaaaaggaaacgaggcggctgtggtttttgcgctaggtgttgatgctttgtctttacgccttcgcgctgatagaaacaagattttcgccgcttttacaagaacaaaggcatggctcagggtctcaggacttggtgattcagcaagaagagtagcagtcgaaatagacactgcccttaggaacttcccacaccttaaattcaaaatgccagacatttctgaaattgaccttatacaaagggatctaagcaagagaagtattaaggccaagaaaatcaggaatgaatatatacaaaaattgaaggacgaaggcttcaccgaggacgaaatcgcagacattctttctctggaggagaaagatgaatag

SEQ ID NO: 324947 - DNA, 561 bp, Pseudomonas aeruginosa
atgaccgccgaatcgccgacgatccgcctcgaacgctacagcgaacgccatgtggaaggcctcaccgccctgtacaacgaccccgccgtggcccgccaggtcctgcagatgccctaccagtcggtggagcagcgccgcaagcgcctgcacgacagcgcggacgacgaccgcctgctgatcctcgtcgccctgcaccagggcgacgtcatcggcagcgccagcctcgaacagcacccgcgcatccgccgcagccacagcggcagcatcggcatgggcgtcgccgtcgcctggcagggcaagggcgtcggcagccgcctgctcggcgaactgctggacatcgccgacaactggatgaacctgcgccgcgtcgaactcaccgtctacaccgacaacgccccggcgctggcgctgtatcgcaagttcggcttcgagaccgaaggagagatgcgcgactacgcggtgcgggacgggcgcttcgtggatgtgtacagcatggcgcgcttgcggagggtcgaggggctgtctcttatacacatctccgagcccacgagaccgtactag

SEQ ID NO: 324948 - DNA, 723 bp, Pseudomonas aeruginosa
atgctgttcaccgcgccgaagcgcgacaccacgtcgcccaggtggcgcttctcgaaatactgcgcgggcagccgcagcaggtggctgaagacgttggcctgccactgcacgccgagcagggtgctcatgtgcatcatcacccaggcgcgcaccccgctgaccgcctgctgcatcagcagcaacaggccgaagccgatggccagggtgctgagcaggtcacggtcttcgctgacgatgacgttgtcgatggtccattgcaggaagaacggactgatcagcgagaacacttccagcgcgccggcgagcagcagcacctgggccagcgagcggtacagcccggtgaccttgccgagcatgcccagcagcttgatccgcggcggcgcctcctgtttctcgaagccgctctccggccagagttccagggctaccccggtgaagctccgcgagacttcctccaggcccagccggcgctggccgtgggcggggtcgtggagcaccgcgccgcgcccgtcgaccgccttgagcacgacgaagtggttgaagttccagtgcagcacgcagggcagcttgagcttgccgaggtcgccgaggtcgagcttcaccgcgcgggtgcccaggccgaggcggtgggcggtctggatcagttgcttgagggagatgcccttgagcgatacggagaagcgccggcgcagttccatcaggccggtatggtggccgtggtag

SEQ ID NO: 324949 - DNA, 1257 bp, Pseudomonas aeruginosa
atgtttcgccaggaagccctcgacgcccagcatgccggcggcctgggcgagatcgtgctgatccgcccggtctccttcacttttctcaccctgctggccgcggcgatggcgctgctggtggtgggcttcttcctgttcggcagctacaccaagcgcagcaccgtcagcggccaattggtgcccgccagcggccaggtcaaggtgcacgcgccgcaggccggcatcgtgctgcgcaagttcgtccaggaaggccaggcggtacgacgcggcgagcgcctgatggtgctttccagcgaacgctacggcagcgatgccggcccggtgcaggccggtatcagcaggcgcctggaacaacgccgcgactccctgcgcgacgaactggaaaagcttcgccgcctgcaagacgacgagcgcgacagcctgaccagcaaggtctccagcctgcagcgcgaactcaccaccctcgccgcccagaccgacagccagcgacgcctgctggcgctggccagcgacgccgccgcgcgctaccaggggctgatggacaagggctacatctccatggaccagttgcagcagcgccaggccgagctgctcggccagcgccagaccctgcaaggcctggagcgcgaacgcacgtcgctgcggcagcagttgaccgagcgccgcaacgaactcgccgggctttccgcgcgccaggccaaccagctcgcggaaacccgccgccagctcagcgcggtggagcaggacctggccgaaagcgaagccaagcgcaccttgctggtcaccgcgccggagagcggcatcgccaccgccgtgctcgccgaagccgggcagaccgtcgacagctcgcgtccgctgctgagcatcgttcccgccgacaccccgttgcaggccgaactctacgcgccgagcaagtccatcggtttcatccggccgggcgacgcggtgctgatccgctaccaggcctatccgtaccagaagttcggccagtaccacggcaaggtgcagtcgatctcccgcgccagcgtctcctatgccgagctttccagcatggtcggcggcgtaccggggctcggccaggatggcgagcagctgtaccggctgcgggtaaccctcgacgaccaggcggtgaccgcctacggccagccgcgtccgctgcagagcggcatgctgctggacgccgacatcctccaggacacccggcgcctctacgaatgggtgctggaaccgctctacagcctgaccggcaaactctag

SEQ ID NO: 324950 - DNA, 1257 bp, Pseudomonas aeruginosa
atgatcacggcatgcccccgcccgtgcgcctggcgcagctatgcgcttggcctcggcctcctgcccctcgccgcgcaagcggaattcctcgcggacagcagcgcccacctcgacctccgcaacttctaccagttgcgcgactaccgccagcacgatgcgccccaatcgcaggccggcaactggtcgcagggcttcgtcctgcgcctgcaatccggtttcaccggcggcccgctcggcttcggcctggatgctaccgggctgctcggcgtcaagctcgactcgggacgcgggcgtagcaacgatggcacgctgccgttcggagcgaattcgaaggagccggtggacgactacagtcacctcggcctgaccgccaagctgcgctattcgcagacccagctacaggtcggcatcctcatgccgcaactgccggtggcgttccgcgacgacgtgcgcctgttgccgcagaccttcgacggcgcgctgctgacctccagcgagatcgagggtctcaccctcaccgcggggcaattgtggaagtcgcgcacccgcgagtcggccggcagcgacgacatgtacatcatgggccgcgacaaggcccacgccagcgacgagttcaatctcgccggcgcgacctacgccttcacccctcggctcagcgccagctattactacggccagctcaaggacatctaccggcagcactatctcggcctgctgcacaccctgccgctgggcgaagggctgtcgctgcgcagcgacctgcgctacttcgacagcggcgaagacggcgcggcgatctccgggccggtggacaatcgcaacctcaacgccatgctcaccctgcgcgccggcgcccacgccttcggcatcggtgtccagaagatgatcggcaacgacgcctttccggtgctcaacggctacaccacgccctacgtggccaacctcatggcctaccagaccttcacccgaccgcaggagaaatcctggcaactgcgctacgactacgacttcgccggcctcggcctgcccggcctgaacctcatgacccgctatgtacagggccgcgacatcgaccgcggcgccggccgcgccgacgacagcgaatgggagcgcaacaccgacctgtcctacgtgatccagagcggaccgctgaagagcgtcgccttgaaatggcgcaacatcacctaccgcagccgctacggtgcggacctggacgagaaccgcttcatcgtcaattacacgctaaagctctggtga

SEQ ID NO: 324951 - DNA, 1191 bp, Pseudomonas aeruginosa
atgcgcagggtcaggctggcggcgccgatcaggcgcccgccgcggttgtccaggctggcggcggcgagggtgaaggcgcggtcgctggagatttccccgccggcgccgttgtccaccacgccgagctggcgcagcagcagcgcgccgggcgtggcgatcaggccgccgtcgcggttgaccagcgtgccgccattgaggtcgagggtgacgccggtttcgctgaccaggacgccgcctccgcgctggtcgaggcctttcaggttggcgtcgagcaggcccttggcgctgacccggccctgctggccgttgtccagccgggcggccaccagggtgatgccggcgttgctgccgatgccgccgttgcggctgttgtccagcacgccggtgcggatatccaccgcacccttggcgctgatcacgccggaacggctgttgtcgaggctggcgcccttcagcgtcacgccggcatcgctgagcagcctgccgccctggttgtccagcgcggcctggctggtcagcgccagcgcaccggcgctggagaaggttccgccacggttgtccaggcgcgcggcgcgcgccgtcaggctgccttcgctgaccagcgcgccgccctggttgtccagcacgccgccgaggctcacgctcaggctgttctggctgtcgagccgcccgccgccgccgttgaacagttcgccgccgtccaggctcaggccgtcgcgcccggccagcacccccttggcctggttcagcaggcgctgcacggtgaggcgcaggccgctgtcgccgatgaccttgccgccgcggttgtccagttgctcgcgggcgttcacggcgaccttcgaggtgctggaaatctcgccggcgcggttgtcgacctgccgcgcctcgatagcgatgccgccattcgcggcaatcagcccggactggctgttgtcgagcacgtcggcgcgaaggtccaggctcccctggctgaccagttcgccgccttgctggagcagcgtaccgaccgccgcctccagcacgcctctggcggcgatacggccttggttgccgttgctcacctggtcggctacaagctccaggcggccttcactcaccaggctgccttgttcggcgttgtccaggctggtcacgctgatacgggcatcgcccttgctgccgatggttcccgcacggttgtccaagacctga

SEQ ID NO: 324952 - DNA, 1140 bp, Pseudomonas aeruginosa
atgtctctgactgctgagcagtccggcattgccattgaacaattcggtaccactcaggcgcagcccatcgcggctggcgattactcccttgtcctggttgagcacgcgtggcgcggtgatgcccagaccactgtcagcaacgactttgccgccacggttgtccagttgctcagtgagattcagcgtcgccacgccctggctggcaatctcgccggcacggttgtccacctgccgggcatcgatgaccacacctcggttgccggcgatgcgaccagcgccgttgtcgactttgtcggcgtcgagggccagcgcgccctgagtcgtcagctcacccccgttctgcaccagcgcaccgagtttggcacgcagatcatccttggcgacgatacgccccttggaattgttcgcctcatcggctaccagcttcaggccgcgttcggcgatcagcgtgccagcgtcgttttccaggcgggtcacaccgatatcgatggcgcccttgctgccgatggagccactacggttgtccaggacgaatgcctggatatccagacctccggcaccggagacaatcccctcgaggctgttgtccagggcctgcgcgatacgcaaggtcagggctccgccgctgagcaggcgtcccccctggttattcaacgcggaggtggcaagagtgaacgcgcggtcgctggagatttccccaccgctgttgtccaccacgccgagttggcgcaggagcaaagtgccaggcgtggcgatcaggccttgagcgcgattgaccaggcttcccttgttcagatcgagcgtgatgccggtatcgctgaccaggttgcccctgtcatgctggtccagcccttggagagccgcatcgatcgcacccttggcggcgatccggcccgcctggctgttgtctacccgagcggcgaccagggtgagtcccgcatcgctgccgatactggctttccggctgttgttcaggttgccggtacgaatctccacggcccccttgccactgatcgcaccggcctggctgttgtcgaggctggcgctgctcaagctaagtccggcgtcgctcgccagtctgccgccctgattgttcagggcgccctggctggtcactgccaatgcccctgcgctggatag

SEQ ID NO: 324953 - DNA, 3048 bp, Pseudomonas aeruginosa
atgctcgtcgccacataccagcgcaatcgcctcaggcgccaacgctgcctgatgcgcgaaggccgccgcgacgccgccgcgcggcagcgcctcgagcggtgcctgccaatcccgcagcgcctcctggcgctccccggcgtcgagcagggcgagctcgcccagcgctgcctggggggtctcggccatccgctgcagcagatgcagcaggtgacggtccagttcggcgatgtccgctgcgtcgaaatcgcgccgcgcatagacgtactgcaggctcaggcgctcacccagggtgacacccagcgtcagcgggtagttggtctgctcgtggttgcttggcgtggagaactccagatcggcgggagcctggcgcagagcctcggccacggggaagttctcgaacaccaggatgctatcgaacagagcctcgccgccatgcccggcccagcgctggatgtcgtacagaggcgtatgctcgtgttcgcgcagcgccaggttgagcgcctgcatcccctgcaggtagtccgcgacgctctgctgtggctgcggcgcggcgatcaccggcagggtattgataaacagaccgatctgcgcctcgatgcctggcagttccgccggccgtccggccacggtggcgccgaaggctaccgtctcctgcccgcagtgccgctgcaggagcagcgcccaggccgcttgcaccaaggtgttgagcgtgaccttctgaccttgggcgaaggacgccagttggcgggtcgtctgcggatccagttcgcgcagatgctcaccctggccagtctgctccgtcctcgcctgacgcgccaggcgtgtcggcatctccagggaggccagccgatcgcgccagaaggactcggttgccttcgcatcgcggctctgcaaccaaccgatgtagtcgcggtagcgcccaacggtagcggctacctcctgccccgcatagcgctgcagtacctcggcaagcagttgggcgttgctccagccatccatcaggatgtggtgataggtatagatgaggtgcatccgcccattcgccagcggcaccaacaccaagcgttgcaatggcgccctggccgggtcgaaaccggcttcgcgctcagcctctgcctgccgttgcggatcactgcctggcagggccagccgcagctccagcgtcgcctgctcgaataccacctgcaacggctgaggccagccgtccttccagaggaatccgctgcgcaggatctcatgggcatcgagggtggcctgccaggctgcgcggaagcgatccgggtccagtccgccgatatccatgcgcaattggttgacatagtcgccttccgctccatgaagactgtgaaacagcatgccctgctgcatcggcgacaacggatagatgtcccgcaccgaatcaggatccaaggacaatccatcgagctgcgtctgggaaagcccggccagcgggaagtccgacggcgtcacgccccgatgccgcgggtcgagacaatgctcgatcagcgcgtgcagctcccgcgcgtagtcatcgaccaggcgctggacggtcgcctcggcgaacatttcccggctgaagctccagtgcaggctcagctcgccgccgtagacctggccttcgatgctcaaccagttggccagcggggcgcacggatcctgggcggcgccggcgctttccgtggccggtaccagcagcgccgctccatcgaactgacggtcgaaccggcccaggtaattgaaggtgatccgcggctgcggcagtgcggccaggcgggtcgcagcctcctctccagccaggtagcgcagcaggccgtagccgacacccttgtccggcacgccgcgcagttgctccttgatcgccttcagcgactcgccgaggtccgcggccggggtcaggcgcagcgggaacaggctggtgaaccagcccaccgtgcggctcagctcgatggcctcgccgaggtcctcgcggccgtgcccttcgagctgcaccagcacgctggcgtcgccgctccagcggcaggtcgcgcgggccagggcggtcagcagcaggtcgttgacctgggtccggtaggccgccggggcttcctgcagcaactgccgggtacgctcggcgtccagggtcaggacgagcttgcgctcatggcggttttccagggcgccgtgcgggttttcgcatggcagcgcatgcggagcgtcgtgcagttgcgcctgccagtagtcgagttcgtccaggcgcgcgccggcctgttcgtgcaggtgccggctccaggcctggtaggaactgctacgcggcccgagatcggcgtcgaggtcggcatagagacgctgcaggtcttccagcaggatgcgccaggacaccccgtccaccgccaggtggtggatgaccagcagcaggcgctggctgccgtcggccatgtccaccagcagcgcacgcagcagcggcccctgttcgaggtcgaggctgcgctgggcttcttcgcaaagcgccagcaacacctcctcggaccccgcctgccggcgccacagcggctcgccggcctgctcggcgtaggcctggtgccaggcgccgcgctcttcgcggaaacgcaggcgcagggcatcgtgctgcgcctgcaggcgttccagggcacgccccagccggtcgccgtcgagcggctggcgcgcctgcaacaagagagactggttccagtgctggcggttgggaatcgactgctcgaagaaccagcgctgtaccggcgccagcgccacctcgccgcttgccggaccctgttccgccgtcgccgcacccgccttggccgccagggccaggctgcggatgttctggtgctggaacaggtcgcgcgggctcagttgcaatccggcctggcgcgcacggctgactacctggatcgagacgatcgagtcgccgccgaggctgaagaagttgtcgtccaggccgacccgctcgacgcccagcaggtcctgccagatttccgccagggttcgctccactgcgttgcgcggtgcgctgtagcctgcctgcgccacgcttacttcaggcgccggtag

SEQ ID NO: 324954 - DNA, 1491 bp, Pseudomonas aeruginosa
atgtcgcaagcgaatgagttgttgatcggcgctggccccgatggccagccggtaggacaggcctggcgcctggccaaccgtcatggattgatcgccggcgccaccggtaccggcaagacggtgaccttgcagcacctcgccgaatccttcagcgatgccggtgtcgcggtgttcgccgccgacatcaagggcgacctgtgcggcatcgccgcgccgggcaacccgcagggcaaggtcgccgaacgtatcgccagcatgccgtggctgaactaccagccgaaggcctacccgaccacgctctgggacatcgccgggaagaccggccacccgttgcgcaccaccatcagcgagatgggcccgctgctgctggccaacctcctggagttgaccgatagccagcaggccgcgctgttcgccgccttccaggtggccgaccgggaaggcctgctgctgctcgacctgaaggacctgaaggcgctgctcaaccatctgaaggacaatccggaaatccttggcgaggaccgggcgctgttcactggcgcttccgggcaggcgctgctgcgccgcctggccactctggagcagcagggcgccgaggccttcttcggcgagcctgccctgcaactggaagacatcctccgccccgagccggacgggcgcgggcgcatccacctgctcgacgccagccgcctggtgcacgaggcgccgaaggtctacgcgactttcctgctctggctgttggccgagctgttcgagcaactgccggagcgcggcgatgccgacaagccggtgctggcactgttcttcgacgaggcccacctgctgttcaacggcacgccgaaagccttgcgcgaccgcctggaacaggtggtccggctgatccgctcgaaaggcgtcggggtgtacttcgtcacccagtcgccgggcgacctgccggacgatgtcctggcccagctcggcctgcgtatccagcatggcctgcgcgccttcaccgccaaggagcagaaatcgctgcgcgcggtggccgacggtttccgcccgaacccggcgttcgacaccctgggggtgctgaccgaactgggtatcggcgaggcgttggtcggcaccctggaggaaaagggcacgccggccatggtccagcgcgtcgcggtggcgccgccctattcgcggatcggcccgctgagcgacagcgagcgcgctgaactggtccagcggtcgccgttgaagggtcgctacgaccagccgatcgatcgcgagtcggcctacgaggtgctggcgaacaaggcgggcgccaagcccgaggtccagggccaggcgactgctcagcaggaaagctcgtccggcgtcggcggcatggccgggcagattctcggcagcctgctgtccaattcgacggtgaagagcgccatgcgccaggcggccaaccagttgagccgggagctggtgcgtggcctgctcggctcgttgatgggcgggaagaagcggcgctga

SEQ ID NO: 324955 - DNA, 1890 bp, Pseudomonas aeruginosa
atgatcaaaagtctgaagttcagccacaagatcctcctcgcggcctccctcgtggtgttcgccgctttcgcactgttcaccctctacaacgattacctgcagcgcaacgcgatccgcgaggacctcgaaagctacctgcgggaaatgggtgacgtgacttccagcaacattcagaactggctcggcggccgtctgctgctggtcgagcagaccgcccagaccctggcccgcgaccacagcccggaaaccgtcagcgccctgctcgaacagccggccctgacctcgaccttcagcttcacctacctcggccagcaggacggcgtcttcaccatgcgtccggacagcccgatgccggccggctacgatccgcgcagccggccctggtacaaggacgccgtggcggccggcggcctgaccctgaccgaaccctacgtcgacgccgccacccaggaattgatcatcaccgcggcgacaccggtgaaggccgctggcaacaccctcggcgtggtaggcggcgacctcagcctgaagaccctggtgcagatcatcaattcgctggacttcagcggcatgggctacgccttcctggtcagcggcgacggcaagatcctggtgcacccggacaaagagcaggtgatgaagaccctgagcgaggtctacccgcagaacacgccgaagatcgccaccggtttcagcgaggccgaattgcacgggcatacccgcatcctcgcctttacccctatcaagggcctgccttcggtgacctggtacctggcgctgtccatcgacaaggacaaggcctacgccatgctcagcaagttccgcgtctcggccatcgccgccgcgctgatctccatcgtcgccatcctggttctgctcggcctgctgatccgcctgctgatgcagccgctgcacctgatgggccgtgccatgcaggacatcgcccagggcgagggcgacctgaccaagcgcctcgccgtgaccagccgcgatgaattcggagtgctcggcgatgccttcaaccagttcgtcgagcgtatccatcgctcgatccgggaagtcgccgggaccgcgcacaaactgcacgacgtctcgcaactggtggtgaacgcctcgaactcttcgatggccaactccgacgagcagtccaaccgcaccaacagcgtcgccgcggcgatcaacgaactcggcgccgccgcccaggaaatcgcccgcaacgccgccgatgcctcgcaccatgcgtccgacgccaaccaccaggccgaggacggcaaacaggtggtcgagcagaccatccgcgcgatgaacgagctttccgagaagatcagcgcctcctgcgccaacatcgaggccctcaacagccgcacggtgaacatcggccagatcctcgaagtgatcaagggcatctccgagcagaccaacctgctcgccctcaacgccgccatcgaagccgcgcgcgccggcgaggccggacgcggcttcgcagtggtcgccgacgaggtgcgcaacctggcccatcgcgcccaggagtcggcccagcagatccagaagatgatcgaagagctgcaagtcggcgcccgcgaggcggtggccaccatgaccgagagccagcgctacagcctggagagcgtggagatcgccaaccgtgccggcgaaagcctgagcagcgtgacccggcggatcggcgagatcgacgggatgaaccagtcggtggccaccgccaccgaggagcagaccgcggtggtcgactcgctgaacatggacatcaccgagatcaacaccctcaaccaggaaggcgtggagaacctccaggccaccctgcgcgcctgtggcgagctggaaacccaggccgggcgcctgcgccaactggtggacagcttcaagatctga

SEQ ID NO: 324956 - DNA, 144 bp, Pseudomonas aeruginosa
atgccgccgaagtccagcgagttgatgatcttcaccaccgtctgcaggctgaggtcgccgccgaccacgccgaacggctggccgccctggcgcgccgggctggcgatggtcagtaccagctcgtggatggccggctccatgtag

SEQ ID NO: 324957 - DNA, 1035 bp, Pseudomonas aeruginosa
atgcctcgcttcgtactacttattttcgccctggtgctcgcatcggcggcccacgcggacttctaccaatggaagatttccatccccggaaagcccacggccttctttccatcctatacggcggcgtgccagtactacttcgataacacgtcggccaactggctaaagaaaatcaacaagctgagctacgacgtagttcagtgcagtgtttcgggtactggcggaattacctgggagccgtcggctgccatcttgaccggcgacagttgcccggaaggcacggacttcaataaagagatcggcgagtgcaaggaaaacaagtgcgaaatcctggccggctcgctctacgaaaaatcccatcaagcgccgatctcccgcttcatcaattacctcggctgcgagatcgccgtcagttcgattgacggttgtatcggccccgctgagggtcaagccggcgcgacgtactgcaaggtcatcggctcgttcaccggtaactggttcacctccaatggctcctgtgcctttggctgcgacgtgggcccgggtgacggtccgcctccgggtggggacggcggcggtgggggcggtggcggtaacaacccctgtcagggccatgttggcagtgactgcggcaccacgcccggcggtgacggcagtagcggcggcgatggcgacgggtccggctccagcggcgggaccggtggcgatggcggcgacggctccggcgggggcggcctgaaagagccgaagcaaggctccttcgacaagaccatcaaggaatacgacgacgccatcgccaaggcgcaaaaggacttccaggaactgcaaggcaagttcgaaagcgtcctcgcttccaagttcgatattcacctgggcaccggcggtggctccctgccgtgttgggactttaccgccctcggtcagcgctacgacgtctgcctcacccagtacgcccaagaactctccgtcatccgctacgtggtgctgttcatcgccgcgatcctggccggatggatcgttttctatcgctcctga

SEQ ID NO: 324958 - DNA, 2514 bp, Pseudomonas aeruginosa
atgactgtgcttcgccgccttgaccacgaagttgccgggcatgcccagctcgatgttgccgcccttgagggtcaggtaggcgccgccgcacatcagggtgatgtgctccttcgcggtgaccagcacgtgctgctggctggcgctgacctccacgctctgctcggcttccaggcggatgtcgttcttctgcgcctgcagcagcatcggcccctggtgggtgatctggcgcagctcgccgccctgggcgaacaggccgatgtcgctgccggcgttgatcaccaccttctgcccggcggtcacctgctggttctgccgggccacgctgtcgacgtgctcgccggcggccagggtcaggctcgccggcgtcgccgcggcgatccctgccggaccgctcaaggcgatcgccggcttgcctccgttgctcttgccggactcgtcgttggcaccgtggccgaggtcgcgcacggcttcctggagggtttgctgcggcgccgcgtcgtgccccacgccctggtgctccccggcatagtcgcccagctcgcgggccagcttcagcgccgcctccagcacctgcaccacgacgcctcggtcgagatggccggcgccggccctgagctgctcctcggtgctcagcagcagccccttggccgcacgcaccgcgccatgttcgtcggtgcgcagttcgaagccctcgccgcgcggcttgccgccttcgggccgaggatgggtcaggtagcccaggtgcagcgcgctggcaccgtggtcgctcatcagcgccgcactgatctgcgccgtggtgtcgtcgatgcgcagctcgttggcccggctgcccttgtactccttgctcttgatggtgctgaggatcttgtggtcgggcagcgcgtagggcggccggttggtcgcccggtaggtacgcccggtgacgatcggctggtcgcagtcgccgtccaggtaatcgacgatcacctcctggccaatccgcgggatcgccatgtgtccccagtcggcacccgcccagttctgcgcgacccgtatccagcaggtactgaactcatcgtgacgtccctcgcgatcccaggggaactggactttcacccgtccccactcgtcgcaatggatctcttcccctgccgggccgactaccgtcgcgatctgcggaccatcgatacgcggccgaggcagcggtgcgggacgccattcgacgtcctcgggcaccagttcggcgcgcaggtcgtagctcacccccagaggggcgtcggcggactcttcctcctggccggcatactgggtgccgcgatggaccacccgcaccggccgccaccaggcgttgaagtcggcacgcggatgaccttccagggcaaaggcgtggcccgggatcagccgcgggtcgtcgccgctgaccgatgccacccgcgcatcgcgccggtgccctctgaggcggctttcggtgaaaggccggccggcgccgctccgcttgtagcgaccggggtagtcgtagcgctcgtaggacgagtcctgatgctcgagcgcctcgccagcgagatgatgctcctggtcgtaggtcgggcgcttgaagctgtagtcccgctgggtctgtcgagccgtacgaacattttcgctgtagcggaaagaatgaagcaccggctgcgggttgtcgccctccggctgggcgctgaacagtaccgggccgccgacgatacgctcctggacgtagagccggtcgctgcagaccagggtgtggcggtgttcgtcgaagcggaagtagtagaccaggccttcctcgaaggccagccggtcgtgcaggtagtgatcgctgtcgccggcctgcacgcagtattcgcgtggcaggtgctcgtggtagatacgctgttcgtagtcgagcacccggtgctccttgagcagcgcctggagaatctccggaacactcttctcctggaatatccgccagttgcagcacagctccaggcgcgccaactgcggttccagcagcagttcgtagcgggtccggcgaaaacccgagctgccctgggtgaagtggctgacgatgccatggacgtagcgggccggacggccctcctgccagagggtgaaggtgcccggctggtcgagtacctgcctgaaatcgatggcgttcttgtcgctggccagcttcaggttcaggcggaaaggctcgcagagcgcttcttccagttcgaactcgacgacatcgaacgcgagtttcccttcgccgacgacgaaggtgaatttcaggtccctttgacgcatggatcgttccttgttcctggcgggcggttcctcccccatccgttggagaagcgagccccacgttactcttgctcagccgctgccgaaagtcttggctcggtgtctatttcgcgaagtagcggacattttcggctcgacggagaaccggccgtacaggtgtacgaccggtgtgcctgtcaactcaccctgcgaccggcgagcgccagtcgtcggagccggaggtgccggagacttcgtgggtccaggtga

SEQ ID NO: 324959 - DNA, 519 bp, Pseudomonas aeruginosa
atggcaacccccgcctatatgtccatcaccggcaccaagcagggcctgatcaccgccggcgccttcaccgaggactcggtcggcaacacctatcaggaaggccacgaagaccaggtgatggtccagggcttcaaccacgaagtgatcatcccgcgcgacccgcagtccggccagccgaccggccagcgcgtgcacaagccggtggtcatcaccaaggtcttcgacaaggcctcgccgctgctgctggccgccctgacctccggcgagcgcctgaccaaggtcgagatccagtggtaccgcacctccgccgccggcacccaggagcactactacaccaccgtcctggaagacgcgatcatcgtcgacatcaaggactacatgcacaactgccaggacccgggcaacgcccacttcacccacctggaagacgtgcacttcacctaccgcaagatcacctggacccacgaagtctccggcacctccggctccgacgactggcgctcgccggtcgcagggtga

SEQ ID NO: 324960 - DNA, 207 bp, Pseudomonas aeruginosa
gtgaaggccaacgtcgaccagatgaagggcgccttcgacctcaacctggcggaaggcggcgggcaactgccctgcgagtccatgaccatttggggcaagtcctactccctctgtatctccgactacgccggccaactctccagcctgcgcgtggcgctgctgctaatggccgcgctgatcgccgccctcattctgctgaaggactga

SEQ ID NO: 324961 - DNA, 357 bp, Pseudomonas aeruginosa
atggaatggctctccggttttctcgatcagatcatcgccttcttccagtggatctgggatttcttcgcccaaggcatctatgacttcgtgcgcgacggcctggtggtcgccaccaaggcgtcgatgtacgccgcgctccagaccctgatcctgctgatcgatgtcagctacaccgccgcccgcgaactgatcgacagcctcggcgtgccgcagatgatccgcagcatgtatgccgcgctgccgggtccgattgcggcggggctggccttcttcggcgtgccgcaggcgctgaacatcatcatggtcgcggcggcgacgcgcttctgcatgcgcttcgtgccgttcattgggaggtga

SEQ ID NO: 324962 - DNA, 1275 bp, Pseudomonas aeruginosa
gtgtcgatcaagatccaccacggccccaatggctcctacaagacctccggcgcgatccaagatgacgccgtgcccgcgctgaaagacgggcgggtgatcatcaccaacgtgcgcggcttcaccctggagcgggcctatcaggtctttccggacctgcccaacacggcggagatcatcaacctcgatctggagtcgctggaagacctcgaaaagacgcgcacgtggttccagtgggcaccccgcggggccttcctgatcttcgacgaaacccaactgctgtttcccaagtcctggcgggaaaaagacctcgagcgcttcgactaccccggtggaccggaagcggcccatgcggccgaccgccccatgggctggctcgacgcctggacccggcaccggcatttcaactgggacattgtcctcaccacgccgaacatctcctacatccgcgacgacatccgcatgacctgcgagatggcctacaagcattccaacctcgcggtgatcggcatccctggccgctacaaggaggcccagcatgacgcccaactcaaccgtccgcccgccgatggcaccatcatcgagtacaagcgaatccgaaagcagaccttcgccctctaccagtccacggccaccggtaagacccaggacaccaaggcgggcaagagcctcttccggtcgcctaagctggttcttctactggcattgctggccggcactattggctttgtctggtatatggggcctctgcgcacgattggcggtccggctgcttcgacacctgccgacgctcctggcgaccctgctcaagcccctgctgcgcccgctgctgtggctgctccagcgcgtcctgctgcgaatagctttcttcctcctgggcttgtacctgatgggcctgctgctgcgcctgttgatctgaacgcccatcccttcgccgatcggcggatctccatccttgcccacgcctaccgcaagtcgcggggcgatatctacctgttcgctctggaagatcccacgggccgacgcctggaactcaccagctggcaactgatcggctccggctaccgggtgacgcccaagggcgagtgcgtcgtagagcttcgctatgaggactggaaacagaccgtcacctgtgccgggaggcaggccggcgcggtggccagcatcgctccggcagcgcctgtcgccgcgtccgcagacgcaccggccaggggccagtcgccgctgaccatcgtccccgattccgaatacacctcgcggccctggaggcacaaatga

SEQ ID NO: 324963 - DNA, 774 bp, Pseudomonas aeruginosa
gtgcgcgtactccggctcgatgtgcacacccaccaccactcgctggcggtcgcgcgacagctggtagctctgcacgctgccgacgcggacctggcggtagaggatcggcgcgccgatgtcgatcgagccgagcttgtcgctggtcagcaccaggtgcaggccgggcgcgtcggtgttcagcggcggcgctttcgggcggatggtgaactcgcgactcggcgcgccgctcttggcgaagcgcacgtcgatgtagttacctttcaccagggcctcgaggccggtgatgccggccagggagatgcttggcttgacggtccagaattcggtgccttccagcagcatgtcctcgacccgcggatccatcgccaggtcggcagtggcgctgctgtagtccttgcccatgtcgatcgacttgaccaggccgacctgcacgccgttgaacatcaccggggtgcggcccggatcgataccactgacgtcgttcatcttcagcttcacgcgcagaccggcctgggccgcgtcgtagtcgtcgtacaggcggaacggcttgctcggatcggtcggcgggctgtcggtgcggttctccggggtggagaaggcgataccgccggcgaccagggtcagcagcgactcgctgtgcaccttgaagccggacaggccgccggaaatggagatgccgctggcgttccagaatcgcgtgtgcttgcgcaccaggtcggcgtaggccggctcgatgtgcaccttgatctcgatggtcctctggtcatcgcctaa

SEQ ID NO: 324964 - DNA, 384 bp, Pseudomonas aeruginosa
atgctcgctaagaccctgaaagcgctgctcctgttctgcctgatccaggccgcccgcaccgtggccgatccggtcaagggccgcgctcccggctcgtcggaacagcttcaccgttccggcgaacggaagcacgggcgcagcgcacccttgaacgcctcccccctgaaacagcctccgctggggagtgtggggcagctcctccgccccgcgctcccgagccctctgcggcaagagcgggatgacaagggcagagcccttggtgttgctctgcgggttccaaggggaagggttccctgggccgtcggagacgacgttgcgataggggtcgttatccggatgggccgaaacgaacacccgtggttggcttggttcgctagcgaatag

SEQ ID NO: 324965 - DNA, 435 bp, Pseudomonas aeruginosa
atgaacatgtttgcaacccaaggcggcgtcgtcgaactgtgggtcaccaagaccgacacctatacctcgaccaagaccggggaaatctacgcctcggtccagtccatcgccccgatcccggaaggtgcccgtggcaacgccaagggcttcgagatcagcgaatacaacatcgagccgaccctgctggacgccatcgtcttcgaaggccagccggtgctctgcaagttcgccagcgtggtccgcccgacccaagaccgtttcggccggatcaccaatacccaagtccttgtggatctgctggccgtgggcggcaagccgatggcgccgaccgcccaagccccggcccgcccgcaagcgcaggcccaagccccgcgcccggcccagcagccgcagggccaggacaaacaagacaagtccccggacgccaaggcgtaa

SEQ ID NO: 324966 - DNA, 804 bp, Pseudomonas aeruginosa
atgcaccccgtagtacagctcggcgttgtactcggtgtcctgcagcggctggtacagcgggttgtcgtagtcgtcgatgccgttcacctggttcaccaggcgctggcgcttcttcacatcgtcgttgacatggatgcgcgcgatgcccaggccgatgtcgtccttcggccgcgcgtcgaacggacccttgtagaccaccccgagctgctggtagttgtccaccacgttggtcgccttgtcgtggaccgtcaggttggcgaacaggctcaacccgcgcgaggcatcgccgttgtgcgaagtgacctgctgctgcgccaccacccaccagccatgcttgctgccgcgcgacttgaagtcgttgccggtcagcccctgcggctggccgtcgacgtcgtcgtagacgtcatcggccttcgccgtgctgtagtagtagcccagccggtactcgcccggcagttgctcggcgccgaccttcggctgccagatcagctccaccggcagcaacgcgcccttggtcccgctgccgctcatcttgaagccgttgccggtctccaggttcgacgggttctgctcgtaggcgccgacctgtacgtaccagtccggcgcgaagttgtacttcacccgcaacgcccactggctgaccggccagttgtaccagatgctccccgcccagttgcccacctgcgagccgcagaaggccaggttctggaaatcgcaggggaagctgttgaagtcctcgccctcgccgaaacggccgaatttcacgtccagcgcgccgtcgaagtactgctgcttgagccatag

SEQ ID NO: 324967 - DNA, 249 bp, Pseudomonas aeruginosa
atgaaagcaatgaagcaacgcatcgccaagttcagcccggtcgcctcgttccgcaacctgtgcatcgccggctccgtcactgccgcgacttcgctgccggccttcgccggggtgatcgacaccagcgcggtggaatcggcgatcaccgatgggcagggcgatatgaaggccattggcggctacatcgtcggcgccctggtgatcctggccgtcgccggcctgatctacagcatgttgcgcaaggcgtaa

SEQ ID NO: 324968 - DNA, 252 bp, Pseudomonas aeruginosa; identical to SEQ ID NO: 322700

SEQ ID NO: 324969 - DNA, 1032 bp, Pseudomonas aeruginosa
gtggaacagatcaacgccggcctgcgtacgcagaagctgcaactgttctaccagcagctcaacggcctgctgttcggcgtggagaacctgctggtgatctggctcggcgcgaccatggtgatggacggccagttcagcgtcggcatcctgatggccttcaacgcctacaagtcgcagttcgacagccgcgtcggcagcctgatcgacaagttcttcgagctgcgcatgctccagttgcagggcgagcgcctggccgacatcgtgctccaggccccggaggtcagccacggcgacatcctcccggagaaccttcgcgagcgcgaggcgagcatcgagatccagggcctgcgctaccgctacgcggaacaggagccctgggtcctcgacggcctcgacctgcgcatcgccggcggcgagtcggtggccatcgtcggcccctcgggctgcggcaagagcaccctgttcaacgtcctgctgggcatcctcccgccagtggagggacagatccgcatggccggcctggaccttgcgcaactgggcctggacggcctgcgcgaactggtcggcacggtgctgcaggacgacgtgctgttcgccggttcgctcagcgacaacatcagtttcttcgacccgcaaccggacatgccctggctgctgcagtgcgcgcagatggctgccatccacgatgacatccaggccatgccgatgggctacaacaccctggtcggcgacatgggcacggtgctctccggcggccagaagcagcgggtgatgctggcccgggcgctgtacaagaagccgcgcatcctgttcctcgacgaagccaccagccacctcgacgtacactgcgaacagcgggtcaacgccgccattcgagcgctgcgcatcacccgcatcatggtcgcccatcggcccgagaccatcgcctcggcggaccgcgtgatagtcctcggccagggcaaggtaagcctcgacgaaagcaccgcgcgcctggccgaacgccaggccgccgcggcgcgggagcaggcctga

SEQ ID NO: 324970 - DNA, 978 bp, Pseudomonas aeruginosa
atgttccaggcgtaccgcgtccgggctgccggtgggcacgcgcagggccacggtgcggttgtccaggccccagctcggcgcgttcggcacgtagaactgcgaaccgaagcggcggtaggagttgacgttcgggcagaggaaggccatggaggccggcagggtctcgagcacaccgccgatcgcatggcgcaatgcggcgttctgctcgggatcctcgctggtgaagatgttgttgccgtgcttgtcgagcagcgagatgtgtacgtgcagtccgttcccggcctggcccggatagggcttggccatgaaggtggtgtccatctcgtggtcgtaggcgatgttcttgatcaggcgcttgagcagcaccgcatagtcgcaggccttcatcgggtcggcgacgtgatgcaggttgacctcgaactgcgccggtgcggattcggcgacgatggcgtcggccgggatgccctgggcgcgggcgccgtcgatgatgtcctggaggcactcgacgtattcgtcgaggtcgtcgatggagtacacctgcaccgactgcggacgcttgccggagatcggcgagcgcggcggctgcggccggccgttcacattctcctggtcgatcaggtagaactccagctcgaaggcggcgacgatggtcagttccatctcggtgaacctggccaccacctggcgcaggacttcgcgggggtcggcgaagaacggctcgccttccagttcgtgcatggtcatcagcagttgcgcggtcgggcgcttctgccagggttccatggagagggtgccggggatcgggtagcagatccggtcggcgtcgccgatgtcgagacccaggccggtactctctacggtggagccggtgatatcgagggcgaacagggaagcgggaaggttgatacctttttcgaagactttgggcagactgttgcgttcgattcgcttgccgcgaaccacgccattcatgtctga

SEQ ID NO: 324971 - DNA, 225 bp, Pseudomonas aeruginosa
atgcatgcggtccaccagatcacgaggcggtttccagccctgtacgtccagggcgatgtgcacagcggcttggttggtttcgcagtgactcagcacggcagcggccaaatcatccagcacgccctggaggatgcgcggatcggcgccatcgagggcgtgaggcgatacctcgatcttgaggtgcgagccaatggtgtcgaccttgatgttgtggttcttgattag

SEQ ID NO: 324972 - DNA, 267 bp, Pseudomonas aeruginosa; identical to SEQ ID NO: 323691

SEQ ID NO: 324973 - DNA, 486 bp, Pseudomonas aeruginosa
  misc_feature (386)..(395): n is a, c, g, or t
atgttgcgtcgttgctgtctgctcttcttctgtctgctgttgagcctgcccgtgcgagcggaggagtcggtcgccttgccgctgacggcagaactacggacctggctggcggagcatcgggaattgcgcgtcggggtggtcaccgaagcgccctatgcccagtacgaccgccgcctgcaacagtattccggggccaacgtggagctgatgggctggctggccacggcaatgcaggtgaccttgcggtggcagggctatcccgaccaggcggcgctcgacgatgccctgcgcgctgggcgcgtggatatcgctcccggcctcagccagaccccagccgggctgcgcttgtggctgttctccgatccctacctgcgggtttcccggcnnnnnnnnnngtggtggggaagcgcgatggcagcggcagcgtcgaattggagcaactggagcgcgatacccgggttgccgtgcgtgccggcagttcggtag

SEQ ID NO: 324974 - DNA, 1017 bp, Pseudomonas aeruginosa
atgtctgatgatgcccgtttccagcagctgaatcgctggttggactcttgtttgcccgagttgttcgttgccgaaggttggggggaagtgccccccgccgaactgatcccggccagtagcgacgccagcttccgtcgttatttccgctggcagggaggggaccgcagcctggtggtgatggacgcgccgccgccccaggaagactgccgaccgttcgtcaaggtcgccggactgctcgccggagccggcgtgcatgtgccgaggattctcgcccaggatctggagaacggtttcctgctgctcagtgacctgggccggcagacctacctcgacgtgcttcatcccggaaatgccgacgagctgttcgaaccggccctggatgcgctgatcgccttccagaaggtcgatgtcgccggtgtcctgcctgcctacgacgaagcggtgctgcgccgcgagctgcagctgttccccgactggtacctggcccgccacctcggcgtggagctggagggcgagacgctggcccgctggcagcggatctgcgacctgctggtacgcagcgcgctggagcaaccgcgggtgttcgtccatcgcgactatatgccgcgcaacctgatgctcagcgagcccaacccgggcgtcctcgacttccaggacgccctgcacggcccggtcacctacgatgtcacctgcctgtacaaggatgccttcgtcagttggccggagccgcgcgtgcatgccgcgctgagtcgttactggaagaaggcgacctgggccggcatcccgctgccgccaagcttcgaggacttcctccgcgccagcgacctgatgggcgtgcagcgccacctgaaggtgattggcatcttcgcccgtatttgtcaccgcgacggcaagccgcgctacctgggtgacgtgccacgcttcttccgttatctggaaaccgccgtggcgcgccgtcccgagctggccgaactgggcgagctgctggcctcgctgccgcagggagccgaggcatga

SEQ ID NO: 324975 - DNA, 1686 bp, Pseudomonas aeruginosa
atgaaagaactcagcccatcggccgggtctgcgctttccggcgctccgcagcagtggcacgacatcgactggtgtcgggtccagcggaatgtccggggaatgcaggtacggattgcgaaggcttgtcgggaaggcaaatggcgcagggtgaaggccctacaacggatgctgacccgctcgacgtcggccaggtacctggctgtacggagagtcactgaaaaccagggcaagcgcacggcgggagtcgaccgcgtgctctgggatacgcctgacaccaagtggaaagcggcacaagggttgaaaaggcgcgggtaccaacctcggcctctacggcgagtgttcatcccgaagtcgaacggaaaggagcgccccctgggtatcccgaccatgactgacagggcaatgcaggcactctacctgctcgctctgtcgcccattgcagaaaccaccggcgatccgaacagctatggcttcaggatcgagcgatccacggcggatgcaatgtcccagttgttcgtttgcctatccggaaaggcttcggcccaatggatactggaggcggacatacaagggtgttttgaccacatcaatcatgactggctactgaaccatgtccccacggacaaggtgatcctccggaaatggttgaaggccggcgtgatccacaaaggccagctccaggcaacggatgctggaacacctcaaggcggaatcatctcgcctactttggcaaacatggtgctcgatggcctggaatcacagctcaagcgacacctgggcgtgacaagggcgaagaagctgaaactcaatgtggtgcgctatgcggacgacttcgtcatcaccggtgtctctcccgaggtactggagaaagaagtcaaaccctgggtagagcagttcctggcggtacgcgggctgcagctctctctggagaaaacgcggatcgcccacatagatcagggcttcgacttcctcggttggaacttccgcaagtacaacgggaagcttctgatcaaacccagccagaagaacgcgaaagcgttctacggcaaggtgaaggaggtcatcgaaaccagcaggacggcaaggcaagaggacttgatccgaacgctgaatccgattctgcgcggctgggcgctgtatcaccagccagtggttgccaagcaaacgttcagccgcatggacaacagagtgtttctcaagctctggcgttgggcgaaacggcggcacccgaacaagtcactggattggatcaggaggcgatatttccggattcacggggacaagacttgggtgttcgctaccacggtgctggaaagcaacggtaagaaacgggaggtcgcgctgtactcgctggcgagcacgccgattgagcgacataggaaggtgagtggggaatacaacccctacgatccagccatggaagcaataggtgaaaaactgcgaacggaacggatgttgaaaaagctgaagtaccgaactcagatcagaaacctatacctctcccagaaggggctctgctcgctctgcaaccaaccgataaccagggaaaccgggtggcacgaccaccacatcctctatcgctcacaaggcggtggagactccctggagaaccgggtactattgcaccccgcttgccaccagcaactccatgctcgtggtctgacagtaagcaagccggcccgttag

SEQ ID NO: 324976 - DNA, 162 bp, Pseudomonas aeruginosa
atggcaacaatcgcccctccttcccgtggtccgcaaaacggattggccgaccaacgaaaaaccttccgcaccaagcgcgacgccgaagactgggcacgccgcaccgaagacgagatggtacgcggcgtgtacatccagcactgcggctccgagcgcatgtga

SEQ ID NO: 324977 - DNA, 1470 bp, Pseudomonas aeruginosa
  misc_feature (1297)..(1306): n is a, c, g, or t
atgagtcgctcacccatccctcgccaccgagcgttgctggccggtttctgcctggctggcgcgctgtccgcccaggcggccacccaggaagaaatcctcgatgcggcactggtcagcggggattcctcgcaactgaccgacagccacctggtcgccctccgcctgcagcagcaggtcgagcgcatccgccagacccgcacgcagttgctcgacggtctctaccagaacctcagccaagcctatgatcctggcgccgccagcatgtgggtcctgccggccaacccggacaataccctgcccttcctcatcggcgacaaggggcgcgtgctcgccagcctgagcctggaggccggcggccgcgggctggcctatggcaccaacgtgctcacccaactgagcggggccaatgccgcccacgcgccgctgctgaagcgggcggtgcagtggctggtgaacggcgacccgggcgcggccactgcgaaggacttcaaggtcagcgtggtcggggtggacaagaccgccaccctcaacggcctgaagagcgccggcctgcaaccggcggacgccgcctgcaacgcgctgaccgacgccagttgcgccagcaccagcaaattgctggtactgggcaacggcgccagcgccgctagcctgagcgccacggtgcgcgcacggctacaggccgggctgccgatcctcttcgtgcacaccaatggctggaaccagagcagcaccggccagcagatcctcgccggcctgggcctgcaggaaggcccctacggcggcaactactgggacaaggacacggtgccatccagccgcacccggacgcgttcggtcgagttgggcggcgcctatggccaggacccggcgctggtgcagcagatcgtcgacggtagctggcgcacggactacgactggtcgaaatgcacctcctacgtcggtcgcaccacctgcgacgacgtgccgggactgagcgacttcagcaagcgcgtcgatgtattgaaaggcgccctcgacgcctacaaccagaaggcgcagaacctcttcgccctgcccggcaccacctcgctgcggctctggctgctgtgggccgacgcggtgcggcagaacatccgctacccgatggacaaggccgccgacacggcgcgcttccaggaaaccttcgtcgccgacgccatcgtcggctacgtgcgcgaggccggcgcggcgcagaaggaactgggcagctacgccggccagcgccaacagtcgatgccggtatcgggctcggaggaaaccctgaccctcaccttgccgnnnnnnnnnnctcaccttgccgtcggcccagggcttcaccgccatcggccgcatggcggcgccgggcaagcgcctgagcatccgcatcgaagacgctggccaggccagcctggcggtcggcctgaacacccagcgcatcggctcgacgcggctgtggaatacccgccagtatga

SEQ ID NO: 324978 - DNA, 1227 bp, Pseudomonas aeruginosa
gtggcgctggtatcgccctacggcggcctgttgcaactggtctacagcggcgccacgccgggtcagacggtaaccgtcaaggtaaccggcgcggccagccagccgttcctcgacatccagccgggcgaggacagcagccaggcgattgccgacttcatccaggcgctggacgccgacaaggccgactggctggagatccgcagcggctcggtggaggtccacgccaaggtggagaaggtccgtggctcgatcgacaaggactatggcggcgacgtccagcgcttcatccgtgagttgaacgaggtgttcatcgacgacgcctacaccctggccggcttcgccattcccaaccaggcgaagactccggcaatccagcaggaatgcgcggtgcgcggctgggactgcgacagcgagaccctgcacaagctgcccggcacccagcacatcaacgtcgaccagtacgcccagtgcggcggcggttgcagcggcaacccctacgaccagacctggggcctgaacccgcgtggctggggcgaaagccatgagctgggccacaacctgcaagtgaatcgactgaaggtctacggcgggcgctcgggcgaaatctccaaccagatattcccgttgcacaaggactggcgcgtgctccgcgagttcgggcagaacctcgacgatacgcgggtcaactaccgcaacgcctacaacctgatcgtcgccgggcgcgccgaggccgatccgctggcaggcgtatacaagcgcctgtgggaagacccgggcacctacgcgctgaacggcgagcgaatggccttctatacccagtgggtgcactactgggccgacctgaagaacgatccgctgcagggttgggatatctggaccctgctctacctgcaccagcgccaggtggacaagtccgactgggacgccagcaaggccgctctcggctacggcacctacgcccagcgcccgggaaacagcggcgatgccagcagcacggacggcaacgacaacctgttgctcggcctgtcctggctgacccagcgcgaccagcggccaaccttcgcgctatggggcatccgtacctcggcagcggcccaggcgcaggtggcggcctacagtttcgccgagcagccggcgttcttctatgccaacaaccggaccaacgaatacagcacggtgaagcttctggacatgagccaggggtcgccgacgtggccgtttccgtga

SEQ ID NO: 324979 - DNA, 471 bp, Pseudomonas aeruginosa
atgattcctttcggcctcagcaccgaacaattccgcgagcgctaccgccgcgacctgcaacgcgccgcgccgggcgtgatccagcacctgcgcgagctgctccggcaacccttggaggaaggactgcgcgacggcgagatccaactgttcctcggcgaggacggacgcgacgcagcggaagcgtggttgtacctgaatggcgccagcaaccgggtggacgccagcgacccgcgcctgtttcccggcaagacgctggacctggcgctcggcctgggacatgccccggatttcgacgaagcctatttcgccgacggcttcggcggcgtcgatctgctcgccgatacgctgcaagcctggttcgccgagtgctggtggaaggccggcggctgggcctggccgatcccgctgtggctgcacgtacacgatggcttcggcgacggccgtggcatcgccctcaccgaacgctgctga

SEQ ID NO: 324980 - DNA, 912 bp, Pseudomonas aeruginosa
atggacccactcgaccggctcatccagctcgccaacctgcagggccgcctcgaccagcgctgccagctacagggcagctgggcgctggagcacccgcaagcggtgcccggcgaggcgaccttccatatcgtcatggccggcacctgctattgcgaattcctcgatggcgctcgcctcgacctgcatcccggcgacctgatcctgttgccacgcggcaccccgcacctcctgcgcagcgacagcccggcgcaaccctgcgaacccaccgtggagcaccgcggcagcatcccgctgtaccagttgaacggccccggcgaggccctcgacatgctttgcggcagctaccgctatcacgccggtgccagcctgttcggcgcgctccccgagcgcctgctggtgcatatggacgagtcgacccagcagcccctgcgcgcgctgatcgggttgatgcgcgaggaagccgagagcacccgcagcggcgcccgctcgatcatcgacgcgctggccaccgcgctgttcgccctggccctgcgcgcctacctggaccgccaaccgctgggcgacggcctgttcggcctgctgggcgacgcccgcctgggacgagccctgcgggccatgctggaacgcccggagcatgcctggaccctggaacagcttgcccagcaggcggcgatgtcgcgggccagtttcgtccgcgccttctccgccctcggcgggacctcgccgtggatcctgctgacccgcatccgcatggaaaaggcccgcggcctgctgcgacaaacgcagaagagcctgctggatatcgccgccgagaccggctaccagtcggaggcggcgttttcccgcaatttccgccaggccttcggcgaatcgccgggccgtttccgccgccaggccgactccgctcgctga

SEQ ID NO: 324981 - DNA, 1155 bp, Pseudomonas aeruginosa
atgggaagcgcttcgcaacgttcggtgcaggatctttatgaggacgtgggagatcactaccggatctttatccgggcgccattctttcaattgctgaaacacagggactactgggttcccctgctgtatttcttcttcgtgttgatcacgatgttctgggacttgtattgccactccggacagtacctctacgaagccaggagtctgctccctttctatctgttcccgtttctgatcgctgcgctacggataggcgatatcgtcgtcgatacgcgctgtcgcaatgtggagaacctgggaggcttcgagcgctccgccgagagcagtcgctacgtccagctttccctctacgaacggcaatggttccggctgcggtaccgggcctatggcggtaacctccgctgcctggcgggcgatctggtggagaactggcgcctctggaaggaggtgaattcgaaggccgcgaaggatatcgacggcgcagtgatgctgcgattctttctgcctccccgggaccttgctcgtctggtcacgctgttggctgcgctcattgcggtcatcgccactctcatcattaccctgggggctgacaggcagggctatttcgagtttgtcgacaacctgcccgcctatctgaaactgtattggggcgtcgttttcatcattgccttcagcggtccatacatgatcttcctggggatgcaggcgcgcctggtactgcgcgcaatgatcgacgcattgtccatttcccaaccaagcgacaagctgttctatcaattcatccagcggctcatctgggcggacggagtgaaaccggcgaaccccagtgccaacagcagggtgctacgggcggtcgactccatggtcgacttcttctacgaggagtggagaagcgccatcggcaagcttgtgctgtggctcgttgccctgcttgtgctgcttctttgcacgcttttgcattgcctgctccgagtcttttcctcggcgagaacgttgggagaggcgctgatgcggattctcttggctgttctggggggcgtttgctggatagtcgcggcgatccagcgcttgaatcttgccgtgcccttccactggaccttcttcgtgctgacgggaacgggagccttgttcgcaaccctctgcgggcagccctga

SEQ ID NO: 324982 - DNA, 267 bp, Pseudomonas aeruginosa
atgcaccagggcggctggtgcattcgtacctgtcgcccgctcccgtcggcgccgacactggcgcagcacgcccggcatgcccccgcccgtggtcgtgcaccttttctccgcggcgcgagccgcgccgtccgcacgtctgttcccctcgccagtttcgctctggcgggggggcttcccgcctcctttcgaatatttgcccctctgcctctgctggtgcgcgacggcatcctgccggccgtttgcgaatgctcgggactggtgtcgtga

SEQ ID NO: 324983 - DNA, 1491 bp, Pseudomonas aeruginosa
atgaacgaccaggtactgcgtacccagaccgaccgccgccagttgcagcagatcatcgccggtcttaccgaaggggtgatcctgatcgagccggaccagcgcatcctctgggccaacgaggcggccctggcgatgcacggcgtcgattcgctggaaggcctgggcgccgataccggcgagtatcgcgagcgctttcgcctgcgctaccgcaacaatcatccgctgcaggagggccagtacccggccgagcgcctggtggctggcgagtgcttcagcgacgtggtggtggaagtgtttcccgccgccgacgaggacacccgctgggtgcaccgcgtgcgcgggttggtgctgaccacccccgaggacaagccagactgcctggtgctgatcctccacgacgccaccgagtgggccagcgccgagcagcgcttcgagaagaccttcaatgccaacccggcgccggcggtgatctgccggctcagcgactaccgctacgtgaaggtcaatgtcggtttcctggaaatgaccggctatgcccgcgaccaggtgatcggccgttcggtgtacgagctggacgtactcgaccaggccgagcgccgcgaactggcggtggagcgtctgggcgccggcgagaccatcccgcagatggaggcgagcctgcgggtggcggagggcggacgcaagtgcgtggtggtcgccgggcagccgatagaggtcggcgaggaggcctgcatgctcttcaccttcaccgatctcgaaccgcggaagaaggccgaggaggccctgcgcaagagcgaggagcgcttcgccaaggccttccgcatggcaccggtgccgagcctggtgctgtgcggcgacgacctgcaggtgctggacatcaaccaggccttcagcgaaaccttcggctaccaggccgaggaactgctcggcgagtccaccgtcgcctgcgggctgtggcaggacggcggcgccgagcgcctgggcgagctgctggcgcagagcggcagcgtgcgcaacgtccagctgcgcctgcagcacaaggatcgcaacggcctggactgcctggtctcggccgaggcggtgagcctcaacgagcaggactgcgtgctggtggccttgctggacatcagcgaccggcggcgcaccgaaatggagctggtgcacgccatcgagacggtgatgcaggacgcttcctggttcagccgcaccctgatcgaaaagctcgccaacgtgcgccgcgccaacgcgccgggcaccggcgccgaactggccgacctgactgcgcgcgagcgcgaggtgttcgacctcatctgccagggcctggcggacaaggagatcgccaaggaactgggcctggcgccgaacaccgtgcgcaaccacgtggcgaccatctacgccaagctcgatgtccacagccgtggcgaggccatcgtctgggcacgcgaacgcggattcgcgccggagccgcgcaacggcaacgggcgcaaataa

SEQ ID NO: 324984 - DNA, 717 bp, Pseudomonas aeruginosa
atgcgcgccctggtattgcaacacgttcccttcgaaggcagcgcgcggatcggcgactggatcggccgccactgcgagcacgagcacgtctgctacctctacgccgacgcccacctgcctgcgctggacagcttcgacctgctggtggtgatgggcgggccgatgagcgtccacgacgaagcgcaatatccctggctggtggcggagaagcgtttgatccgcgcggcgctggatgccggcaagaaggtcctcggcatctgcctcggcgcgcagctgctggcccaggcgctgggggctgcggtacgcccgggacgccaggcggagatcggctggtggccgctgcacaggtacagccaggcgctgggctcgccgctgggcgagcgcctgccggaacggctgatggcgttccactggcacggcgagaccttcgacctgccagccggcagcgtgccgctctatggttcggctgcctgcgccaaccagggcttcatctggaacgagcaggctatcggcctgcaatgtcacctggaaagcaccgcggagagcatcgaggcgctgctcgatgcctgcccgcaggacctgcaacgggaaggggcggtgcagagcgccgggaggatccgccagggtgtcgcgcattgccgcgaggtggcgccggtgctgttcctgttgctcgattacctggcgcatcggccggcggagatcgcacgccgggcctga

SEQ ID NO: 324985 - DNA, 435 bp, Pseudomonas aeruginosa
ttgctgctggtcgccgtggccgcggccctgggcgtgctggccagcgaagcgtacagcctggtcgccgtgcggatcggcaccatcgcgctattgtgcggactgctggtgtggatagcctcctacgaccgcgactacctgctctccaacgggccgctgaagcgcttgctggtctgggtcggcgcgcgctcctatgcgatctacctgatccacatcccggcgttctatctcagtcgcgaactctgcttccgcctgggctgggacgccggcgagcggcccctgtcgctgctcggcaccagcctggtcctgatcgtcgtactcagcgagctcaactaccgcttcgtcgagagcccctgccgcgacctgggctcccgcctggtcaagcgcctgagcgccgcccgccgcgtcgccaccacttccggagccacctcatgctga

SEQ ID NO: 324986 - DNA, 324 bp, Pseudomonas aeruginosa
atgagcgcactggttggcgtgatcatgggttccaaatcggactggagcaccctcagtcacaccgcggacatgctggacaagctgggcatcccctacgaagtgaaggtggtttccgcccaccgcaccccggacctgctcttccagtacgccgaggaagccgaaggccgcggcctcgaagtgatcatcgccggcgctggcggcgccgcccacctgccgggcatgtgcgcggccaagacccacctgccggtactcggcgtgccggtacagtcgtcgatgctgtcgaccgaaaccgtgctggacaatcccgacccgcgcgatgcgtga

SEQ ID NO: 324987 - DNA, 1200 bp, Pseudomonas aeruginosa
atgtctggcaatcgtggtgtggtctatctcggcccgggcaaggtcgaggtgcagaacattccctatccgaagatgcaggacccgcagggccggcagatcgaccacggggtgatcctgcgggtggtctccaccaacatctgcggctccgaccagcacatggtgcgcggccgcaccaccgcgccggaaggcctggtgctgggccacgagatcaccggcgaggtagtggagatcgggcgtggcgtggaaaccatgaagatcggcgacctggtctcggtaccgttcaacgtcgcttgcggccattgccgtacctgcaaggaacagcacaccggcgtctgcctgacggtcaatccggcgcgggccggcggcgcctacggctacgtcgacatgggtggctgggtcggcggccaggccgaatacgtgctggtgccctacgccgacttcaacctgctgaaactgcccaaccgcgaagcggcgatggagaagatccgcgacctgacctgcctttcggacatcctccccaccggctaccacggcgcggtcaccgccggcgtcggcccgggcagcacggtctacatcgccggcgccggtccggtcggcctggccgcggcggcctcggcacgcctgctcggcgcggcggtggtgatcgtcggcgacgtcaacccgacccgcctggcccatgccaagaaacagggcttcgagatcgccgacctgtccaaggacaccccgctgcacgaacagatcgccgctctgttgggcgagccggaggtcgactgcgcggtcgacgcggtcggtttcgaggcgcgcggccacggccattcgggctcgcagcaggaagccccggccaccgtgctcaactcgctgatgggcatcacccgggtcgccggcaagatcggcatccccggcctgtacgtcaccgaagacccgggcgcggtggacgcggccgccaagcacggcgccctgagcatccgcttcggcctgggctgggccaagtcgcacagcttccataccggccagaccccggtgatgaagtacaaccgccagctgatgcaggcgatcatgtgggaccggatcaagatcgccgacatcgtcggggtggaagtcatcaccctcgacgatgcgccgaaaggctacggcgagttcgacgccggggtgccgaagaaattcgtcatcgacccgcacaacctgttccgcgcggcctga

SEQ ID NO: 324988 - DNA, 1251 bp, Pseudomonas aeruginosa
atgttcagccgtgatttgaccctcgcccgctacgatgccgaactctttgccgcgatggagcaggaagcccagcgccaggaagagcacatcgagctgatcgcctccgagaactacaccagcccggcggtgatggaagcccagggttcggtgctgaccaacaagtacgccgaaggttatccgcacaagcgctactacggcggctgcgagtacgtcgatatcgtcgagcaactggccatcgaccgcgccaagcaactgttcggcgccgattacgccaacgtccagccgcacgccggctcccaggccaacgccgcggtctacctggccctgctgtcggccggcgacaccatcctcggcatgagcctggcccacggcggccacctgacccacggcgccagcgtctcctcctccggcaagctgtacaacgccgtgcagtacggcatcgacgccaatggcctgatcgactacgacgaagtcgagcgcctggccgtggagcacaagccgaagatgatcgtcgccggcttctccgcctattcccaggtcctcgatttcgcccgcttccgcgccatcgccgacaaggtcggcgcctacctgttcgtcgacatggcccacgtcgccggcctggtcgccgctggcgtctacccgaacccggtgccgttcgccgacgtggtcaccaccaccacccacaagaccctgcgcggcccgcgcggcggcctgatcctggcgcgcgccaacgaggagatcgagaagaagctcaactccgcggtatttcccggcgcccagggcggcccgctgatgcacgtgatcgcggccaaggcggtgtgcttcaaggaagcgctggagccgggcttcaaggactaccaggcgcaggtgatccgcaacgccaaggcgatggccgaggtgttcatcgggcgcggctacgacgtggtttccggcggcaccgacaaccacctgatgctgatcagcctggtgcgccagggcctgaccggcaaggaagccgacgccgccctcggccgggtcggcatcacggtgaacaagaacgccgtgccgaacgatccgcagagcccgttcgtcacctccggcatccgcatcggcaccccggccatcaccacccgcgggctgcaggaagcgcagagccgcgaactggccggctggatctgcgacatcctcgaccacctcggcgatgccgacgtggaagccaaggtcgccacccaggtcgccggtctctgcgcggacttcccggtctatcgctga

SEQ ID NO: 324989 - DNA, 4248 bp, Pseudomonas aeruginosa
gtgtcgaccccctcgctaaccccgtcgccgcctcccgccggcgacccactgaccgtacccgaccgaccggcagccaaggctggcctgctgttgctggtcctgttgatgctcggcctgctgctctggcagatgagccaggagctgcgccagcaggaacgcttcgaacacgagcgggccgcggcccagctcgatcgtctcaacgaccgcctgtccctgaccctcgaactcaaggcgcgcaccgccctcgccctgctcccgggcatgccccccagcgagcgtggcgagatccagggcaggctgttgccgcgcatcagcgatgcgctgccgcaggttcgccagttgcaatgggtggacagcgccccgcagacgggcagcccgtcgccggaaacgacgctgcccgagcagttgcgccagcacgccggctccggcctctaccactattgcctcgacccgcgcgacggcgaatccctctacctgaccctgcgcgaacccggcagccgccgcgacagcggcttctggctgttgcacctggccagcgacagcctcgcccagtggagtcccgacctgcccaccggcaacctgctctggcgcctggaagaccaatacgccggacgggtgctctggcataccccagggagtacggcgctgctcgacgacatgcagaccctcggcgtggaaccgctgcgcaacagcgactggcagcttcgcgggctctacgacagcacccgggtgcggctcggcctgctgccgggaatcggcggcgagctggcgatcttcctcctgctggtcggcgtcaccgtgtacatgctgctgcgcctgcaccgcgagcagcaaggcctgcgcgccatgaccctggcctcgcagcgcagcctgcgccaggcggccacggcactggcggcgatcgacgagcgagtgctggtgacccgcgccgacggccgcctcagctacctcaatccccaggccgaacgcctcttcggcatcagttcggcccaggcccgccagcatcacctgctgggcctgctgccggacctcgagccaggctggctgacggacgccggtggcgacggcgagacccgtagcgagctgctgccgctgcgggtgcgcggcgagccgcggacgttcaccctcagccgccatccgctggccagctatccggcgctcgccgaccaggcctggaccctccgcgagcagatcctccagggcgggcaggtctgggtgttgcgcgacgtcaccgaggaacagcacgccctcggcgtcctggaggaaacccggcggcgctaccaggacatcttcgaaggggtcggcgtggccctctgcgtgctcgacctctccgccctgcgccaggctctggtggaacaaggcctggacagctgcgccgcactgcgcgcctggctcgccggcgaacccgggcggcagcaggcgctgctggagcggatccgcatcaccgagatcaacgatgtcagtcgccgcctgctgcagatcgagtccaccgaacaggcctggcagcgcttgctcgaccacggcccgctacaaccggacagcctgcgcctgcaggtgatcgaggcgctcatcgaacgccggccggtactcgaactggaagccacgctgcgctgcggcaagagcacgccgcggcacctgtggttgcaactgcgcctgccggaaaaccccggcgaatggcatgcggtgaccctcagcctgtccgacgtcaccagtcgcaaggaagtcgaactgtcgctgatcgagcgcgagaagttctggtcggacgcggtccaggcggtgcccgataccctctacatccacgacctgcacgcgcgccgggtgatcttcagcaaccatcacctgggccagcaactgggctacaaccaggaagaactggcgcggatgggcgagaacttctgggaaaccctgctgcaccccgacgaccaggaatactactggcgcatccgcaacctgcagcacgtggtcggcgacggcctgctgctcgacagccagctgcgctggcgccaccgcgacggccgctggcactggttcgacatccgcgagcaggccttcagccgcgaccgcagcggtcgcgtggcgcgcctgatcggcgtggccaaggacatcaccttcaccgtcgaggcgaacaacgcgctgcgcgagaacggccgacgctaccgcatgctggcggaaaacatcagcgacgtgatcttctccaccgacgccgaactcaacgccagctacgtcagcccctcggtacagcacgtgttcggctacagcccggaatgggcgctgctcaacggcctccaccagaccgccaccaacccgcgccagctcggccgcctgaacggcctgctgcgccgcgtgcggcacgccatcggcgaccgccagaagctcgccgagctgcgggaaaaccctggccagcatctgttcgccctcgactgcctgcgcgccgacggacgcaagattcccatcgaactgcggatcgtcctgatgtgggacgagcacgaccgcttcgaaggcctgctcggcatcgcccgcgacatcagccagcagcgccgcgccgaacgcgagctgcggatggcggcgacggtattcgaacactccacggcggcgatcatggtcaccgacccggccggctacatcgtccaggtcaacgattccttctcgcgcctgaccggctacagcccggccgacgtgctcgaccagcagccgcgcctgctcaccgccgaccgccaggaagccaaccagctcaagcacgtgctcgccagcctgcagcacagcggcagctgggaaggcgagatcctgcagaagcgcaagaccggcgaactctatccgtcctgggtcggcatcaccgcggtgcgcgacgaggaaggcgacctggtcagcttcgtctgcttcttcagcgacatcagcgagcgcaaggccagcgagcggcgcatccaccgcctggcctactacgacgccctcacccacctgcccaaccgcacgctgttccaggaccgtctgcataccgccctgcagcaggccgaacgcaacggccagtgggtggtgctgatgttcctcgacctcgaccgcttcaagccgatcaacgactccctcggccacgccgccggcgaccgcatgctgcaggaagtggcgacccgcctgagcgcctgcgtcagccaggacgataccgtggcgcgcatgggtggcgacgaattcaccctgctgctgccttcccagggcgaccgcgagatcgccctgaagcgggcgatccaggtcgccgaactgatcctcggccgtctggcccggccgttcaccctggaaggccgtgaattcttcgtcaccgccagcatcggcgtggccttgtcgcctcaggacggcgccgaactgagcctgctgatgaagaacgccgacacggcgatgtaccacgccaaggagatgggcaagaacaacttccagttctaccaggccgagatgaacgcccgcgccctggagcgcctggaactggaaagcgacctgcgccgcgccctggaactgggcgagttcgtcctccactaccagccgcagttcaccggcgacggccgccgcctgaccggcgccgaggccctgctgcgctggcagcatccgcgccgcggactggttccgccgagcgagttcattccggtgctggaggagatcggcctggtggcccaggtcggcgactggctgctggcggaagcctgcaagcagttgcgcagctggcacaaggccaaggtgcgggtgccgaaggtctcggtgaacctctcggcgcggcaattcgccgatggccagttgggcgagcggatcgccgcgatcctctacgagacaggcatcccgccggcctgcctggagctggaactgaccgaaagcatcctgatgagcgacgtcgccgaggccatgcagatcctctccgggctcaagcgcctcggcctggccatcgcggtggacgacttcggtaccggctactcctcgctgaactacctcaagcagttccccatcgacgtgctgaagatcgaccgcagcttcgtcgacggcctgccccacggcgaacaggacgcgcagatcgcccgggcgatcattgccatggcccacagcctgaatctgatggtgatcgccgagggcgtggagagccaggcccagctggacttccttcgcgagcacggctgcgacgaggtgcaaggctacctgttcggccggccgatgcccgccgagcagttcggcatgctctacgccagcgacgtgctgttcatgttcaacgagggctga

SEQ ID NO: 324990 - DNA, 1110 bp, Pseudomonas aeruginosa; identical to SEQ ID NO: 324262

SEQ ID NO: 324991 - DNA, 216 bp, Pseudomonas aeruginosa
atggccagcgccaagggagcggcaggtgaggacgaggtagaagcactgttcgtccgttccgtaccggatagcttccggcgctgtggccatcgcttcacgcgagaaggccacggcattgcactctcgctgttgagcgacgcccaggtcgatgcactgctcaatgatccgaatctggtcgtcgagcactgctcgtttgcactgaaggatgtgagctga

SEQ ID NO: 324992 - DNA, 2049 bp, Pseudomonas aeruginosa
atgaacgccgttacccaaatcgaaacccgtgccatcgaaaccgccgcgccgctggaagtggccgacccgaccaagaacctgattttggttccgctctcgcagttgctgccgcgccgctccaagcgcaacgcacgcaagaccccgcgcctgtccattcccgaactggccgcgagcatcgcccgcatcggtctgctgcaaaacctcgtcgtcatcctgtccgccgatggcgagcaatacgaagtggtggcgggcgaccgccgactgactgcgttgaagctgctggcgaagaagaagcgcattgccgccgactttgaggtgccttgcctgctggtgccggacgcttcggcccgtaccgtcagcctcgcagaaaacctgctgcgcgagcagatgcacccggccgaccagttcgaggcgttcgccgcgctggtcaaggaaggccggcccatcgaggacattgccgccgacttcggcgtgtccccgctggtggtgcagcgccgcttgaagctggccaacgtctcgccgcgcctgctggccgactaccgggccgcagccgtcacgctggaacagttgatggccctgaccatcaccgacgaccacgccgcgcaggaagccgcgttctacggtgcgcccgaatggcagcgtggcgcgtccgcgctgcgcgaacgcctgaccgagcgcgaaatcgacgccacgcatccgctggtgcgcttcgccgggctggacgcctacacggcggagggcggcggcatccgccgcgacctgttcgcggaaggcgatgccggaacctacctgaccgaccccgcgctgctggaatcgctggtgcgtggcaagctggatgcactggctggggacgtgcgcgccgagggttgggcgtgggtggaagccgtgccgcacatgagctatgccgagcggcaggcgttccagaacgcgccgcgccagcgccgcgaaccgaacgcccgcgaagcccgccgcatcgcctcgctgcaaacccgcctcgacaagatcgacgccgaactggaagacgcctacgacgccgaggacgaggacaagaccgaagcgctggaaccgcgccgcgaacaggtcgccggggaactgcaagccgtggaggaagccttgcagggctacgccccggacgtgcgcgccgtggccggtgccatcgtcaccctcgaccgcaacggcgaagccgtgattcatcgcgggctgctgcgcgaagccgaagccaaggcgctgcgcacgctggaacgcttgcggcggggtttcggcggcgcggaaggcgaagccgggaacgacgacgaaggcgaggacgccgagcagcccaaggccgcgagcctgtccgaccggctggcgcagcggttgagcgcgcaccgcaccgccgcgctgcaaatcgaagtcgcccgccatccgcaagtcgcgctggccgcgctggtgcatggcatggtgcagagcgtcttgcaggacaaccactacggccacgacttgccgctgggcgtgagcctgaaagtgcaagaccggctggaaggcatggcccccgactggcccgagtcgcccgccgccgtcgccctgcgcgagttgcagcaggtcgcgggcgaagcgctgccgcaggacagcgccgaactgttcgccgcgctgctggcgatggagcaaggcgaactggtgcgggtgctggcggtatgcgtggcggcgaccgtggacgtggtgacgcctcgcgccacggcgcaccagccggacgcggaactggcgcaggctgtggggctggacatggccgcatggtggcagcccaccgcagacgggtatttccagcatgtgccgaaggccgcgattctggaagccgtgggcgagttcgcaccatcgcacgctgcccggctggcgaagttgaagaaggccggcattgccagcgaagcggaacggctggccgatggtacgggctggatgcccgccatcttcaaggccgaaggcccggaagctgcgccgcagggaacgcaggcgcaggacgccccggaggatgccgaggcaatggcggatgaacccgccgaggcgctggccgcttga

SEQ ID NO: 324993 - DNA, 828 bp, Pseudomonas aeruginosa
atgcaactcgcatcccgattcacttcccgttccccgtcgctgcgcagcgattacccgctgtccgacgatcaaatccgcagggtcgcgccgtccatcttcgcggacgcgccgcacgaaagccgttccgagcggtacgcctatatcccgaccgccgccgtgctggcggagcttcgcaaagaagggttccagcccttcatggcgtgccagacccgcgtgcgcgacgaaggcaagcgcgaacacaccaaacacatgctgcgcctgcgccatgcaagccagatcaacggcgcggaagccaatgaaatcgtgctgctcaattcccacgacggcacgagttcttaccaaatgctcgcgggcatgtttcggttcgtgtgcagcaacggtcttgtctgcggcgacaccgtggcagacgtgcgcgtgccccacaaaggcgacgtggccggactggtcatcgaaggcgcttacgaagtcttgagcggcttcgaccgcgtgcaggaatcccgcgattccatgcgcgccatcaccttgaacgatggcgaatccgaagtgttcgcccgcgccgcgctggccctcaagtactacgaccccgacaagcccgcgcccatcacggaatcgcaaatcctgatgccgcgccgctttgatgaccgccgcccggacttgtggagcgtattcaaccgcacgcaagagaacctgacccaaggcggcctgcgcgggcgcagcgccaacggacgccgccagcaaacccgcccggtgcagggcatcgaccagaacatccgcctcaaccgtgcgctttggctgctggccgatggcatgcgccagttgaaagcctga

SEQ ID NO: 324994 - DNA, 795 bp, Pseudomonas aeruginosa
atggatgagctagggttcgacttcgaagatgccatcgcctggtttccacaagatcaggatcacccctatgtcctaatacgaatcagcgcccaccatgtcgctgagctatcagccgcaatgggtgtcccactgcgacgctgctatatcacagatgcagcactccaacaggcgatggcacagcacaacctgccgccagttgatatcgtgcgtgccatgctcccggacgccggtgctgtcatgtctggcgactttggcgaggtgctgacgtatttttatcaggccgctgccgaactccctgccaatgccatcggaccgaagaaatggcgactgaagcaagaccggaccaaacccgcaccgaaatcagatgtagtccacttcgttatgccaaatcgtcctcacgccagtgctgaggactccgtactgtgcgccgaagtaaaggccaaagcgactgctggcagctcaacaccgattgccgatgcgatcacggattgcaaaaaagacagaactagtcgcttggcaagcactttagtctggctgcgcgagcgggctatgaccactgatctaggggatgtagacatacctctactaaatcgcttcatcgacgcggtagacagcccgcctgcggcaaagcgtttccgtgcggtggcagttatctgcaatgaccttcttgataatgaacttgcttcagcacctgacaacgctgatccggagttcactttggttgtaatcggtgtacccgaactgcgcacaacctatacggcggtatacaccgcagccatcaattcggtagtttga

SEQ ID NO: 324995 - DNA, 2976 bp, Pseudomonas aeruginosa
atgcgtgcatcattgcaaaactggatcaacaacgccgacaatttcagacacctgcggcatttcaatgttgtgcagttgccggtcgatctggctcatataggaaaccgcctggatgattactacatttcgttggtgggcgagctgttcaataaccttcgtgggctaaacgtcccaagtacggattgggcgcagctcggcaatgcctttcttcagttttcggttgaaaccactgatgcacagctaagggagcgagggatatcgaaagacgatgccgcactgttcgcagcggcatccttttactttggcgatttcccagcttcagcatgcttggccatgcggcagtcctctcgacctgccgatcctgcagctctgagagcagcatgctttgactttctggcccggcccgcaaacttgcagtcggaattggtacggacgctgcaaaacgagctgaaggacggggcagtcgctcagattgcagtacgcgttgaagagtcacaagaggcagtccgagaagcgctggaagatgggccagaagcttggatcgtggcaacactaatgagtcgtcttctagcacgcttcagccaaaccaacctcagggcagtgcttccctatggagcacatccattttggacgccattgattcgatcccttgtagatcgccagccttctacttgggagtttttcccatctcagattcaagcgatccaaggcggccttctagaaaatgcagacagctatgccatgcagatgccgaccggagcgggaaaaaccacgctgtgcgaaacgctgctcttctcccatctatccgcgcgtcctcaagacgctgccgtcttgcttgtaccattccgctccttggcttcggaactgcgcggaaccctagttcgccgactcaacgcaatgggattaccagcgcgatgtgcgtatggaggcaccgtccctactggcgaagagatccatggcctggaccagattcgagccattgttgcaacacctgagtcgctttcgggaatcctcagtgccgatccgaccttttcgcagcgaatttcgctagtgatctgcgatgaaggccatttgctagacagcggtggccgaggcattggtttggaattactgttggcacgaatgagatcccgtccagaactaccacctcgggttgtcttcgtatcggccatcgtgcccaacatcgaagaaatcaacgcgtggctgggagggaatgacaacacggttatccgcagcacctatcgcccagcgaccgccgagttcgcggtgttgcgaccgacggggagcggtgcagggacgtctattcacttggatatgcatccacacgaagtcgtggaacggaaattcaccatagaaagactcttaagtagcgacaactttcgctatgtaaatccagccacagggcgctcaaaaacctattcattcacatcaatcaaagcccaagccgtggcaacagccagaaaagtcatgcctatgggcatgactgcgattttcgccgccaataaacgtggcgcccaaggagcggttggcctcgccgaagaactcgtgaaacaattgtcacttcctttgactcttcccactccgctcgcctttgctcgaaatgataacctgcaacgcagtatcacctatctggaaggcgagtacggaaacgcctggattggctcccaatccgtgcgtcatggtgcggtgctccatcatggcgacattcctcaggaaacgcgggaggtgctggaaagtctcattcgcgagggggatgtacgcttggtcatttgcaccagcacgttagccgagggggtcaatcttccgattcgcagtcttgtcctttactcggtacagcgtcgaaacatgagcggccccccggaggccatgctcgcacgtgacattaagaatctggttggtcgcgcaggacgggctggagccaacaccaagggacttgtgatttgcgctaaccccgatcaatggcatctggtgcagccagtggcgactcaaggtgctggcgagccggtacgtggatctctacgcagccttatccagcaattgagctccgctctcacacagcaaggattagcactcaacaatgaaatactagagggaagttccccaattcaccctgtagtcgacggtgtcgattccacccttatcgacttgatttccgaagaagtgggggaagaagtatttgtagcgcacgctcggcaactcgccgagcaaactttcgccgctcggcagcttccgcaaggacaggttgatctgttgcgcaacgttttcgaactgcgcgctcgtcggcttattgctttgcgccagacagggcagctctcctgggtccgtgatacaggggccaaagttcggcttctggactcagtggaacggatcctgctgccggcacgtgaacgctggcaggattcgattgaccctctggacaatgaattgcgcacagccattcttgagtgggcatggacgcaccgcgagcttcaaaacgatatcgtgcagaccttccgcccggcagggggcgacccggagttagttaaagatgtattctttgaactcgtccggcgctggatggcaggcgtatctttcgtagacttggctcagcagttgctgctgagcatggatgatctgctcgctatccatactcgggtgattacgttcaccctccaatcgctcgtagaccaaggccttagcctgcttacacgtcgtctacaggccgacggtattgagattgcagttggtgtcacgaacttcggtgaacagctccgctttggtgctcccaatctagcggcacgtgtgctagcgtcgtctggcgtgcgacatcgaaaggcctatgtggcgctgggcaacgcaataacccagcaaggccctgttctgaatgtcgctacgatcaagagccaagccctggaagggttgcgccagcatgcacccggttggcaagcacaactaggcgatctggtttatgccaacacttttaaggatctatcctaa

SEQ ID NO: 324996 - DNA, 1881 bp, Pseudomonas aeruginosa
atgacggcagtaactcccggttttcgcttgcgcttcctcggcttcttcggcccacagaaaccacccgcaacagtaaccttcggcgccggtctcaacgtcatttacggcgcatcgaacactggaaagtctttcattgtcgaagccatcgacttcatgctcggtggcaaaccacccctgcgcgatattcctgagcgcgtcggctacgacctcgttctcctgggacttgagacccttggtgggaagtcattcacgctctggcgcagcatggacggcggtggttttcggctctacgaagacttgtaccagacaccgccgacgaccgacatcccgtacacgcagcttgacgaaaagcacagcgataggaacagcacgaacctttcctcattcttgctggacctatgtggccttggtggcaagcgtgtccgcaaaaactcccgaaacgaaaccatcagcctgagctttcgcaacattgcgcgcttgatgatcgtcgatgagacggagatcacacaacaaagctctccgctcgttgatggcaaccccaccgccaatacgccgaacttggccacgttcaagttacttctaaccggggcggacgactctgcattggtcgccagcaagaagagtgagccggaggagttgtcacgtgaggcgcaattgcatcttctcgatcagcttcttgacgactatcgcgatcggctcaaggagttgaccaagagtccgaaggagctggaggagcagctagagaagatcgacacttcgcttcgccaacaggcggcccaggtaaacaccacagaagctgagtttcaggaggctgctgggaagcggcgagaactgcgcaaaaaactggaggaaagccgagagcggcgtgcagaggtcggcgcgatgcttgagcgattcaggctgctcgacagacattacgtgtccgatattgaaaggttgcgtgccattgaggaaggcgggacgctgtttagcgtactgggcgccgggcattgccctctctgcggcgcgaaccccgatcatcatcgcgctgatgttgggtgtaatggagacactgatgccgtcgttcaggctgcacgaatggagatcgccaagatcgaagttttgcgcgctgaacttgtagtgaccgtccaaagccttgagcgcgaaggtgccaactttgatcgcaggatgcctactgttcttcgagagctggagtcaatctctgagtcggttgaagaattgatcgcacctaagctctcgacccttcgcaagtcctattcagactttgccgacaagcgggccgaggtgcgcgaagcactggcactctacgccactgtgcaagacatggaacgccgtcgcgccgatcttgaaaaaggcaccgaggaggagaaggctggggcggttgcaaacgcagacctctcaaccactgtgacccacagttttgccaagactgtcgagggcatactgactggttggcacttcccagaggctggggatgtgtacttcgattccaagactcgggatcttgtcattgctggaaagtcacgtagtgcttttggtaagggccttcgcgccatcacgcatgcagccttcaccctcggactgcttgctttctgtcgtgctcgccagacgccgcacacgggattcgtcgtgctcgattctcctttgctggcataccgagaaccagacggaacagaagatgacttgaccggcactgaccttcaagagcagttctacgcataccttgaagcgctgcctagcgacacacaagtcatcgttgttgagaacaccgacccacctgcttcaatcatgaagcgcgagcagtcgcttatgttcggcaagaacccgcatcacggtcggtacggtttgttcccttatgtagagggcacccttagccgataa

SEQ ID NO: 324997 - DNA, 507 bp, Pseudomonas aeruginosa
atggacacgatcatgagccaagagcataagccgatcaccttcaatggcccgcttgaggccggtatccgtgcggtctcgattctgggggctgcctatccgcaaacctacgacctccagcgacttgtcgcccttgactaccttcttgttcataccggcgatattgacggcccagacaatttgcacccaccaacaccaatgcactcggctgaattgctcgtgcgccgtaaattggttgagcaatcgctgcttctgatgatgacccgcgatcttgtggagcgtgaaatcacatccgaaggaatcaagtacggcgcaggcgagaatgctgcgacgttcctgtcgtcagtatcttccaactatctgctgtccctgaaggatcgcgctgtatggcttgtcgaaaccattggcgacctgacggacgaacagttcaaaggcatgatgcgccgtttcttcgataaatgggtcgaggagttccagcacgccgagcaaagcctgggaggcgaagcatga

SEQ ID NO: 324998 - DNA, 1089 bp, Pseudomonas aeruginosa
atgacggcgagttggaaggacatcaataagccgccgagtccagcgaccgccgttacggccgctcaagtggcgaacggccccgtgatgccgccacagcaaaggctactgacctactcgccagacgagtgggagggcttcgtcgaggagtgggcttattactgcctcacgacgaagtacaaatacgtccagcgtttctctggtgctggcgacatggggatcgacgtcgcgggattcgttgacgacgaacgccttcagggtgtgtgggagaacttccagtgcaagcactacggccatgccatcaggcccagcgatgtttgggctgagttcggtaaggtcatctggcactcgtacaaaggtgaatacacagtcccccgtcgctactactttgtttcgccgcgcggtgctggcacgtcgcttagccgcctattttcgaatgccacgaagttgcgtgaggaattatttgcgaactgggataagcatgtgaaagatgcgatcaccagcacgcaagaagtgctgctcgacgcggaactccgagcctatgtggatgccttcgatttctccatcttcgacgctaagactgcactccagcttgttgacgatcaccgtgccacgccggttcacactgcgcgcttcggtggtggactgccaacgcggcctgcatccgaaaagccgccccaagaagtcgccgccaccgagagtcgctatgtgacgcagttgtttggcgcatacagcgagcacacgggaacaatcgtgactgacccctcgaccttgtccgtgccgaagctcaaggatcatttccgccgccagcgcgaagcgttctatgaggcggagtcgctgcgcgtcttcgcacgcgacagtgtgccgcccggcacattcgaatcattgctggacgacattcacgatggcgttatcgacacacatgacgggaaccatgccgatggctacgaaaaagtctgcgccgtcaccaaggcggcccgtgacatgcagattacggcaaatgccctcatcacttgtacgaaccccaaagatcgggacgggatctgccatcaactcgtgaatgaggagcgccttcgatggacacgatcatga

SEQ ID NO: 324999 - DNA, 996 bp, Pseudomonas aeruginosa
atgatcaatgcctctaccgacatcacgttccactatccgccggagctgttcaacctcctagtggatgttgtcccattgctcaaccgctccaaacaggatgtgttggtgttcttccggggcgcaggcgtgcctgacagcatgacttccgacattgccgctcacttgagggcggcgccaaaggatgtcaacaaataccagatggttcgcacggtgcttgaacgcctcaacacgaagggagaatccgctctccgtgaacggcgcgaggtgctgcggcgcgtggtggactttgcgaacttcgattcgtgctggcccaccgaccaactcaaggccaagggtcttgtcgccagtatccgcgaagtcgttaaccagaaagacgctttcacgcgcatgaacaatgctcgcgaagaagaacggcaagcccgcctcgcggagtcgcagcggatcgcagcagaaaagcgcgagcgcagtgccaggatcgagaatgccaagcagggtttatatgcattgtttggcactgccgcgacggcgcaggaacgcggcaaaatgctggaggcggctctcaacaatctctttcaagcctacggtgttctcattcataaatccttccacttggttggtgaggctggtgaagggatcgtcgagcagattgatgggatcattgaactcggtagtgttctgtacttcgttgaaatgaagtggtatcgcaatccggtgggtaagcctgagatttcagagcatcttgttcgtcttatgtcgcgtgccgaggttcgaggcatcttcatctctgccagtgactacacggaacctgccattcatacggtacgtgaatttctgcaatacaaagttctagtcctctcgacgcttcatgagatcgtccgtctgcttgaacaacaagacgacctctcggagttcttcacaaagaaagtccaagcggcgcagatacacaaaaacccgtacttctgccctcacgatagccaaggacaaggtgcgtcatga

SEQ ID NO: 325000 - DNA, 1167 bp, Pseudomonas aeruginosa
atgacaaggaagacgcctgcggcaacgcggaaacccgccgccttacctgccggctatgccggcatccacggcggcatcgtggagctactggatgcggcacgccaggcagcggcgcgcagtgtcaatgcgctgatgacggcgagctattgggagattggtcgccggatcgtggaggccgagcagaacggcaggcgacgggccggttacggcgagcagttgatggagcggttgtccgccgacctgacggctcgattcgggcgcggcttcggcgtcaacaacctggagagcatgaggcgtttcttcctcgcgtaccctcagcccgagatttcccagacactgtctgggaaattgggaaacgactcacccgccgagaaatcccagacagcgtctcggaaattcaacctgtccgaactgtcccaggtcttcaccctgccgtggtcggcctatgtccggctgctgtcggtcaaggatgaccatgcccgccagttctacgagaccgaggcgctacgcggcggctggagcgtgcgccagctcgaccggcagatcggaagccagttctacgagcgcacagccttgtccaaggacaaggcggcgatgctggtcaagggggcagcggccaagcccgaggataccgtcacgcccagcgacgccatcaaagacccgtatgtgctggagttcctcgacctcaaggacgagtactcggaatcagacttggaaacagccctgatccagcggctggaagacttcctgctggagttgggtgaaggcttcaccttcgtcgggcggcagcggcggttacgtatcgaccagacctggtaccgggtggacctgctgttcttccatcgcaagctgcgctgcctggtcatcatcgacctgaagctgggcagcctgacccatgccgatgtggggcagatgcatatgtactgcaactatgctaaggagcattgggcctacccggatgagaatccgccggtaggcctgatcctatgcgctgacaagggccatgccctggcccggtatgcactggatggcttgccgaccaaggtgatggcggcgaactaccggacggtgttgccggatgccgaactgctgcaaaaagaactggagaatacgcggcgcctgctcgaatctcgcggaacgctgtccctcaagggcgacaagtcatag

SEQ ID NO: 325001 - DNA, 1200 bp, Pseudomonas aeruginosa
atggcaagaatcaaactcaccaagtccgtcgtcgatgccgccaagccccaggcgcaggccgtcgaactccgggacaccgtggtgcccggcttcctgtgcaagatcaccccggccggccgcaaggtgttcatgctccagtaccgcacgaacgccggcgagcgccgcaagcccgccctgggccagtacggggaactgaccgttgagcaggcccgcgtcatggcacaggagtggctggccgaggttcgccggggcggcgacccgagcgcggccaaagctgccgcccgcaaggcacagaccatgaaggagtattgccacaccttcatggaggactactccaagcagcgcaacaagcccagcacgcagcgcggctatcagggcgtcatcgaccgctgcatcatccccatcatggggcggatgaaggtgcaggacgtgaagcgcccggacgtggccgcgctgatgaagaaactggcttacaagccagccgaggcgaatcgcgcctttggcgtgctgcgcaagatgttcaacctggccgaagtgtgggggctgcgcccggacggcacgaatccgtgccggcacgtcccaatgtttccgcccggcaaggaaacccggctcatcgtggatgatgagctggtgcggatcttccgccacctggagcatctggaggcggaaggcctggagaactacgtcatcccgctggcaatccggctgcaattcgagttcgctgcccgccggtccgaaatctgcccgctggagtgggattggattgatctggagaaacggcgcgtcgtctggcccgacagcaagacgggcggtatctccaagcccatgagcgaggaagcctatcggctgctttcgacggcgccgcgcctggatggttgcccctacgtcctgccgtcgcccaacgacccggcccggcatctgacgcatggcgaacactatggcggctggaagcgcgcgctcaaggccgccggcgtgccccacgtcggcacgcacggcatccgccaccgggccacgaccgacattgccaactcgggtgtgccaactaaggtgggcatgaagctcacaggccacaagaccgtggcaatgtttatgcactatgttcataccgaggacaagccggtgcgggatgcggccgaactggtggcgaatcggcggctggcgatcaccagggcatcccgttctatggaggcaacagcatga

SEQ ID NO: 325002 - DNA, 1263 bp, Pseudomonas aeruginosa
atgagtgcgctttacatgatcgtcggtaccctggtggccctgggcgtgctggtgacgttccacgaattcggccacttctgggtcgcgcgacgctgcggggtgaaggtcctgcgcttctccgtcggcttcggcacgccgctggtgcgctggcacgaccggcacggcaccgagttcgtggtggcggccattccgctgggcggctacgtcaagatgctcgacgagcgcgaggcggaagtaccggcccatctgctcgaacagtccttcaatcgcaagacggtccgtcagcggatcgccatcgtcgcggctggtcccatcgccaatttcctactggcgattctgttcttctgggtcgtcgccctgctcggtagccagcaggtgcgcccggtcatcggttccgtggcgccggagagcctggccgcccaggccggcctggaggccgggcaggaactgctggcggtggacggcgagcccaatgttgattccacccaccaggtgcgtctggatggctggctgaagggcgaggacaatcccgatcccatcgcctcgctgggcatccggccctggcggccggccttgccgccggtgctggccgaactcgaccccaaggggccggcgcaggccgccgggctgaagctcggcgaccgcttgcagagcatcgatggcatcgccgtcgacgactggcagcaggtggtggaaagcgtccgtgcccgtcccgggcagcgcgtccagctcaaggtactgcgcgacggcgaagtgctggatgttgccctggagctggcggtgcgcggcgagggcaaggcccggagcggctacatgggggcgggggtcgccggtaccgaatggccggcggaaatgctccgcgaagtgagctacggaccgctggaggcggtgggtcaggcgctttcccgaacctggaccatgagcctgctaacgctcgactccataaagaaaatgttgctcggcgagctctcggtaaaaaacttgagcgggccgataaccattgctaaagtggcgggcgcttcagcccagtctggcgtgggggattttctcaatttcctggcctatctgagcattagcttgggggttctcaacctgctgccgatccctgtcctcgatggcgggcatctgctgttctatctggttgagtgggtgcgcgggcgcccattatccgaacgggtacaggcttgggggatgcagatcggcatcagtctggtcgttggcgtgatgttgctcgctctggtcaacgatctgagtcgtctgtag

SEQ ID NO: 325003 - DNA, 567 bp, Pseudomonas aeruginosa
  misc_feature (540)..(549): n is a, c, g, or t
atgatgagtaccttgtcctacaccctgggccagctggccgcgcatgtcggcgcggaactccgtggcgacgcggacctgccgatccagggcctggcgaccttgcaggaggccggaccggctcagctgagcttcctggccaacccgcagtatcgcaagtacctgcccgaaagccgtgccggcgccgtcctgctgacggctgccgacgccgacgggttctccggtaccgcgctggtggtggccaatccctacctggcctatgccagcctgtcgcacctgttcgatcgcaaaccgaaggcggccgccggtatccatcccaccgccatcgtcgcggcggacgccgaggtcgatccgagcgccagcgtcggcgcctatgcggtgatcgagagtggcgcccgcatcggcgctggcgtcagcatcggcgcgcactgcgtaatcggcgcccgtagcgtgatcggcgaaggcggctggctggcgccgcgggtcacgctctaccacgacgtcaccatcggcgcgcgggtgagtatccagtcgggcgcggtnnnnnnnnnncccgcgcgccgatggtga

SEQ ID NO: 325004 - DNA, 336 bp, Pseudomonas aeruginosa
gtgctgatcgcctccggtaccgcgaccctcgaggcgctgctctacaagcggcccatggtggtggcttatcgggtcgccgggctgacgtaccggattctcaagcgcctggtgaaaagcccttacatctccctgccgaacctgttggccggacgcctgttggtgccggaactgatccaggacgccgccaccccgcaagcgctggccgcaaccctctcgccgctgctggacgacggctcgcagcaggtggaattcttcgatgccatccatcgggccttgcgccaggatgcttcggcacaggcggcggaagccgtcctgcaactggtggagcgccgctga

SEQ ID NO: 325005 - DNA, 1212 bp, Pseudomonas aeruginosa
atgccggcagtgccgctcgaatcccgtctgttacaggccctggcgccctggcgcgaagcggggggctggtgcgtggcgttttccggcgggctggattcgacggtgttgctgcatctgctcgcccagttggcccggagcgaagccttgccggcgctgtcggcgctgcatgtccaccatggcttgcaggctgcggcggacggttggccggcgcactgccaggcggtctgccggtcgctgggtatcccgctgcgggtcgagcgggtacaggtcgccgttggcggcagcatcgagcaggcggcgcgcgacgcccgctatcgcgcattccaggcgaacctgggcgagggacaggtgctgctcaccgcgcagcacctcgacgaccaggccgagaccttgctgttccgcctgttgcgtggagcgggcctgcgcggcctggcggcgatgccggcgagccggccgctgggcggcggccgcctgtgccgacccttgctcggggtttcccgcgccgaactggaagcctatgcgcagacgcaccggctggactgggtggaggatccttccaaccaggatccgcgcttctcgcgcaactacctgcgccgggagatcatgccgcgtctcgcctcccactggccgcaggccgtcgccggcatggcgcgctgcgcggcgcatctgcgcgaggccgaagacctgctggctgaactggccgccatcgacctccgggcctgccgccaaccctcggaactggattggccggactggctggatctgccccggatcgccctggagcctctgcgccacctcagcgctgcgcgccagcgcaacctgctgcgggcctggctgggacagctgacgcggttgccggacagcgaccactgggccggctgggagtcgttgcgcgatgccggcgacgatgccgacccgatctggcgcctggagagcggcgagctgcgtcgcggcgcggggcggatctggtggttgccggcggactggcgggcggcggcgggaccgttcgtctgggagcgtcccgctcatcccgacctcaagcgattgctcaacgaagcgggcgtaccgagcttcctgcgcggtcgtttgccgctgctcttccgagccgacgaactgctcgcggtggccaacattcctggcctggacagtccccgcgaggggggctggcgactgtcctggagcccgccgacgaacgacccgggtttgagctag

SEQ ID NO: 325006 - DNA, 273 bp, Pseudomonas aeruginosa
atgatcgcccacctgcagggaggtcacgccctcgcccaccgcttcgacgatgccgccaccttcgtggcccagaatgcacgggaacaccccctcggaatcctggccggacagggtgtacgcatcggtatggcagacgccggtggcgacgatgcgcaccagtacctcgcccttctgcggcggcgccacatccacctcgacgatttccaacggcttgttgggggcgaaggcgacggcggcacgggacttgatcatctgggaactcctgaacgatag

SEQ ID NO: 325007 - DNA, 1338 bp, Pseudomonas aeruginosa
atgcaaagcctgctgatccgcaatgcccggatggtcaacgaggggcaggtacgcgaaggcgatctgctggtccgccacggtcgcatcgaacgcatcgccggctgcctggaaaactgcggcgccagccgggagatcgatgccgccggacgctacctgctgccgggaatgatcgacgaccaggtgcacttccgcgagccgggttatccacagaagggctcgatcgccagcgaatcccgcgccgccgtggcgggcggcatcaccagtttcatggacatgcccaatacccgcccggcgacgctgagcctcgaagcgctggcggaaaagaagcgcctcgccgccgcccatagcgtggccaactacggtttccacttcggcgtcagccgcgacaacctcgacaccgtggccgccctcgatccacgcgatgtcgccgcggtgaaggtgttcatgggcgcctccaccggcgacatgctggtggacgacctgccgaccctggagcgcctgttcgccagcgttccgaccctgctgctgagccattgcgaagacacgccgcggatcgaagccaacctcgcgcgctggcgacaacgcttcggtgaacgtattccggcagccgcccacccgcgcattcgcgacgccgaggcttgctaccgttccaccgccctggcggtggaactggcgcaacggcatggcacgctgctgcatgtcctgcacttatccacagcgcgtgaactggccctgttcgaggacaagccgctgtgccagaaacgcatcaccgcggaagtctgcgtccaccatctgctgttcgacgacagcgactacgcccgcctcggccatctgctcaagtgcaacccggcgatcaagagccgcgaggaccgcgacgccctgcgcagggcgctggccggcaaccgcctggacgtgatcggcaccgaccacgcgccgcacgcctgggccgagaagcagcaggcttatccacaggcgccggccggcctgccactggtccagcatgcgttgccggcactcctagagctggtccgcgaaggctggctgtcgctggccaccctggtggcgaagaccagccaccgggtcgccgaactgttcgccatcgccgatcgcggtttcctccgcgaaggctactgggccgacctggtgctggtcagcgaactggagcacccggcgctggccagcgccatgccgctgctgtcgcgctgcaactggacgccgttccgccaccgggcattccaccatcggatcgataccaccatcgtctccgggcagctcgcctggcacgcgggacgcctgtccgacgattgccagggactgcccctgcggttttcccgctga

SEQ ID NO: 325008 - DNA, 1767 bp, Pseudomonas aeruginosa
atgtccttgtcccgtccgctgcgcctgttcctgctgttgttgccgctgctcggcggcctgctgctgtccatggactgggcgggacgccaggcgcggcagcaggcgctacgcgccgagggcgaacaggtgcgcaagcagctggacctctacgccggctcgctgcagaccctgatcgaacgcttccgcagcctgccggcggtactggcgctggatccggatctgcgcgcggcgctggccgggccgatcgacggcgagttgcagcagcgcctcaacctcaagctggaaagcatcaacctggccgcccgctcctccaccctggagctgctcgaccgtaccgggctggccgtggcggcgagcaactggaacctgccgaccagctacgtgggccacaactacggtttccgtccctatttccgccagaccatcgcccaaggctccggacgtttctatgcggtcggggtgatcagcgggattcccggttatttcctgtcccacgcggtgcgcgccgaggacggcagcttcctgggcgcaatcgtggtcaagctggagtttcccgatctggaacggcagtggaaccagacccccgacctggtcctggccagcgacgccaagggtatcgtgttcctcgccaaccacgccggttggcgctaccgcgaactggaaccgctggataccgtggaccgcttcgaactggcggagacccggcaatacgatcgccagcccctgacacccctgcgccaccagaccttgcgcagctacggcgaagacagccgtctggcgcgggtggaaagcgccgacggcgagaaggactacctctggcaatcgctggacctgcccaacgacggctggaccctgcacttgctgcgcgacaccgcgagcatccaggacgacgtcgccaccgcgcgcctggccgccgccggcacctggctggcgctggtcttcctcggcttgttcctgcaccagcgctggcgtatcgcccgcctgcggcaacgtagccgggaggagctggagcgcctggtcgagcagcgcaccgccgacctgcgtaccgcgcaggacggcctggtgcaggcggccaagctggccgccctggggcagatgtcggcggccctggcccatgagatcaaccagccgctcaccgcccagcgcatgcaactggccagcctgcgcctgctgctcgacgccggacgccacgacgaggcgcgccaggcgttgccgcgcatcgaccagatgctcgaacgcatggccgcgctcaccggccacctgaagaccttcgcgcgcaagagcgccggcggcctgcgcgagcgtatcgagttgggtcacgtggtcgaacaggcgcagcagttgttgctgccgcgaatccgcgccgaacgggtggagatcgagcaggcgctgctctggccggcctgggtgatgggtgacgcgatccgcctggaacaggtgctggtcaacctgctgcgcaacgccctggatgccgttgccggccaggagcggccatggatccgcctggccctgcaacggcttggtggcgactgggtgctgagcgtcgccgacaacggcggcgggattcccgccgagcacctgggcagcgtcttcgatccgttcttcaccaccaagccggtgggagagggactcggcctcggcctggcggtatcctatgggatcgtccacgaactcggcggccgcctgcaggtcgccaatgccgaagcgggagcggtgttcagcctgatcctgccggcggcccccgatgacacgagcgtaacgacatga

SEQ ID NO: 325009 - DNA, 1344 bp, Pseudomonas aeruginosa
atgagcgaccaggtgatcttcgtcgacgacgaagcgacgatccgcgaagcggtgcagcaatggctggagctgtccggcttcgaggtgcgcctgtgcctgcgcgccgaggaatgcctggaagcgttggacaagtccttcgccggggtggtcatcagcgatgtgcgcatgcccggcatggacggcctgcaactgctcgccaacctgcaggcggttgatcgcgacctgccggtgatcgtggtcaccgggcacggcgacgtgccgatggcggtggaggccatgcgccagggcgcctacgacttcatcgagaaacccttcacgcccgagcgcctgctcggcagtttgcggcgcgcgctggaaaagcgccgcctggtgctggagaaccggcgcctgaaggagcaggccagtctcaaggaccaggtcgatgcgcgtctgctcggcgtgtccaagccgatggaagcgttgcgccggcaggttctggccctggcgccgaccccggtgaacgtcctgatccgtggtgagaccggcagcggcaaggaactggttgcccgctgcctgcacgacttcgggccgcgcgccgacaagccgttcgtggcgctgaactgcgcggcgattcccgagcaactgttcgagagcgagctgttcggtcatgagagcggtgccttcaccggcgcgcagggcaagcgcatcggcaagctcgagcatgcccatggcggcaccctgttcctcgacgagatcgaaagcatgccgttggcgcagcaggtcaagctgctgcgcgtcctgcaggagcagcaactggagcggctcggctcgaaccagagtatccacgtcgacctgcgggtgattgccgcgaccaagcccgacctgctggccgaagcacgtgccggacgcttccgcgaggacctggtgtatcgcctgaacgtcgccgagctgcgcctgccgccgatccgcgagcgtcgcgaggacatcccgctgctcttcgaacatttcgccagcgttgccagccagcgcctcggccgcgagccgcagcccgccgcgccggcggaactggcgcggctgatggcccacgactggccgggcaatgtacgcgagctggccaacgccgccgagcgtcatgtcctcggcctggagcgcggggacgcggaggaaggcggcggcctcacctcggggctggcggaacgcatggaagccttcgaggcggagtgcctgcgccaggcgctcggccagtgccgcggggacatcaaggcggtgatggagttgctgcaactgccgcgtcggacactcaacgaaaagatgctgcggcatggcctcagccgcagcgatttcgtcggtgaagagccggcctga

SEQ ID NO: 325010 - DNA, 1494 bp, Pseudomonas aeruginosa
  misc_feature (1018)..(1027): n is a, c, g, or t
atggccatcgaacagttcggataccggcaacagctgcgccgcagcctgtccctgagcgacctgatcatctacgggatgatcttcatgatccccatcgccccgttcggggtctacggctgggtccatgccgacgcccacggcatggtgccgatggcctacctggtgggcatgctggcgatgctcttcaccgccctcagctacggagccatggccaaggcctttccgattgccggctcggtgtattcctatgcgcagcgcggcatccacccccatgtcggcttcatcgccggctgggtgctgctgctcgactacctgctgatcccgccgctgctctacgtgttcagcgcactggcgctgaaccacttgttcccggcgatccccaagctggcctggatgctgctgttcctggtctcggcgaccctggtcaacctgcgcggcatcaccttcgccgcccgcgccaacctgttgttcctgatcggagagctggtggtcctggcgatcttcctggtggtcggctaccaggcgctggaaggcggcctgggcaacggccggctgaccctcgaaccgctgtatcgcccggaggccttcgatctcggcctggtgatgaaggccgcctcgatcgccgtactgtcgttcctcggcttcgacgccatctccaccctcgccgaggaggtcaagggcgatcccgcgcgacagatcggccgcgccgcgctgatcgcgctgttcatcatgggcggcatcttcatcgcgcagacctggctggccaccgacctcgccgccgggatgaacttcaagtcggcggacaccgccttctacgagatcgccgaagcggccggtggccagtggctgtcgatgctgaccgcggtagccaccgcgctggcctggggtgtcaccgtgtcgatcacctcgcaggcagcggtctcgcgcctgctctactcgatggcccgcgacggcaggctgccgcgcgcgctggccagggtccatccgcgctaccagacgccgcacgtcagcctgtacnnnnnnnnnncagtagatgccgcaaccactggccggagcgctggccagggtccatccgcgctaccagacgccgcacgtcagcctgtacctggtggcggtgctgtcgctgggaatcggctgggccttcctcgacgcaccggacgtgctcacctcactggtgaacttcggtgccctcaccggcttctgcctgctgcacctgagcgtgatcaaccactactaccgccgccagcgctccggccagtggttgcggcatctactgttcccgctggtgggcctggcgatcatcgcctacgtgctgtacagcatgagcctcgacgcacagttgctcggactggcctggatcgcggtggggctggtctacctggcgttgctgcaacgcggcgggcgccaggcgccaacggagttggccaaggatctctgacgcctcgcgagggctgcttcaggccggctcttcaccgacgaaatcgctgcggctga

SEQ ID NO: 325011 - DNA, 753 bp, Pseudomonas aeruginosa
atgccgagctttactgacaaccccgaactcggcatctaccagctgcctccctaccgcctgctcaaccccgaagggcgcagcccggtggtcctggtctgcgagcacgccagccggcacatcccgctggagttgcagcgcctcggcctggaccaggccgcggcggaagaacacatcgcctgggatatcggcgccctggcgctggccgaagagctttcccggcggctcgacgcgccattgctggcggccggctactcgcgcctgctgatcgacctgaaccgaccgctggaggcacccgacagcattccgccgcacagcgagatctacccggttcccggcaaccgcgagctgtccgagacggtgcgccgctatcgccaggattgcctgttccatccgttccaccagcgcctgacgcaactgctcgacgagcgccaggccgccggcgtgccgacccgcgtggtcggcgtgcacagttttaccccggtgtaccacggcagaccccgcccgctggttgccggggtgctttatcgcaacgccggcgcctacgccgggcgcatcctcgacggtttgcgccggcacggcctggaagtcgccggcaaccagccctatgcgatcgacccggcggaagacactaccgttccggtgcatggcgacgcacgcggtctggaagcggtgctgctggagatccgcaacgatggattgcgcacgccggatgcggtgagcgcctgggccgagcgtctgtatccctggctctga

SEQ ID NO: 325012 - DNA, 1332 bp, Pseudomonas aeruginosa
gtgaaccgcctgcagccggtacgcctggtcagcttcgtcaccaccgacctggccggcatcacccgcgggcgctcgctgcccctggcgaccctggaagagcaactggccagcggttgcggctgggtaccggcgaacagctcgctgaccccgcaggacctgatcgacgagagcagcccctggggcagccacggcgacctgcgcctgctgcccgacccgaacagccgggtgcgcgtcgagcagggtcccgacgccgctgcgccggcgctcgactacctgcacggcaacctggtggaaaccgacggcacgccgtggccggcctgcccgcgcggcctgctgctggccgaggtggaacgctatcgcgacagcggcctgcaggtcatcgcggcgttcgaacacgaattcagcctgctcggcctgcccggcgagcgtccggccgcggcgttttcgctgcaggcccagcgtgccgccgggcagttccccggctggctggtcagcgccctggcccaggccggcaccgagccggagatgttcctccccgaatacggccagcgccagtacgaggtcacctgccgcccggcgcagggcgtggccgccgccgaccgcgcggtgaacgtccgcgaggtcactcgcgaagtggcgcggcagatgggcctgcgtacctgcttcgcaccgctgccggcacccggcgcggtgaccaacggggtacacctgcacctgagcctgcaacatgccgacggcagcccgctgctgtacgagcccggtcgacccaacgatctctccgaactcggcgagcactgggccgccggcgtgctcgcgcacctgccggcgctgtgcgcgctgaccgcgcctaccgccgcctcctacctgcgcctgaaaccccaccactggagcgccgcctacgcctgcctgggactgcgcaaccgcgaagcggcgctgcgcatctgcccggtggtgagcgtcggcggcaagccgctgggcaagcagtacaacctggaattccggccgatggacgccaccgcctgtccgcacctggcgatagccgcggtgctgatcgccggccgcctgggcatcgaacgacgcctgccgctgcgcgccctggccgatgtcgatccgcacggcctcagcgacgaagagcgccaggcccgcggcatccaggccctgccggcgaccctcggcgatgcgctcgactgcctgcagcgcgacgagacgctctgcgccgagctgccaaagccgctgctggacacctacctcgccatgaagcgccacgaactggcactgacggcgggcctttccgacgacgacctgtgccgccactatgccgagctttactga

SEQ ID NO: 325013 - DNA, 654 bp, Pseudomonas aeruginosa
atgttcagcctgccccaccactcgccgcgcgacctgccgttcggccgccggcagaccgccatcctgttcgtcgacatgcagcgcgcctgggtcgagccggggcgcgacccgcacgtcgatccgcaggcggccggctacttctacgagcgcgtgcagaaccaggtgatccccaaccagcagcgcctgctcggggccatgcgcgcagtggacgagaacgtcctgcacaccatcatcgagagcctcaccgccgatggccgcgaccgctcgctggatcacaagctgtcggagatgcacctgcccaagggcagcccggacgccagggtgatcgacgccctggagccgaccgccaacgagatcgtgctgccgaagacctcttccggcgttttcaactccaccgccatcgactacgtactgcgcaacctcggcacccgccacctgatcgtctgcggggtggtcaccgaccagtgcgtggacatggccgtgcgcgatgccgccgaccgcggctacctggtcaccctggtcgaggatgcctgtgccacccataccccggaacgccaccaggcctgcctggaagcgatcaagggctactgctggatcagcgacaccgagaccgtcctgcaacgcatcgccgccctcggccggagcaacctgtga

SEQ ID NO: 325014 - DNA, 1749 bp, Pseudomonas aeruginosa
atgctgaaactgctcgacctgctctctgccgtcgccctgctggtgtggggcacgcatatcgtccgcaccggaattctccgggtctacggcgccgacctgcggcgcatcctcagtcgcagcgtggaaaaacgcccgctggcgttcgccgccggcatcggcgtcaccgctctggtgcaaagcagcaacgccaccgccctgctggccacctccttcgtcgcccagggcctgatggcactggcgccggcactggcgatcatgctcggcgccgatgtcggcaccgcgctgatggcgcgggtgctgaccctcgacctgtcgtggctttcgccattgctgatcttcttcggcgtgattttcttcctcagccgcaaacagacccgcctcggccagctcggccgggtattcatcggcctcggcctgatcatcctggcgctccagctgatcgtcgccgccgccgagccgatgacccaagccaagggcgtcaaggtactgttctccagcctgaccggcgacatcatgctcgacgccctgaccggcgcgttgttcgccatgatttcctattccagcctggccgccgtgctgcttaccgcgaccctcgccgcgtccaaggtgatctcgctgaaagtcgcgctgtgcctggtggtcggcgccaacctcggcagcggcatcctggccatgctcagcgccaccgcgcaaaacgccgccggtcgccgggtggccctcggcagcctgttgttcaaggtcgccggctgcctgctggtgctgcccctggtggggccgctggcggactggatggatcactggcagttcagcacagccgaactggtgatcgccttccacgtgctctacaacgccgcgcgctgcctcgcctgcctgccgctgaccaacgccatggccagcttctgcacccgggtgatgcccgaccgtgcccttcccgacgacgtcgcccggccgcgccatctcgatcccgccgccctcgacacgccgagcctggcgctggccaacgcggtgcgcgagaccctgcgcatgggcgataccgtcgagcagatgctgaacaatctgatgcagatcatccgcggcggcgatccgctgctcggcaaggacatccgcaagctcgacgacgacgtcgacgccctctacaccgcgatcaagctgtatctggcaaggatgccgcgcgaggacctgtccgaacgcgacagccggcgctgggcggagatcatcgagctggcgatcaacctggagcaggccggcgacatcatcgagcacatgctcgccgccgtgcaggacaagaagacctcgcgcagccgctcgttctccgacaccggcctggaagagatcggcaccctgtaccagcagttggtctccaacctgcgcctgggtctctcagtgttcctcaacggcgacctcgacagcgccaagcgcctgcgccgggccaagcagcgcttccgcctgcaggaacggcgctacgcccatgcccatgtcgaccgcctgcaccagcaggtggtacagagcatcgagaccagctcgctgcacctggacctgatcagcgacatgaagcgtctcaactcgctgttctgcgccatcgcctacgccgtgctggacaaccctgacgcgccgagcagcgcggccgacgagggcgttcgccaggacgaggacgactgggccgacgaggtcgacgacatgacctcggcgccgctggccgagccagcgctcgtcgaggagcgtgcggaaacacgccgttcgcgacattag

SEQ ID NO: 325015 - DNA, 615 bp, Pseudomonas aeruginosa
atgatcctgctgcaactctccgcggcccagggcccggcggaatgctgcctggcggtggcgaaggcgttcgagcggctgtgcctcgaggcggcgcaagccggcgtcgaggtcgaggtgctcgaggaggtggccggcgagcgtccgcgcacctggcgttcgctgctcctggggctgcgcggcattgccgccgaagcgctcgccgagcactggtgcggcggtatccagtggatctgcaccagtccctaccgggcgaggcatgcgcgcaagaactggttcatcggcgcggagcgcttcgccgcgccgccggccagcctggagggcgagatccgtttcgagaccctgcgctcttccggccccggcggccagcatgtcaacaccaccgactcggcggtgcgcgccacccacctggccagcggcatcagcgtcagggtgcagagccagcgtagccagcacgccaacaaacgcctggcgatcctgctgatcgcccggcgcctcgcggaccaggcgagcagcgcggccgacgcgctgcgcgcggagcgccgccaggcccacggccggatcagtcgcggcgcggctcgccgggtattccgcggcgagcgtttcgagccggcctga

SEQ ID NO: 325016 - DNA, 1626 bp, Pseudomonas aeruginosa
atgcttcttcgtcgtatcgccatcaccccacgcgccgtcatcggcttcgccatcctcgcctcgctgctggtggcgctcggcctcttcgcgcacaaccgcatgggttcgctgaaccgcgccgccagggatatcggcgaagtctggctgcccagcgtcgaagcctcggcccagctcagcggcctgatgagcgaactgcgcctcggcgagatgaaccacgtgctgctgcacgacgccacgcgcatgcgccagcaggaacaacggatggacgaggtcatcgctaccctcgccagggtggaaagggaataccgccccttgctggtcctggacgaggagcgcgcgttgctcgaccagttcgtccagcgccagcaggaatacctcgaaggacacgccgccctgctcgcgctgtcccgtgacaaccgtaccgacgaagccagcgtgctgatgggcggggcccagttgcagcgctacgagcaggtgcagcggaccctgaagcaactcatcgccctcgaccgcgaggccgcccgcgcctccaccgccgaagccgccgatgtctactcccgggcctccaccgcgatcctcgcggtgctgctggtggccctggcggccagcgtgacgatcgcctggctgctaacccgcagcatcgtcgtgccgatccgccaggcggtgtcctgcgccgaccgcatcgcggcccgcgacctgaccggcgagatcgccagcgacggcgacgacgagccggcgcaactgatgaaggccatgcgcagcatgcaggccagcctgcacgacaccatcgagcagatcggcgattccgccgcgctgctggccgccgctgccgagcaactgaacgcggtgaccgaggaaggcaaccggtcgctggcccggcagaacgatgagatcgagatggccgccaccgcggtcaacgaaatgagcgcggcggtcgaggaggtcgcgcgcaacgccagctccaccgccgaggcctccagtctctcggaacgggccgccggcaacggccgcgcacgggtcgaacagaccgtccgctcgatccgtcagatgaacgccgagatcggccagaccgcgcgcctggtggaaggcctggccagccaggcgcaggacatcggcaaggtgctcgacgtgatccgcgccatcgccgagcagaccaacctgctcgccctcaatgccgccatcgaggccgcccgcgccggcgaccagggtcgcggcttcgccgtggtcgccgaggaagtccgctcgctggcccagcgcaccgccggcgccaccgaggagatccagcagctcatcggccgcctgcaacaggccgcgcggcaatcggtggaggccatgcgcagccaggtcgagcatgccgaacgcaccgccgaacaggccggcgcggcggagggcgcgctggacgaagtggtcgccgcgatccataccatcggcgtgatggccgaacgcatcgccgaaggctcgacccagcagagccaggcggtcggcgagattcgctcgcacagcgaacgcatccacgccctgggcggggaaaacctgcggctgatcggccatagccgcgaacagggcgagcaactgcggcaactgggcggcgacctgcgcaccacggtgcaggccttccgcctgtga

SEQ ID NO: 325017 - DNA, 1794 bp, Pseudomonas aeruginosa
  misc_feature (1473)..(1482): n is a, c, g, or t
atgcgccgcctgctgaccctgatcctcctgctggtcgccctgcccgccggcgcgggcctgttcgacagccgtcccggcgcctccctcggcggcggcctcgatggcggcgacttcctcaaggtcgaccaggcgttcaagcccagcgtcgagcgcagcgacgcgcagcacgtgctgctgcgcttcgtcaacgccgagggctactacctttaccgccaccgcttccagttcaaggtcgagccagcccaggtcagcctcggccaggtgcagctgccggcgggcaagcagcaccacgacgagtacttcggcgataccgaggtctactacaacatcgtcgacctggagattcccctgaacaacccggcccggcagccctataccctggtggtgacctaccagggctgcgccgacaagggcctctgctaccccccggaaaccaggcgcttcgacatcgacggcggtgccgcgacgccagccacgaacgacgcggccagcaaggacccgctcgaacacaagggcaagcgcagcctgctgttcttcttcctcgccggcctgaccctgaccttcaccccctgcgtgctgccgatgctgccgatcctctccggagtggtcctgcgcggccggccgggcggtggtcgcggcttcgtcctgtcgctcgcctacgtgctgccgatggcgctctgcttcgccctgctcggcgcgctgatgggcatgttcggcgccagcctcaatctccaggcgcaattgcagtcgccctgggtactggtgccattcgcggcgttcttcgcgctgttcgccgtggccatgttcggcttcttcgagctacgcctgcccggcttcatccgcgaaccgctcgaccgcctggccggcgatgcgcgcggcggctcgatcctcggcgcggccaccctcggcgtgctttccagcctgctggtctcgccctgcgtctccgccccgctggccgcctcgctgctctatatcagcgccagcggcgatgcctgggggggcggcctgcaactgttcgccctcggcctgggcatgggtacgccgctggtggtcttcggcgccggcggcggcgccctgctgcccaagagcggagcctggatgaacggcgtgcgcaacgccttcggcgtgctgttgctggcggtcgccgtgtggctgctggagcgggtggtgtccggcccggtggcgctgatgctctggggcatgctcgccggcggcgccggcctggccctgggcgccctcgaattcaccccgaagagcgccgcacgccgcctgctgcaactgcttggcctgatgttcctgacctacgcggtggccgcctggatcggcgccctgcagggcgagtcggacccgatccatccgctgggccgctcggtgccgtcgatccacgccgggccaccgagcacgcccggcgaatggcagaacctgaccaccccggcgcagctggacgccgccctggccgaggcacgccaggcnnnnnnnnnncgccaggccggcaagccggtgctgctggactggtatgcggactggtgcatcagttgcaaggtcatcgagcgccaggtcctcaccgatcccacggtgcaggcacgactgccggcctaccgcctgctgcgcttcgacatcaccgaaagcaacccggcccagcgcggcctgctggaccgctacaacctgttcggtccgccggcgatcctgttcttcgccccgggcggtgacgaatggagcgacttgcgcgtcatcggagagatcgacgccgccgggctcgccgaacgactgcgccgggccgctacccggcagtga

SEQ ID NO: 325018 - DNA, 867 bp, Pseudomonas aeruginosa
atggaacgcatccgccgctggtaccgccaatcgctggccgccgcgaccgaggccgcgacctgcttcgccctgggcttcagggaaagcctgcaacccgccgcactcttccgctccgcgagcctgtgcattctcgtcagcgtgctgtgcacctggctgttcgtgcatttcttcgaaccgatcatccgcctctgcggctgggccgcgctgtacacggcattcagcgtggccaacttcgccctgatccccagcggctcgctgatcgaggccggcagcggtggcccgtacttcgatccgctggcggccttcaacggcctggcaggactggcgcaactggcgttctatttcgtcggctatgccgcgctgttcttcgtcgccctgtacgccgccagcatcgtcttcggcatccgcctgtgcctgcgcatcggcctgctcggacaactgaaggaacaggtccgccaacgctacccgcgactggcacctgcctccggcgaaaggatctcgctgtggcgtgccgccggcttccgcctggcaccctggctgggcgtttccggatcgatcctggtcggcctgctggttccgctctacaacggtgtactcctgctgctggcgctggcctacctgaacatccgcttcctgctgcccgccacgctggccgggctggccgatgccggcgagcagctcgccgtacttcgtgctcgccgcggcagcctgttgctgttcggcctgctgatactgctcctggcgctggtgccgctgctcaacctgctgctgccggcggtgctcggcggcggtacctgccacctggccaatcgcggcctggcgcaactgcgcggcgaggccacgacagagagtggcagcgccggctag

SEQ ID NO: 325019 - DNA, 324 bp, Pseudomonas aeruginosa
atgccccttgccctcctcacccgcccgctccaggcctgtgtcctggtcctggccgcccttctcgcggtggcggcccacgccggaccggcgcaggacttcgccgctgccgacaacggcggtcgcgcccacctgctcgaacactgggcggcgacgcccgacgccgatcgcctggccgggatcgcctggcctttctcgaagcgctgcgccacaaccgcattgcgctggacagccgccagcagccattcctcctcggcgccgaccagcgtttccaggccgccgaaggcgacgccctgccggacggcgagccgaagccgctgcgcctga

SEQ ID NO: 325020 - DNA, 1599 bp, Pseudomonas aeruginosa
atgaaaatcagcagacaagcctacgccgacatgttcggccccaccgtcggcgaccgcgtgcgcctggccgacaccaacctgtggctcgaggtggaacgggacttcaccgtctatggcgaggaagtgaagttcggcggcggcaaggtcatccgcgacggcatgggccagagccagctgggcgcggcgcaggtggtcgacacggtgatcaccaacgcgctgatcctcgaccactggggcgtggtcaaggccgacgtcggtctcaaggacgggcgcatccaggccatcggcaaggccggcaacccggacatccagcccggggtgaacatcgccatcggcgccggcaccgaggtgatcgccggcgagggcatgatcctcaccgccggcggcatcgacacgcacatccacttcatctgcccgcagcagatcgaagaggcgctgatgagcggcgtcaccaccatgatcggcggcggcaccggccccgccgccgggaccaacgccccagtggtcgaggatcagcgcgttggtgccggcgccatcggcctgaagctgcacgaggactggggcagcaccccggcggcgatcgacaactgcctggaggtggccgagcgccacgacatccaggtggcgatccacaccgacaccctcaacgaatccggcttcgtcgagaccaccctcggcgccttcaagggccgcaccatccacacctaccacaccgagggcgccggcgggggccacgcaccggacatcatcaaggcctgcggcttcgccaacgtgctgcccagctcgaccaacccgacacggccgttcacccgcaataccatcgacgagcacctggacatgctgatggtctgccaccacctcgacccggccatcgccgaggacgtggccttcgccgagtcgcgcatccgccgcgagaccatcgccgccgaggacatcctccacgacctcggcgcgttcagcatgatcagctccgacagccaggccatgggccgggtcggcgaagtgatcacgcgcacctggcagaccgccgacaagatgaagcgccagcgcggccgcctcgacggcgacggtgcgcgcaacgacaacttccgcgccaggcgctacatcgccaagtacaccatcaacccggcgatcacccacggcatcagccatgaagtgggctccgtcgaagccggcaagtgggccgacctggtgctctggcgcccggccttcttcggcgtcaagccgagcctgatcctcaagggcggggccatcgccgccagcctgatgggcgacatcaacggctcgatccccacgccgcagccggtgcactaccggccgatgttcgccagctacgccggcagccgccacgcgaccagcctgaccttcgtcagccaggccgccttcgccgccggcgtaccgcagcagctcggcctgcgcaaggccatcggcgtggtcagcggctgtcgcggtgtgcagaagtccgacctgatccacaacggctacctgccgaccatcgaggtcgacgcacagaactaccaggtacgcgccgacggccagttgctctggtgcgaaccggcggacgtgctgccgatggcgcagcgctatttcctgttctga

SEQ ID NO: 325021 - DNA, 747 bp, Pseudomonas aeruginosa
atgaagatcgactcagcctccagctctccgagcctggcccagcggcagctgatgacccgcactcccgaccaggatttccagcgcgacttccaggccgcctacgcgcgcctcgcggtcgccgccgaaggcagcgcggagcaggccggggcgctggccgacaccctcggcgccacccagctggaatacagccgggtgcgcggcgtcagcctggaagaccagttgcgcttcgcccatgtgctcaaccgcgcctgcgaaaacggcgcgcaactggacgcccgcggcttcctcgcccgcctgggcgccgacgacctgcaggcgctgcagcgcaacatgggcctggccgagccgatccgggtcgaggcgctgagcgaggaaggcgcgcgcaacctgctgctgccggaaggctacagcgtcgacctggacggcgacggcatcaccgaggtgggcgccgcgaagatccgccacttccccccgcgcgacgcaccgcaggccttcctcgaccagtggctggcgctcaccgccggcatggacggcgccgcctattcgaacgcccgcgacgggttgcaatgggctttcgatatccgcgccatggccggccagcccctggccaccgaccagttggccagctaccgcacggcggtggacgactacctgggcatgctcgccgagcaccgccacgccctggttcccggccagtacgaacgcgacctgccgctgtaccaggcgctgcgccagcgcctggcctga

SEQ ID NO: 325022 - DNA, 714 bp, Pseudomonas aeruginosa
atgggttacgaacaaacggatggcgcaccgactgaattgtctgggcatccgattcctcaggatggaatcggatacttcaaaatccgtctgaagcaggcgatttcctcgcatagcttgcgaggattttctaaggaatgcggcttgtccgaggcgaccctgcgcagttatctgtcgggggagactttcccaaccttggatcgacttgagcagatcgcccaggccgcagggacttccgctatgtggctggctttcggcacccctatacctgcggaagatagtcgcgagaagggagacgacaattacgcctatatccctctgtatgacgctcgggtgagcgctggtcacggctcctggacagagggggcgcagatactcgctcagttggcattcactcgctacagcttgcggaagcaaggcctggagatcgcgaatatgtcggccgtccgcatcggcggtgactcaatggagccactgttgagcgatggcgatacggtgatgattgaccacagttgcaatgaggttcgtgacgaagctgtctacgtcatccgcctggatgaccacttgtacgccaagcgcgtccagcggcagatcaatggcggcctggcgatcatcagtgctaatccggcctatcagacaatgttcgtgtctaagcaagacttggaagcaatcgacattatcgggcgcgtcgtatggtcaggccgctggatggcttag

SEQ ID NO: 325023 - DNA, 357 bp, Pseudomonas aeruginosa
atgaacagaaccgaaataccccgcgacaacaacgtccgctgggagtggatcaaataccagctccgcgccaggggttcgtccctggccgaggtggcccgctccctcgacgtatccagcccggcagtcaaaaacgccaagctgaatccctaccctcgggtagagcgcgccatcgccgctgtgctcgacctcagccccctggtgctgtggcctgagcgctggctcgacgacgagaatccgaagcggcaacggcccaatcgttcggaaaccctcaaggcatatgacagtgtcatatgccgatccgggaaaaataacagatacgctgaccaagcgcagcgtaaagccgacgcgggggcttga

SEQ ID NO: 325024 - DNA, 435 bp, Pseudomonas aeruginosa
atggcccgccgcaaagacgaccgcaccctggacatcttcgatgttccgcagccagctcgcgctatacccggtgagtgcaactacgccgcccaggtcagcgagctggtcagcgaaatactgaaggccgccaacctcgaccgttacgagattgccgcccgcatgtcgcgcctctccggcgatgacgtgagcaagaacatgctcgacgcctggtcgagtcccgcccgagttgatcacaacttgcctttctaccgcgccgccctcctggaagacgtctgcgcgagccacctgctgaccaactggctggtcgatgtgcggggtggccgcgtggcctatggccgagacgcactgctcgccgaactgggccgcctggagcggacccgcgaggaagcgggtcggcaggcgcgtgagctgaaacgaatcctgggggagccgtga

SEQ ID NO: 325025 - DNA, 210 bp, Pseudomonas aeruginosa
atgacaaacaccgacctcaaaccgctgctcgacaacctgcggaacgccaccgagttctggaacctagtcaaagaggccagcgctacggacgaaagcaccgttcacaaccgttcctatcgggacgcactcgactggctcgaatcggcggccttggccctcggtgacgccctgatcgcccagcgcaaagctgtcgggggcgaccatgagtga

SEQ ID NO: 325026 - DNA, 1995 bp, Pseudomonas aeruginosa
atggccgagcgtaagtcgtggagtggacggcgccgcgtcggcaccaaggctatcgagtaccacgtttcggccctgccgaaggaaacccgcgccgcactgctgaacgccgccctgggcgaggtggccaccaaggtggtccgccaggagacgcaactggccctggtcgaaagcaaccgccagcagctggtcgccgatgcccgccagggggtgctgcacgccctggacctgatgatggcccgcaccggctacagccggaaacgctccatcaccctgatgctggacatggcgcgcctcggccaggtcgagccgcaactgctcgccatgctcaagatggcccgcgatcctcgcggccgcccgagcgcggatggcctgccgagcgtgcgcagcctggagcgcttcctggaccaagccgagcgtggcgccctggtgccgaaggtccgccgcccggacatgagcgttcccgactgggcgccggcattcatgaccatctaccaggggccggagaagcgcagcgcccgcgctgcccatgcactgctggagaagcactggcaggggcaaatgcccagcctggaccaggtctatgcgttcctgcgcaaggtgggcaacgtcagccgcgaggtcgggcgtatgggtgagcatgaaatcaaggcactgcgcccgttcattcgccgcgacttcaccaagctactcccgaccgacgtctattcctgcgacggccacacgttcgacgccgaggtccagcacccgatgcacggccggcccttccggccggaaatcaccaccatcatcgacatccgtacccgtcgaattccgggatggtccaccggcctggccgagtcggccctggtggttgtcgatgccctgcgcgacgcctgcaccaagggcggcattccggccatcttctacgtggacaacggctcaggctacgtaaaccacatgatgcgcgacgaggcggtcggccttatgggccgcctgggcatcgacatgaaaaacagcctgccctacaacagccaggcgcggggcgtgattgagcgcgtccaccagagcctgtggattcgggccgccaaggaactgcccggctacatcggcgccgacatggaccgccaggccaagctggccaccttcaagctgacgcgccgggccattgccaagggcggcaccatgccgctgatgtcttgggaatcttttgtcgcgttctgcgaacagcagattgccgagtacaacgaccggccgcacagcagcttgccgcgcatcgttgacccgaacaccggtcgtcgccggcacatgacccccaacgaagcctgggcgctccacgaagccgatggcttcagcccgatgcgggtcaccgacgacgaggcccggccgctgttccgaccccaggtgctgcgcaccgtccgccgctgcgaactggagttcatcggcaaccgctacttcgcccgcgagctggaggaattccacggcgaccaggtggccgtgggctacgacatccacgacgccagccgggtgtgggtctacgacggcgagggccgcttcctctgcaccgcagagctgaacggcaacagccgcgactacatgccggcttcgtatgtcgagcgtgcccgcgagaaacgcgcagaggcccgcgagaagcgcgccctggcgcacctcgacgagattcgcgccgagcgtgacggcgggtatgccctggaaatggatgcgccgctgtccatccccggcctcggcacgatcacccctgagcaactccggtcgcgcagcgccgcgaccctcgaaatgcaggccgagcggatcgacgaaccgcgcccggccgcagccaccgcccaagccaccaccgcccaggtcttcaccctgccgaccgctcccgcccagcgctaccggcagtggtgcgagctggccgagcggcagcgctccggccaacccatcgagccggacgccgcccagtggttcgaggtttaccccaaatccaaagaattcgccgcccagcagcggcaagcatga

SEQ ID NO: 325027 - DNA, 753 bp, Pseudomonas aeruginosa
atgaccaccccgaaaaccacccaactggccagcggcatggccgacatcgccaacatcgccctttgcgatatcgccctggagaaagcgctgtcgcgtacctccaccttgcccggcctggtctgcttctacggcccgtccggcttcggcaaatccgtttcggccgcctgggtcgccaatcgccgccgcgcctactacgtccaggccaaaagcgtctggacccgcaagcacacgctgaagtcgatcctgggtgaaatgggcatcaagccggccggcaccatcccggaaatggccgaccagatcgccgaggaactggccgccagcggccgcccgctgatcatcgacgaaatggaccacctggtcgccgctggccaggtcgagctgattcgtgatctgtacgagtccagccaagcctccatcttgctgatcggcgaggaaatgctgccgaccaagctcaagaagtacgaacgcttccatggccgcgttctgagctgggttccggcccagccagtgtccctggaggacgcccgcaacctggcgccggtctacagccccggagtggctatcgctgacgatctgctcgcgcacctggtgaagaagtccctgggctctgtccgtcgcgtcgcggtgaacctggagcagttggccgaggccgccaccgttcagggccgacgcgagctggaactggccgacctccagcgcctgaacctggagctgtacaccggtgcggccccgagcccgaggacttcgaagtga

SEQ ID NO: 325028 - DNA, 666 bp, Pseudomonas aeruginosa
gtgagcctcggcaagaacccggcccacctgtctatggtcgggggcaagagcccccgccagcagatgtgggaagtgatccgggccaaccgcgaagagttcaccgtctaccgtgtggcgcgccggtccaatcagcacgacaagaccgtcgagaagtatgtcgcctgcctgcgcctgggcggctacgtcgaggcgattcgcggattaaagcgcggcgaagaggtcgttttccggttgatccgcgacaacggcgtcgaggcaccgaacctgaatgccgatggcaagccatcccagcagggttacaccaccgaggcggtctggcggacgttgcgaatcctcggcccatcgaccccggaacagatagccgcatcggtggcggcctcgggcacgcccgtgtcgcccagcaccgttcagcgctacttcatcgacctccaaaacgccggatacctgacccgcaacggccgccactacgccctcaagccgggccgctacaccggtccacggccgcccattgtccagcgcgagacgcgccgtcaggtctacgacccgaacctggatcaggtcatgtggagttcgcacggcgagtaccagcacaaccggagtcgttcgcggggcgctgcccaggctggcgtggcggataccgaagagaacaacgaatcaggcggctga

SEQ ID NO: 325029 - DNA, 636 bp, Pseudomonas aeruginosa
atgcaaatgcatgcacagcaaggcggtagcgccgcgaaggctagcacaagccactttcgcggaactacgaacattgaggagtacatccgcgacatggcgagccgtgggttcagtcgtcgggccgtgagtaaggccctgggtatgcactggcggaagttcatagcactcctggaactcctgccagaaatgaactgggtgcctccttgccagtcatgggaccgcctgcgcgctgaccaggagaagaaggggcgtacgtgtccgatgacagaggggcgtctgcgctcgattgtcgcggcgaggcgcgccgcgatggcaaaacacacccgctataccgcgtttggtgtaacagccaccttgccggagctggtgagccagttcggccaggtcaccgccgcctccgtgcgcatgcggttggccaagggaatgcctctggagcaggcccttgcctccgtgcgcagcgatccttgtggaaggaaggtcgctgacagccatccctggaaacaggaggcgcaccagggggctatcaatcaccttgagcgtcaaaccgctgcaatgcaggaacgcgttcagggggagcgcctggaccgggcggcctcactgctgaaccaggaggtgccgccatgcgccgagcactga

SEQ ID NO: 325030 - DNA, 414 bp, Pseudomonas aeruginosa
atggaccgcgcaatcgatctgtcggcctggggcgagcgtccgcccgtcttcgtccagctgctcgccgctgaggtggcccgcagcagccagacgaaggccggcgaggcaatcggcatgagccgttcgaccgtcagcaccatcctcgccaaccgctacccgtcgccctcgacgatccgcgtcgagcgtcgtgtcctggccgcgctgagccgcattgagtgcccggccctgggcgaggcggtgacctcggtcgagtgtagcgagtacctccagcggccggcgccgctgaacaaccccgtcgcgatgcgctgctggaaagcgtgccgcgcctgtccacgcaacccgcataccgcccccatgaaacgagaggaacaaggccatgagaaccgcattgcccttgaaagtcttgacgcctga

SEQ ID NO: 325031 - DNA, 312 bp, Pseudomonas aeruginosa
atgagaaccgcattgcccttgaaagtcttgacgcctgacttggccttgagcctgcgcactttcaacgatgccgcccggctgctccagcgcatgggggtccgccttcatcgcctggagccgacagaggggcgcgtgaccatcgccgcagatgacgcccgccggctcctggagaaggggctcctgctgggtttccagcgcgacgcctcggccggcagcacccgttacatcacccgcttccagggcatcaccctggcctggagcgaaccgatcagctaccgcgacttcgccggcagcaaccccgtaattcactga

SEQ ID NO: 325032 - DNA, 519 bp, Pseudomonas aeruginosa
atggcaccgaagaaacgtctgaaatccgctgccgccgtctacgtcccgcagacccgcgaacaggtcatcagcgatatcaagaacatcggcgacctccagcgcgagctggcccgtctggaaaccgcaatgaacgatgaaattggccagatcaccgagcgctattcggagccggccgaagacttgaagaagcgcctggcggtcctccagggcggggtccagtcctggtgcgaggccaaccgcgccgagctgaccgacaacaacaaggtcaagtacgcgaacctcaccaccggcgaggtccagtggcgcatccgtcccccgtccgtgactgtgcgcggcgccgatgcggtcctggagctactgcgcagcaaggggctaatccgcttcatccgcaccaaggaagaggtgaacaaggaagcgatcctcaacgaacccgaggccgtccaggggcttccggggctgaccgtgaactccggcatcgaagacttcgccatcgtgcctttcgaagcggaggtgcagtga

SEQ ID NO: 325033 - DNA, 378 bp, Pseudomonas aeruginosa
atggccgaggaagtcagcatcgacaccatcatgtcgcaggcccaggtattcgccagtgcttgggcactggtcgggggcacattcgacgacggccacgccatcgagaacgcggaggaagccaaggctgaactgcgcgaaatgctggaggacttctgttcgaacactgacctcctgcgcgtggctgagctgctcacctcttggcaccagaacgggatgggcaagattgatacggcgctgaatgcgccggatacggccgaggttcggattggctcggtcaagctcactggttcccaagccatcggcttccgaatcggcctacgagtggcccgccagtggcttggcacactcccgctatcgctcaccaaacaggaggtgtga

SEQ ID NO: 325034 - DNA, 279 bp, Pseudomonas aeruginosa
atggctgacaccatcgctttctgctgggcctctggcttgatccagttcggtgaccaggtgcccgacggtgcaatcgagatcgcccgtggggacgaccaggtcgttcgcgaaatcatcgaagtcacctcgcgccatgcctacgacggaaagtcgctcctggtgcccggcatacccgaggcaaaaaaccaggcggaaggcattgacgccctcgaaaggttcgttcgctggatcgcctcgcacaacagcgagtcgttccaggttttcatgggagacgtgtga

SEQ ID NO: 325035 - DNA, 222 bp, Pseudomonas aeruginosa
atgcctaccaacgtggagcttgtaacccgcttgatggagtaccccaaaagcggaccgctgatgcaagcaatggtcctccaagccttggatcagttcgcttgcatggtactggcttcggagccggggtcgctcgaaagccccatggtttccgaggcgtcctggcgcgcctgcgctgaggaaatccgggaaagcctatctagccacatgcgtcgggaggcatga

SEQ ID NO: 325036 - DNA, 282 bp, Pseudomonas aeruginosa
atgaccaagacgttcgccatgtgccgcatcgacggcctgatcgagctgcgggaagagcacccaggcgagggctatttcgcccttgccgtgggcgagctggctagcgtgcgggcggcggtctttgcaaccgctgagccgcaccaggtgggccagaaagtcgcccggcgcgtgccgggtgtgagccccgaggccaccgaccgcgagaacctgggttccatcgcccgctacatccagaccctgggccagcaggatcggcccggcttccgtgcgctgggggtgtga

SEQ ID NO: 325037 - DNA, 207 bp, Pseudomonas aeruginosa
atgcagcagtccaaccccttcaatcaccccggacagagctacggcgccgtagacgtcgatagccgactccgcgccattgccggcttcgacctggagcaatgccgcgccgcgctcgcggtcaccggcctccagaagatcgtcgagaagaaagttcgcacccgcatccgccagctggaaaagcaggcatccgcacagaaggaggcataa

SEQ ID NO: 325038 - DNA, 270 bp, Pseudomonas aeruginosa
atggcccattacaccatcaccatcagcgacaccgagggcggcgtcctcttcggcatgaaaggcccgcagttgcacgattccgaagcttcgaaactggcctatgccctcatggaggcctcgaagtccattggccgggaactcgccaagctgaacggagctggtaacggcgtttcctgcgcctgcgacgagtgcctggcacgccgcgctcgcggcgaggaaccggagcaggaaatccactacaccacggccaagaaccgcaccgtccactga

SEQ ID NO: 325039 - DNA, 297 bp, Pseudomonas aeruginosa
atgacgaacgaaaccaagacggaccgccagcgccgcctggcgcgagaacgccaacgggcgaagcgcgagcgcgatgccctgcgccgcgctgcgctgggcggtcgccgcttcaacatggacatgtaccagggaacggctgatgcactcgatctgatctgcgcggccggaggcttcgccgagccggccgaagcggtcactttgctcctacacaacgtcgccgaaattgctgagcgtgacgcgtcacgttttgccgaattgatccaaaagagaagccatccagggaggaccaagcgatga

SEQ ID NO: 325040 - DNA, 402 bp, Pseudomonas aeruginosa
atgagcctacgcgccgtcaacctcgcaaaaatccacatcgccaaggcccagctaggcatggacgatgacacctatcgcgcattgctggctcgcgtcgcgggcgtgcgctcggccaaggacttagggccgcgccagatcgaccacgtacttgtcgaactccagcgcctgggctggaaaccgaagagcaaacggcaaggccgggcgacgccaaaagtgccgcaaaaccggcaaaccgtgctgcgcaaaatcaccgcgctcctggccagcgcccatcgcccctggagctacgccgaccacatggcccggcgcatgttccaggtcgagcgggtcgagtggctggacgacagccagctctaccggctgatgcaggcgcttatcattgacaggagccgccatgagtag

SEQ ID NO: 325041 - DNA, 450 bp, Pseudomonas aeruginosa
atgagtaggtctgaagtcgatcttcgggaggtccaggacatgctgccggataccgtccgcgacatggccggacgcatcggcctgccggccaccctggtggtggtcgagcaactcggcggcacgtcctggcggatagccgagggccgggcgcggaggggcgaagcgcgacgggctgcgctggccgagctggtgggcagcgacatcgaggagcagctccacacgcactatcggggcgaagaaatttacgtggctcgctgccacaaggcgctggtacggtggcgcgacctggagatcgtcgaacgcttcgagcagggcttgcgtgatgggcaaaccgcccgtagcctgctcagcgatcttgcccgcaagtacaacctgtccgaccgctggatatgggagattgtcaaccggccgagcgagccggcaccgcagcaatccaccctgttccactaa

SEQ ID NO: 325042 - DNA, 348 bp, Pseudomonas aeruginosa
atgaaagagttcaacgccccgcatccaccgcgcagcccacgcgactacgccgccgccatcctggccgagcccagccgcgagcgtcgtaacgctctgctggaagcctgcccggtcaactggcagccgctcgttcgggcgcacgtcgaggacgccttcgcgaaggtcaaggcgtatcgccagatgatggacaaccgcgccgagtcgatccggcgcggcccgcctcctgctccccgcgtcaccgacaccgatttccgcatatccaactacaccaagtccgccccggaggtaggcaatgcgcacctatccgcaattcgggcagcgctcgcaacggaagcaccaaatgcctga

SEQ ID NO: 325043 - DNA, 471 bp, Pseudomonas aeruginosa
atgcgcacctatccgcaattcgggcagcgctcgcaacggaagcaccaaatgcctgatcccgcatccacctcggccggcagcgccgcgctgctgaaaatgttcggcatccacatcagcgcgggcgccctggctgccgccctgggcttcctggtcctgtggccccgaaccatgaaagaggggttcgcccggctgttctgcaccatcgtcgcgtccagcgtctttgggccgattctggtggtctacctgcactccaaccgccccgagctgttcgagtcggcccaggtggtggccgggctctaccaactggagccagcggtcggcctgctgttcgtttccgctccgctcctggtgattgccggtctgcccgcctggtggctgatcggggcggccctgcgcctgtttgagcgggacggcgattcatggctgggcgcgttcgcccagtgggtaaaacgcaaactggagaacaactga

SEQ ID NO: 325044 - DNA, 417 bp, Pseudomonas aeruginosa
atggcccttcaacctcgcggcatccgcaacaacaaccccggcaacatcgtttggtcggcacgcaacaactggcagggtcaactcccccacgacccgcagatcgaaccgcgcttctgtcgtttcgacacggcgcataacggcacccgcgcattggccaagctgctgctgaactaccgcaaggtctatggcctgcgcaccgtcgaatcgctgatcgcacgctgggcgccgtcgaacgagaacaacacccgcgcgtatgcctcggccgtggcccgagcgatgggagttccgccgcaggccagcctgcacctggaccaggccaccctggtcgctctggtgaccgccatcattcaccaggaaaacgggcagcagccctacagcgccgagcagatcgcccaggccgtgcgggaggtgctgtga

SEQ ID NO: 325045 - DNA, 243 bp, Pseudomonas aeruginosa
atgcagcgccccagcggaatcagcctcagcgatctgttcgcgatctgccgtgaagacccggccaaccgatggctctggatacgcctctatctccgcgacctgctggcccgcgtcgtgattctggccttcatggcaattggtgccgcaggcctcgcctatggcctgggcggggcgttcgcctacggcttcatgcagaccgttgcgtcctaccaggtccagctcagcgtcgagaaatcgccatga

SEQ ID NO: 325046 - DNA, 255 bp, Pseudomonas aeruginosa
atgccctggccgaaaccgctgctgatcgcgctgcctgccgctttcctgctggcgtcatgcagcagctcgaaaccgcccgtcaacgtgccgcccaggccactaccagcggccttggctcaaccgtgcccgaccccggtggcggtgactgatgacagccccgatgccgccgcaattgcccttaaacaactctacgaccaatacggcgcttgcgccggcctgcactgggacaccgtgcggcaccttcaaaaggactga

SEQ ID NO: 325047 - DNA, 189 bp, Pseudomonas aeruginosa
atgaccgaaaagaaagcctctcccgagttcgaactgctgcaacgcatcgacggccgcctggagcgcttcgaagaccgattcccgcagatcgaacgtaaagccgtgctgtacggctcggcggccggcgcgctggcgggtggcctggttgcctgcggcctgctcgcggcgcgtatcaagctcggtatctga

SEQ ID NO: 325048 - DNA, 501 bp, Pseudomonas aeruginosa
atggcgcacccgaaggaaacccgcgacgccctgcgccgcgcctacgtcctcgaccgccagtccctggaggtcgcggccgccatgttcggcgtctcctacggcaccgctcgccgctggaaacagcaggcggaagccgagggggacgactgggacaaggcgcaatcggcgcagttgctggccggtggtggactggaggacgtggcgcgccaggtgctggccggtctggtgacccagttccaggccaccatggaagccgtccaggtagacgcggacatcaagcccgccgtgaaggtgcagctgctcgccagcctggccgacgcctacaacaagacggtcagcgcgtccaagcgtgttctgcccgaaacatcagcgctggccaccgctatggaggtgctccagcgcctggccagcttcatccgtgagcggtttccgcagcacgcccaggcattcgccgaggtgctggagccgtttggagaagtgattgcgaaggaattgggatag

SEQ ID NO: 325049 - DNA, 504 bp, Pseudomonas aeruginosa
atgatggactggattgctggtgcctacggcggcatcaaggcggccactgacattacgcagagcatgctcacgctcaagacggatgcggctgtaacgaccaaggtggtcgagttgaacggcgtgctgctcgggctgcaatcccagctgaacagcgcccacgcggatcagacgacgttgacccgccgcataggcgagttggaagccgaaattgctcagttcaaacgctgggaacaggagaaagagcgctaccagctccaccagacggaagcgggtggacttgtgtaccgcataaagccagaggttcaaggcaccgaacctctgcattacatatgtgccgactgctatcagaaggcggtcaagaccatccttcagccgggggacgaaggctactacaaggttctgaagtgtcatccatgtggttcctctgttcgggctcaaaggatcgaatccagcgccacgatggttatgtccacagggcgccgcaccgattgggatggctattga

SEQ ID NO: 325050 - DNA, 1653 bp, Pseudomonas aeruginosa
atgaagggtagcaccagagacttcctggcggacatcgcccagcttgcgggagagttccgccgccagatcgaggccgaggtcgcaggcttcgaccccgacccgaaggccagcgccgtccggcgtgaacgggctagcgcggactacgagtatttcgcccgtacctacttcccgcactacgtgaagcgcggtaacgcgctgctgcacgactacctctacaagcggttacccgagctggtggaccacccggacggccagcacgaagccattgcggcgccgcgtggtaatgccaagtccaccctggtgagccagatattcgtgatctggtgcgtactcaccggccgcaagcattaccccctgatcatcatggatgccttcgaacaggccgccacgatgctggaagcgatcaaggcggagctggagttcaacccgcgcctggccaccgacttcccccagggcgccggcaagggccgcgtctggcaggtcggcaccatcgttacggcgaacgatgccaaggtccaggtcttcggctccggcaagcggatgcgcggccttcgacacggcccgcaccgtcctgacctggtgatcggcgacgacctggagaacgacgagaacgtccgcagcccggagcaacgcgacaagctggaaaactggctgaaaaagaccgtgctgtccctcggctccgccgacgacaccatggacgtcatcatcatcggcaccatccttcactacgactcggtcctgtcgcgcctgctgaaaaacccgctgtggaaacggcgcaagttcaaggcggttatcgaatggccgcaccgcatggacttgtgggagaagtgggaggaactgctgctcaactccgacgacgagggcgccgccgccctggccttctaccaggaacgcgccgccgccatggaggacggcgcgatcatctgctggccggatgggcagcccctctacaaactcatggtgaaacgtgcccgcgatgggcactcggcgttcgactcggaacagcagaacgaccctgtccagggcgagaacgcccccttcgccgcctgcatcacgttctgggttaaccgcctggcgcagtggatgttctacggcgcgtgcgacccgtccctgggtaagcaaggctccagccgagaccccagcgccatcctggtgggtgggttcaaccgggagacaggcgtcctggacgtggtcgaggccgccatccgcaagcgcctgccggacaagatcatcgaggacatcatcgccatgcaacgggcctatcactgcctggtgtggggcgtcgaggcggtccagttccaggagttcctgcgcacagagctggtgaagcgctcggccaaggctggctgcccggtgcccgcccgagcgatcacgccacacgccgacaagttgctgcgaatcgaaagcctccagccgcacatggccaacggcctaatccgtatgcaccccagccagaccgtcctggaacaacagctgcgccacttcccggccgcagaccacgacgatggccccgacgccctgcacatgctctggatgctggccaccacggggttcgcgccgatagaggcgaccttggtcaaacgccggcatgaatacgcgcccggccttgacgattcttttgacactggcggccgcttcggcggcgcatggtag

SEQ ID NO: 325051 - DNA, 1581 bp, Pseudomonas aeruginosa
atggcacaaatcgttgacgtctacggcaaccctatccgaacccagcagttgcgcgagccgcagacctcgcgcctagccggcctggcgaaggagttcgcccagcacccggccaaggggctgacaccggccaagctggctcgcatcctggtcgaggccgaacagggcaatctccaggcccaggccgaactgttcatggacatggaggaacgcgacgcccacctgttcgccgaaatgagcaagcgaaagcgcgcaatccttggcctggactgggcggtcgagcctccgcgtaacgcctcggcggccgagaaagctgatgccgactatctgcacgagctgttgctcgacctggaagggctggaggacttgctgctcgatgcgctggacggcatcggccacggctacagctgcattgagctggagtgggcgctacaggggcgcgagtggatgccgctggcgttccatcaccgaccgcagagctggttccagctcaaccccgaagaccagaacgagctgcggctgcgcgacaacagcccggccggcgaagccttgcagcccttcggctggatcattcaccggccgcgtgcgcgctccggctatgtggcccgcagcggcctgttccgcgtgctggcctggccgtacctgttccgccactacgccacctccgacctggcggaaatgctggaaatctatggcctgccgatccggctggggaaatatccgccgggtactgccgacgaggaaaaggcaaccttgctgcgggccgttaccggcctgggccatgctgccgcagggatcatccccgaaaccatggccatcgacttccagcaggccgcgcagggtagcagcgatccgttcctggcgatgatgcggcaaagcgaagacgccatatccaaggcggtcctgggcggcaccctgaccagcaccaccagccagtcaggcggcggcgcttttgccctgggccaggtgcataacgaggttcggcacgacctactggcatccgatgcccgccaactggcggccacgttgtcccgcgatctgctctggccgctcctggtactgaaccgtcctggcagtcccgacgtgcgccgggcgccgcgcctagtcttcgacctgcgcgagcaagccgacatcaccagcatggcccagtcgattccggcactggtcaacgtggggctggagattcccagcgcctgggtctatgacaagctcggcatcccgcagcctgccaagaatgagccagttctgcgttcggctgcgcagcctgcaatcctgagccgccagcatggacaacgggtggcggccttggccaccatcgttggcccgcgctatggcgatcagcaggccctgcacaaggcgctggccgacctgccggccaaggacatgcaaaaccaggccaacgacctgctcgccccgctcctggacgcggtcaaccgcggagacagcgaaactgaactactcggcgccctcgccgaagcgttcccggacatggatgacagcgccctgacggacgcgctccaccggctgctgttcgccgccgatacctggggccgcctccacggcaacctggaccggatcgactga

SEQ ID NO: 325052 - DNA, 1287 bp, Pseudomonas aeruginosa
atggccgctccgaccgaggctgatctgcgggccatcttcgccctgcggccggccgccgctatcgagtacctggagcgaaagggattcgccatcacttggaactggcatgacgttgacgcggccacccacggccgcgctctgaccgttgccagagcagcacgcctggacgtgctccaggacattcgcgacgcccttgtcgagaacctggagcgcggcgagacgctacgagacttcaagcgcaacctgcggccgaccctggaggcgaaaggctggtggggtcgccaggttgtagtcgcgccggatggcggcgccgaggttgcacaactgggcagcccgcgccgcctggataccatctaccagaccaacatgcagtcggcctatatggcagggcgctacgcggccgcctacgaagccagggaaacccacccttactggatgtatgtggcggtgatggatggcgttacccggcccagccatgccgccctgcatgggaaagtgttcaggtgggacgatccgatctggcagcacatcaccccgcccaatggctacaactgccggtgccggatcgttgccttgacggaggccgctgttcgccgtcgcggcctgaccgtcgaatccagcctcggccggacggggcaggtcaccgtcgaaactggggttgacaagcggacgggggagattcgggaacagaccctgaccaccctggagacgaccgaccgggccgggcggaagatccaattccgtcccgatgccggcttcgacggcagtcccgtacagagtcacctgatggaccaggtgctgtacgacaaagccgagcgtaccctgggggcaccggctgctatcgacgaggtacggggtgtgctgctggacccggtccgccagcgcgcctgggaggccttcgtagatcgcgccgcgtccccccaggggcagaccatgtccatcggcgtgctcgatccgaccgatgtcacctacgccgtcgcccagggcgctcaactgcgcgctggcgtggtcgccaccagcgataccgcgattcgtaacagcgccgtcgctcgcgagcagctcgccaacctgccggagcgcttcgcccggcctgacctggtgctgtgggagcgcggcagcgagtcgttggtctacgtcgtccaggccgatggtgccgccctggcaatccgtctgcgcggcgagatatacggacccggccaactggaaaatgtcggccaggttatggagatcaccatggatagcatccaggatggcctggcgacgggccgctacaggagagtgcgctaa

SEQ ID NO: 325053 - DNA, 468 bp, Pseudomonas aeruginosa
atgacaaccaggatcgacgtcgagctggacgaccaggaggttcgccagcgcctggcggtgctgatgcgctcggtgaccgatacgctgccggtcatgcgtggcatcgctgccgagctgctcgcggaaactgagttcgcctttatggacgaggggccgggctggccgcagctcagccccgcgaccgtcgccgctcgcgaggctaaggggcgtggtccccacccgatcctccaggtcacaaacgccttggctcgctcggtcacgacctgggcggatcgcaacgaggcgggaatcgggtccaacctggtctatgcggccatccaccaatttggtggcgacgccggccggggtcaccaggtcgaaattcctgcacggcggtatctgccgttcgacgaaaacggccaactggcggccggcgctcggcagtccattctagaggtcgtccttacagccctgagccgaaatcggtag

SEQ ID NO: 325054 - DNA, 423 bp, Pseudomonas aeruginosa
atgagcagcacgatttcagaccgcatcatctcccgctcggttattgaagcggctcgattcattcagtcctgggaagatgcggaccccgacaacctgactgaaagccaggttctggccgcttctagtttcgccgccaggctccatgaggggttccaggctaccgtcctgcaacgactcgtggacgactccaatcatgaagagtatcgcgagttcaaggcgtgggaagaggcgctactcaacgcagatggacgagtcgcgagcaacccatttgccgattgggggtggtggtatcgcatcgccaacgtgatgcttgccactgcctcgcagaacataggcgtcgcctggggaagccacgtacatggtcgtttaatggctatttttcaggacaggttccaacagcattatgaggatgaggaatgctga

SEQ ID NO: 325055 - DNA, 225 bp, Pseudomonas aeruginosa
atgctgaagcctgacgcctccaaccacaatccagacccgcgctacctgcgcgggctgctcaagaaagccggcatcagccagcggcgcgcagccgagctgctcggccttggtgacagggtgatgcgctattacttgagcgaggacgtcaaggagggctaccgccccgcgccgtataccgtccagttcgccctggagtgccttgcgaacgacccgccatctgcgtga

SEQ ID NO: 325056 - DNA, 972 bp, Pseudomonas aeruginosa
atggacgtgccggcctggcggatcgatgccgccagcgccgccgccgtgatcgaccgggccagggcacgcaagacaccgcctgtcctggactatgagcaccagaccctcaagaaagaggaaaacggccagccggcgcctgctgccggccgcttcctcgatttcgaatggcgcgaaggctccggcctgtggggccgtgtcgaatacaccgcccgcgccgcacggatgatcgaggacggtgagtacctctacttctcgccggtcttcagctacgccccggacggcacggtcctgtcgattctgatgggcgccatcaccaacgaccccgccatcgatggcatggagccgctcgcccgccgagcggcggccacctttggcctttaccccacccaagaggaaatctccgtggatgaactcctgaaagccatcatcgcggcgctgtcgctcaaggaaggggcgaccgaggccgaagccatcgccgccctgaccgcgctcaagccggccttggacgcacaggcggccagcctggccacgctgcgcgaaaccctcggcttggccaaggacgctagcgtcgagcagatcgccgccgccaccagccaactgaaaaaggccgacccgagtcagaaacccgacccggccaagttcgtgcccttggaagctgtgacggacctccaggagcaaatcgccgctctgaccgcacgcctcaatggtggcgagctggacaggctggtcggtgctgcgctccaggacggtcgcctgctgccctccctggagcagtgggcacgcgacctgggcggtaaggacatcggccagctcaaggcgtacctggacaaggccgcgccgattgccgcgctgacccgcctgcagggccgccagccggaaggcgacacccacaacctcaccgacgccgagatggaggccgcccgtctgaccgggatcagccccgccgactacgccaaggcaaaaggagcctga

SEQ ID NO: 325057 - DNA, 915 bp, Pseudomonas aeruginosa
atggccattattactccggcgctgattagcgcactgaaaacctcgttccagaagcacttccaggacgccctggcgaaggcacccagcacctacctccaggttgctacggtgattccgtccaccaccgccagtaacacttatggctggctggggcagttccccaagctgcgcgagtggatcggtcagcgtgtcatcaaggacatggcggcccagggctaccagatcaccaacaagctcttcgaatcgaccgtgggcgtaaaacgtaccgacatcgaggacgacaacctcggcgtctacgctccgctcatgcaggaaatggggcgcgcagccggcgcgcatcccgacgagctggtcttcgccctgctcaaggtcggcaacgccaatctctgctacgacggtcaaaacttcttcgacaccgatcacccggtctatccgaacgtggatggcaccggcacggcgaccaccgttagcaacctgttcgcgccggccgctgatccgggggcggcctggtatctgctcgacaccagccgcagcctcaagccgttgatctaccaggagcgcatgaagccgtcgttcacttcgttgaccaaggaagacaacgagcaggtcttcatggccgacgagtacgtctacggcgtgcgctcccgctgcaatgtcggcttcggcttctggcaactggcggcgatgtccaccgaagaactgaaccaggtcaacttcgagaaagtttacgacgccatgcgcaaccagaaggccgacggcggtcgtccgctggacattcgtccgaacctgctggtggtgccgaccactctgcgctccaaggccaaggaagtggtcggggtgcagcgcctggccaatggcgcggacaaccccaacttcgaactggtccaggtactcgataccgcctggctcaactga

SEQ ID NO: 325058 - DNA, 441 bp, Pseudomonas aeruginosa
atggcacgccagaactctgcggccaagaccaccgccaaatccaagaccgatccggcgaccgaaaagcccaaggacgaaactctgccgggctccacggacgccacttcgtccaccgcacccgaggcatccgccgccaagccccaaactgctccggcgaccgagaagcccaaggacgaaactctgccgggctctacggacgacgcttcgtccaccgcacccgagacgcccgccaccaagccagctagcacctcggacgacgtcgagggcgtctttgttcgggccaccgtcgagcgccgttgccgagcgggcttctgcttcgacaaggaaggccaaggcttcgctgacggcgtgctgagcgacgagcagctggaggctctggagtcggacccgctgctcagggtcgagcgctgcaccttttccggcaaccaggagggcgagtga

SEQ ID NO: 325059 - DNA, 168 bp, Pseudomonas aeruginosa
atgaatcacgccattgcccatctggacatcgccgcgcagatcgccgagcacaacgcgccaatcagcgaggctcagggtgaagccgctcaggcggagttgcagcaccaggtcgccgccgactgccgcgaggcgctcgacgtcctggaacagttggagtcgcagctgtga

SEQ ID NO: 325060 - DNA, 474 bp, Pseudomonas aeruginosa
gtgagcgacccgttcgattacctgttcctggaaccgttgctgatcgagcgtatccgctcagaggttcctgggctggccatcgtttccggggtgtccgatctggcggccttgagtgagcaggaccagcccgcccccagcgtctatgtcgtctatctcggcgacgagataggcaccggagcggatcaccaagggggcaggcgcgccattcaggccatcggccagcaatgggcggttgtgctggtggtgcattacgccgactcgtcgaactccggcgaaggagcgcgccgagaggcaggaccgctgctgggacggctggtcaaggcactgaccggatgggctcccgccatcgatgtggcgccgttggcgcgcagcgcccgacagtctcctcccacctacgccagcggctacttctatttccccctggtgttcaccgccaggttcgtctacccgagggtcaagtcatggaaaccgtaa

SEQ ID NO: 325061 - DNA, 186 bp, Pseudomonas aeruginosa
atggaaaccgtaaaagtcacgatcactgctgagaaccccaaccacacccacgcgggcaagccggtggccaagggcgacgaaatcgaagtcacccgcgctgcggcccaactgctgctgcgtaagaagctgatcgaaaagatcccgaaatcagcgcaaggctcggccgttgccgacagcgacaaataa

SEQ ID NO: 325062 - DNA, 774 bp, Pseudomonas aeruginosa
atggcccaagtcgaaacgtactactacggccagggtaagctgaagctggccatccataccgctgccgggctgactccgtggcgctggctgggcgacgtgtccgcgctcagcggtgcgatggaagaagagtcgatgagtcaccgcgaatcgtactctggcaagaaggtaaaggtgcgcgagtggggcatttctccctcgttgaacatgaccgcaaccctgcacagcctggacgtggacaacgtcgccctgttttcccagggaaccgccagcaccgccgcagccggtactgtgaccggtgagttgctgccggccggcctggaggcaggtgaccaggttgtactggcgaaccctggcgtcagcgacctggtgatcaccgatagcgcgggtacgcccgtcacgctgaccgaggatcactatttgctggagcccgcgtttggggcgctggaaatcctcagtctgccgacgtcgccggctccgacccagccgttcattgccgcctatgagtacatggccagtaagcaggttacgttgctgtcggcggctaagcgctccaatgtggccctgcgttacgaaggcatcaacctggctgaggacggcgcgccgatcatcgtggagatttacaaactctccccagggctgctccaggaactgtcgctgatcaccgacggcaacgacgtggcgggtatgcctgtgagcttttccgcgctcctggatacctccaagccggccaatggtccgttggggcagttcggccgcattatccaggtgggctaa

SEQ ID NO: 325063 - DNA, 498 bp, Pseudomonas aeruginosa
atggcgaagccgaaggcgaaagcggctgctcccgatggcagcctggaggttctgtttcccgaccgtcaactgacggtcgggggcgtcgaggtgaccgtccgcgagctgagtttcagcgagcaactgcgccacaaccatctactcgcgccgcttggcgacagcctggccgctattcccccgcagaagatggacagcccggagtcgatcaacgtcatcttcgacgccctggccttgcacgctgacgcgctgcgcgagctgatcgcgatcagctgcggccagtctgtggactgggtggacactttgccgccagacgaaggtgaagccctggtgctgacctggtgggaggtgaacagcggttttttcgtccgacggctctggcgtccgcgcctcctggaaatggcactggccgcgcagcgctctggagccgagtcttcgccgacctcattcgcgccggccaccaccgcgacgccctcaacaactacacccggcgacagctga

SEQ ID NO: 325064 - DNA, 3651 bp, Pseudomonas aeruginosa
atggcgaacaatcagcaactgacactggccctccgcatccgcgccgatctgaacgacgcccaggacgcgctgcgtcgtctgaacggtaatgtcgatgaactgggccagagcaccaggacagcggcgcgggatgctgatcaactgaatgccgccacccagcgcatcggtggcggcatgacggcccttgctgcctccatcaaggccgctgcgctggggctgggggcgctgttcagcattcggcgcctggtcaccagcacccaggctcaactggcggcggtgaccgatgacgtataccgcatcgctcagttgaccagctccgcgctggactccaccgccaccgtctaccagcgtttcgcgcagaacgccgaccggctgaacatcagccagcggcaagtcgcatcgctgactgacacggtggccaagtccatcgcgatttcaggcgccagtgcgcagagcgccgaggcggccctggtccagtttggccaggctctggcgtcgggcgttctgcgtggcgaggaattcaactcggtcagcgagcaggcgcccgcgctgctgaaagcaattgccgatggcctcaacgtcaatatcggcgagcttcgcaagatggcgaacgaaggccagttgacggctgacgtcctggtggacgccttgagcaatgcggcggccggcgtgaacgatcagttcgccacccgcatcaagaccgtttcgatggcagtccaggaactggagaatgcgttcactcgcctggtaggtgagttcaccaatggccgaggtgcgggcgaagcgctggccggtgccatttccggggtcgccaatgtcatggacggcctgagcgataacgccgagctactgggcaccgccctggatgccgtgatggtgacggcagccgggcgagcggtggcggccatcaccgggctgaccactacctggctcagcaacgcggcggccagccgcgccgctgccatcgccgccgctcagaaagccacggccgacgaaggcgccgccgtggcggcacagcgagccgctgcccaggagctgcaacgggccaaggccgctgtcgcctcggcagaggccgaggtggtggccagccgcgcccgccaggccgccagcctccagaaccttcgggacgtccaggccgccctggtcgcggagcgcacgctggagcaggcccgccttcaggcgcagatcaccgatattggtcggcagcagtccctcgctcgcctggctgagctacggctgtccgaagcggccattatcaggcaggtccaggccgcagaggcggcgctcgcatccacgacgctggcgtcttcggccgccgtcaccgccgcctatcagcgtaggaccgccgcagtcgcggccgccgcttcggcgcaacaggccctgacggtcgccacgaacaacgcgaatatcgcctctgcggccgccgctgcggcatccagcttcctggctcgcggcatgggaacagtgacggcggtcggtggccggctgctgggattcctgggcggtcccatcggcgttatctcgatgattgccattgcggccacggcattcctggacttcggtagtgacgccgagtccggcatggaccgtgccgccaatgcaaccgagtcggctagcgtccgcatccgcaacgcctcgcggaacatcatccaggcgctgaacctgggtgacctgaagacggccaactacgaccagctcggcaagagcatcgagcagatcaagcagcaactggccgaggccgagcagatacagcagcgtgccgaggccctccaggacacggacgttcctacggtgccgggcatggacctcccgagcctggacgaagccaacgaacgggtacaggcgctgaccggagccctgcgcaggcttgaggcagagcgagccggcgaccgcttcaagaacgtgcgcgagggcaagcagtacctggagaacctggagcgccagaacgaacgcctacagaacctcaccgcgacagaagaagccctgaactacctgcgcaaggaaggtatcgacgccacgtcggagctgggtaggaagatcctggatcaggccgccgccaaccagaagctggacgccaccaacaaggccgaagccgagtccaagcgccagtctgaagcggcggcgcgcaagagcgctcagacgtcggaacaactgcgcaagagccaggagggctacgtcacccagctggaacgccaggcggccctgctgggtatgaatagcgccgaggttcgcgcctacgagctggccgagaaaggacttaccggagcgctaagggccagggcagaagctgcccttgctgctatcgatgccgacgagaagaggcgccaagccgatgccaatgcaagcgccaatgccgaccttcaggccgagtatctgcgggcgaccgggcgcaccgttgacgcggggctgctggagattcggacgaaatttgacgcgatgcgtcgggacttcgaaaaggcgggcaacgacgccggcctggcctggatcgacaagctaatccccgtcgccgaggccaaggtccgtctggatgacgtcaagcagaagatggacgacttgctggccgagcaacagcgagctgagtcatccgtcaacgtccagcaggatgccggcgttatcaacgaaatggacgctcggcagcgaatcctggacattcaccgagcgacctacgagaagctccagcagattcggccgatcctggaacagatggcccgccagcctggcgaggtcggccgagctgctgccgaatcgctcgcccagctggaagctgaagcggagcgactccagcagaccacgacgctgctcgaaaccaccttgcgggacgggctcactaccggctttaccgacgccatcaaggggctggcttccgggaccatggacttgcgcgacgccattacgtcgctgggtgaggctgtgctcaatgccttggtgaacatggcggcgcagaacctagcgcaatcgctgtccagcggcatcatggggctatttggtggcggtcagcaggacaccagcatgacgaccggcgcggcggctgttaccgcgtcggccggcgcgctttcgaccgctggggcgtcgttgctgactggggctgccgcaatccaggccgccgccgcatccctggccgctgctaacggcgtccagggcctgggcgcagccggtggcgcggcgggtgcagccggagcagcggcgggtggcggcagttggtggtcctccatcgctggagcgttcggttttgccagcggcggccatgtacgcggccccggtacgtccaccagtgacagcattccagctcgcctctcggactgggagtacgtcacccgtgccgccgtcgtgaagcaacctggcgctctggcatttctcgaacagttcaaccgttacggcatggccgcactggccggctgggcgaatcctgttcgtcacgcaacgggcggacgtgccggcattcccgcccccaacctgccggcccccgtccgtgtcggcgcgaacctgcccgaaccatccaagaacttcagtacctcggtcgccaactcgatctacctgcacgccgttcaggacacggatcagatggcggccgacatgtgggccggcaaaggcggcgaacacttcctggtctggctgaacaagaaccgccaggccgtcaagcagattatctag

SEQ ID NO: 325065 - DNA, 495 bp, Pseudomonas aeruginosa
  misc_feature (374)..(383): n is a, c, g, or t
atgcgcctttatctgctcgccttcctggccctcttcggtatgaatgctatggccgccgacaactggaaagccttcccctacgaccagagcgcctatgactatccaggcgacaagttgaaggaagcctggccgcgcctgacccgcggcttcggcgactatccctatccggacgccgactgggtggtgaacatggcgaccgcccatccggatgccctggaaaagaccgtgaaggccggcaccggcttcaccggcaagccggaagaggccgcgcaatatgcggcgcgcctgcaggatgtctggcgcctgctgttccgcggcgactacgccaaggccaaggagcagggactggctctgggagtcggcggccaggtacnnnnnnnnnngtcatcgactacaccgaacaggccggcccgctggtcaaggccgatatcgtcgcccagttcggcagcgtctacgccaaggcgcgcctggccgaggagctatcggtaccggtag

SEQ ID NO: 325066 - DNA, 408 bp, Pseudomonas aeruginosa
gtgtcagcaggcactctgttcgtagtggcgaccccgatcggcaatctcgacgacatcaccccgcgcgccctgcgggtgctgcgggaggtggccctggtggctgcggaggatacccgccattcgatccggctgttccagcacttcggcatcgagacgccattggcggcctgccacgagcacaacgagcgcgaggagggcgggcgcttcatctcccggctgcaggggggggaggacgtcgcgctgatctcggacgccggtaccccgctgatttccgatcccggcttccacctggtgcgccaggcacaggcgctgggtatccgggtggtcccggtgccgggctcctgcgcgctgatcgcggcgctgtcggcggcgggattgccgtcggaccggttcatcttcgaaggttga

SEQ ID NO: 325067 - DNA, 2394 bp, Pseudomonas aeruginosa
  misc_feature (573)..(582): n is a, c, g, or t
ttgccgcatcatcgccaggaacggatcgctgctaccctgcgcggcctgcttcagcgtggccagcgtggcttgcaccgcgagcgggtccggcgtggtgtgccggccgctctccagggcgccgtagaaaccggtgccgagggtgccgacgatgccgcagcgctcgccgagcagatccagggcctgggccaccagttggctgacgctggtcttgccgttggtgccggtgacgccgatcaggtccagcccgcggctcggctcgccgtagaaacgcccggcgaccgccgacagttgcgcggccagccccttcaccgcgatcagcggcgcatcgctgggcggcagctctccggcgccttccgcctcgtaagccacggcagccgcgcccttggccagggcatcggcgatgtgcgcacgaccatcctggcgcccgcccggcaccgccaggaacaggtcgcccggacgaacgccgcggctatccagggtcagctcgcggatcagcagatcgcgctcggcctggggaaacagttggttcaggctcataggcatcagccacgccctcattttgcgggcgcagcnnnnnnnnnnccctccttttgcgggcgcagcattgacctgctgctgttcggtggccgtcggcaggttatccggcggcacgttcatcaggcgcagcgcgccagccatgaccttgctgaacaccggcgccgacaccaggccgccgaagtagcccgccttgctcggctcgtcgatcaccacgaccatcgcgatgcgcggatcggtggccggggcgaaaccggcgaacagcgagcgataggcgttttcccggtagcccttggtgccgaccgagaccttgcgcgcggtcccgctcttgccggcggcgtggtaacccggcacctgggcgcggaacaccccgccctgggcctcgaccacttgttgcagcatgccctgcacggtggaagccacttccggcgagatcacctgcacgccatccggcacgcggtcgactcgggtcatgctcagcggcacgctcttgccgtcgttggccagggccgcataggcatgcgccaactggatcgcggttaccgagagaccgtagccgtaggccagggtcgcggtttccgccttcggccacttgcggtggttgggcaggttgccgacgcgctcgccggggaagcccaaccccgtgtcctgcccgaggccgacctgttgcatgaccgagtagatggattcggcgccgatgtcgaaggcgatcttgctgatgccgacgttgctcgacttgatcaggatgccggtgagatcgagttgccgcgaattgcgcgatacgtcgcgaatggtgtagcggccgatctgcagggtgcccgggtagacgtcgacgatatcgctgggtttccaacgcccgctggccagcgccgcgctcatcgagaacggtttgaccgtcgagcccggctcgaacacgtcgatcatcgcccggttgcgcatggccgccggctgcaggttacgacgattgttcgggttgtaggtcggctggttggtcatggccaggatctccccggtcttcacgtccatgatcaccaggctgccggccttggcgccgttctccagcagagcgttgcgcagttcgcgatgagccaggtactgcaggcgcaggtcgatggacagcgccagggtcttgcccggcttggcattcttggtgacctgcacgtccttgatcacgcggccacggcgatccttgagcacctggcgcttgcccggcacgccggccagccattcgtcgaaagccagctcgataccttcgcgaccgcggtcgtcgacatcggtgaagccgaccgcatgggccaccacttcgccagccgggtagaaacgccggaactcctcgatggagtacacgcccggcaccttcagggcgatcacgccttcgccctgttccggggtcagcccacggaccagatagatgaactcgcgctcggcgttctgctcgatgcggtcggcgaacagcttggtatcctgcccgagcgccgccgccagttgcggccagcgttccttggcggtcatcagctccttggggttggcccacagggtggtgaccggggtgctcaccgccagcggttcgccgttgcggtcagtgatcaggccccggtgcgcagggatagcgatatgccgcacgctacgcgcgtcgccctggcccttgaggaagtcatggtcgatcacgtgcaggtcgacgattcgccagacgatggcgccgaccatcgccagcagcaggccgacgatcacgcagaaccgccatgggtagagggcgccctggaaataattcagtttcatggcgccaccatcctgacctcggccgggtcgggaacgcgcatgcgcaactgttccaccgccaggctttcgatgcggctatga

SEQ ID NO: 325068 - DNA, 681 bp, Pseudomonas aeruginosa
atgccgcaaacgggacaagaacgcgacctgccgcgattccgcagcctgccctgcgcggtgtatctgcgcgccttcgagatgcccgccgggcaccgggtggagatgcacgaccacccctggggccaactgatgtacgccgccagcggcactttgcgcgccagcaccgagcggcacagctatctggtgccggcgcagcgggcgctgtggattccgccgggcgtccggcacgccgcggaggcttgcaaccctgtgctgttccgcagtctctacctggatcgttcgctgcccggcggttgccgggtactggaggtgtccggcctgctgcgcgaactgttgctgcgggcggcggaatttccccgtgaatatccgccgggtggcgaggccgagcgtctcatgcaggtggtcgccgatgaggtcgggcgccttcgcgaggcgccgctgaacctgccgttgcctggcgacccgcgcttgcgccggatcaccgacgcgctacaggcggatcccgccgatccgcgcggcatctcggattgggcgacgcaggcgctggaggagggcgccagcgtgacgcgggtggccagcgaccttggctacgactccacctcggcgttcatcagcctgttccagcgtcatttcggccagacccccggttgcttcgcccgctccctgcgcttgcccaactga

SEQ ID NO: 325069 - DNA, 297 bp, Pseudomonas aeruginosa
gtgtccttccatggcaccctggatacgccggacccggcgcatgccaggaatatcaagggcgcggtactggtcctcgacggcgcctccgatccgctggtgccgcgcgagcagttgccggccttcgccagggagatgaccgatgccggcgtcgactggcagctcaccagctacggcggcgcggtgcattccttcaccgatccgaacgccaaggtgccgggcaagatgcactatgacgccaggacctcccggcgtgccttccaggcgatggacgacctgctggcggaagtcttcgcctga

SEQ ID NO: 325070 - DNA, 1224 bp, Pseudomonas aeruginosa
atgagccagaaattcgacgtggtagtgattggtgccggccccggcggttacgttgccgccatccgcgctgcccagctgggcctgaagaccgcctgcatcgagaagtacatcggcaaggaaggcaaggtggcgctcggcggtacctgcctgaacgttggctgcatcccgtccaaggcgctgctggacagctcctacaagtaccatgaggccaaagaggccttcaaagtccatggtatcgaagccaagggcgtcaccatcgacgttccggcgatggttgcgcgcaaggccaacatcgtcaagaacctgaccggcggcatcgctaccctgttcaaggccaacggcgtgacctccttcgaaggccacggcaagctgctggccaacaagcaggtggaagtgaccggtctggacggcaagacccaggtcctggaagccgagaacgtgatcatcgcttccggctcccgcccggtggagatcccgccggccccgctgaccggcctgaacattcgcctgggcgcccgcgtgaccgcttcggaagtgaagaagaagcaggtcaccgtgaccttcaccgatgccaacggcgagcagaaggaaaccttcgacaagctgatcgtcgcggtcggccgtcgcccggtgaccaccgacctgctggccgccgacagcggcgtgaccctggacgagcgtggcttcatctacgtcgacgaccactgcaagaccagcgttccgggcgtcttcgccatcggtgacgtggttcgcggcgcgatgctcgcgcacaaggcctcggaagagggcgtgatggtcgccgagcgcatcgccggccacaaggcgcagatgaactacgacctgatcccgtcggtcatctacacccacccggaaatcgcctgggtcggcaagaccgagcagaccctcaaggccgagggcgtcgaagtcaacgtcggcaccttcccgttcgccgccagcggtcgcgcgatggctgccaacgacaccaccggcctggtcaaggtcatcgccgatgcgaagaccgaccgcgtcctgggcgtccacgtgatcggcccgagcgccgccgagctggtacagcaaggcgcgatcggcatggaattcggcaccagcgccgaagacctgggcatgatggtcttctcccacccgacgctgtccgaggccctgcacgaagctgccctggcggtgaatggccatgccatccacatcgccaaccgcaagaagcgctga

SEQ ID NO: 325071 - DNA, 822 bp, Pseudomonas aeruginosa
atgcggttgcacaagcgctcgctggtctgggggctcgcgctgagcgggctggccgtcgtgctggcggccgcctggtgggcgagccaggcgtcgcgggggccggctctgtggagcgagctgcgggtgccgccggcgtttgccatcccgcgcgatttcgacctgggcgaataccgcttgagctggggcggcaagagcctcgccctgtcagtggcgggtagcgcccggccgccgttgtgggagagcgagggcggttttctcggggccgggcgggaaagcgccggtcgcctgcagttgcgctgccaggagcagagcctggagagcttcgagctggtcggtcgacgcttgtccctgaaggggcacctgcgctgcgccgatggccggctcagcgcctacgagctgtcgttcgagccgcgccagggcggcgtggaggtgcgcgtcgcgctggcggacagcgagctgaaccgggtcgccctgtcctggcggcgtggagcgggggagcgcttgtccggtatcgtcgatgacgaggcggaaggtcgctcctgggtcttgccggccgcgcgagccgggccgggtgcaatggcgggctgcgacggagtcggccagggcctggctgttcgctgccggcaaccgcgagcagtggcagcttcgcagcgcgcgtctcgaggcggaaacgcgccgctgatccgccgggcttggcggcggcctggccggtccgtattctttgcgcccgttccggacggctgtcctggccgctcctctgccaactttcgggcgagatccttcccatgcaatgtagagccggctgcggcgcctgctgcatag

SEQ ID NO: 325072 - DNA, 597 bp, Pseudomonas aeruginosa
atggacaaggacgtatccggcgcgctgcgccgcctgttgctgctcgccatgctcggactgccactggcggcggccgctgcggtcgaaccgcagcgactggtggatgcggcgcgtgcccaggtgggcgtgaccctgggctacgacccggcctaccggcaactggactatccgggcggcgacgtgccgctgcagaccggggtctgcaccgacgtggtggtccgtgcgctgcgtggacaggggctggacctgcagaaggcggtgcacgaggacatgcgtcgccacttcgcggcctacccgcagcaatgggggatgaaaggcaccgaccgcaacatcgatcaccgccgcgtaccgaacctgatgacctggttcagccgccagggcctggcactgacgccgagccgcgacgcctccgcctaccgggccggagacatagtcgcctggcgcctggacaacggcctgctgcatatcggcgtgctttccgatcgcaggctggagggcaggccgctggtgttgcacaacatcggtgccggcgtgcgggaagaggacctgctgttccgctaccaggtcatcggccactaccgcttcccgcagggctga

SEQ ID NO: 325073 - DNA, 1158 bp, Pseudomonas aeruginosa
atgaacatgcatgccgacggtgagcagatcaccgctatcgatacccgcgaacgcatcctgctgacgggggccaccggctttctcggcggttcggtctccgcccagctgatcgccgccgggcacggcgccaacctgtccttcctggtccgcgccgaatcccgccagcaggggctcgaacgcctgcgcggcaacctgctgatgcatggcgtcgacgaaaccgactgcctggcactgcgggcggagcagatcctctgcggcgatttcctcgacacctcctggctggcccgcgagacgccgcgcctgatgcaggtggagcgggtgatcaattgcgccgccgtagcgtcgttctcgaagaacccgaccatctggccggtcaacgtcgacggcactttcgccttcgccgacgtgctgagccgttcgaagcgactgaagcgtttcctccacgtcggtaccgcgatgtgctgcggaccgcagcgagagtcgccgatcagcgagtcctgggagttcccggcggcggagcagcaactggtggactacaccgcgtccaaggcggaaatcgagcggcgtatgcgcgaggaactgccgggcctgcccctggtggtggcgcggccatccatcgtggtgggccaccgtacccttggctgccaggcctccggtagcatcttctgggtcttccgcatgggcttcgccctggaaagcttcacctgcggcctggacgagcagatcgacgtgatcccggtcgactactgcgccgaggcgctgatcggcctggcgctgaagccgtgcctggggcacagcctctaccatatctccgccggccatcgcgcggcctgcaccttcggtgagatcgacgaggccttcgcccgcgccaacggggcggcgccggtaggcgagcgctaccgcaaggtggaggtggacgacctcaaggaactggcgaagagcttcgagtcgcgcatcggcccggccaatccgcgtctggtcctgcgcgcgttgcgcttgtacagcggctttgccgacctcaactacctgttcgacaacagccgtctgcttgaggaggggatctccgcgccaccgcgcttcaccgactacctcgacgtctgcgtgcagtcgtccagcgcggtgagcatcccggcgcagatgcaatgggacttcaagtga

SEQ ID NO: 325074 - DNA, 531 bp, Pseudomonas aeruginosa
atggtcagcgaggtcgacgaactgcgcgccatccgtggccgcctcggcgagctggccacgcaattggggatcgagcgcctgcccgaactcggggtgatgatcgaggtgccctccgccgccctgctcgccgatcaactggccgaacacgccgacttcctctccatcggcaccaacgacctgtcgcagtatgccctggccatggaccgttgccacgccggcctggccgaccgcatcgacgccctgcacccggcgctgctgcgactgatcgcccagacctgcgccggagcagcccgccacggccgctgggtcggcgtctgcggtgcgctggcctcggacccgctggcgacaccggtactggtcggcctcggggtcgaggaattgtccgtcgggccgaacctggtcggcgagatcaagacccgggtgcgccagctcgacgccgccgaatgccgccgccacgcccaggcgctgctggacctgggcagcgcccgggcggtgcgcgacgcctgcctgcaacactggccgctggcctga

SEQ ID NO: 325075 - DNA, 219 bp, Pseudomonas aeruginosa
atgggccagtcggtgcagcgcccagctcagtacggatgcctggtccgaatcgcttttcacgacggtcaccggaggcagcccgtcgaacagcaggttggcttcttcgccaaaggcgaagcgaccgccgatcaggaaacaatcctcgctttccccatagtgcgcgacgccgtcaggggcatctcggtagagcagcgtggcgtcggcggcgggaagggatag

SEQ ID NO: 325076 - DNA, 402 bp, Pseudomonas aeruginosa
atgctggcgcaggtgctgcggctctatctcgccggcgagggcagcgacacgcccagttggctgctggcgttgtccgatccgcgcataggcgcggcgatccgggcgatccacgccgagccggccaaagtctggacggtcgagcgcctggccgacgtagcgggtacctcgcgctccacgctggccctgcgtttcaagcaaaccgcgggactggcgccgctggaatatgtatcgcactggcgtatgcaattggccgctcgcgccctgcgcgacagcaaagcgacgatttcctcgatcgcgcaaaccctgggctacggctcggacagcgctttcagcaacgccttcaaacgcatcatgaaatgctcgcccagagactatcgcagccggcaggccagcagggcatag

SEQ ID NO: 325077 - DNA, 1149 bp, Pseudomonas aeruginosa
atgacctccagcagcgtagggaaaggtattgccatctccggcatgttcttcatgctcggactgtgtttcgggagcctcagctcccggatggccacgataaaagacggactccagctttccgacggggtgttcggcagtgcgcttttcgccatgtcggccggggtggtgctttcgttgccggtatccggctggatgatcgcgaagctcggcagcagaaacgttggagtaacggcgattctcacgaacgccgttctgctgtccttggttcccttggcttctagcgtctaccagcttgctgccctgttgttcgtatcggggttctcctatagcgcggtcaatgtgtcgaacaatacccaggcaagcctgtcggaggcgctcagcggaaagaccgagttgccgttcttccacggtatatgggggttggcgggattcgtcggcgccgggttcggggcgttgatgatcgggcaggactttgccttgtccacgcatttcggcgtgatatcggtgatcgccttcctggccgccctggcctgctggcgctttctccacgaccagcctggcgcggagcgggtcgggcgggccttcgcgatgccggacaggaggcttttcaactacgggctgatcgtttttttctcgatggcctgcgaaggcatcatgtacgactggagcgtcgtctatttccaggacgtggtatcggccgagcggcaactggtcggagtcggcttcatggtattcatgggcgccatgactgtcggccggcttctgctgaaccgggtcgccgatcgtttcggtacgcgcagcaccttgcagtggagcggggggctcgccttgatcggcatggtcacgacgattgcctatccgagcctgccggcgtcgatcattggcttctgccttgtcggtctcggcatctgtaccgtcattccgctggtggcgggggccgccgcccgctcctcgagcatggcgccgagttcggctatcgcagccgttctgacgataggattcctgggcacgttgatcggcccgccgctgatcggctttctctccgaagcgttcggcctgcgttatgccttcggcgcgtgcgtggtcctggccatcgggatcatccttcgggcgggaaagataccgcggcaagctccgtcggtcgtttga

SEQ ID NO: 325078 - DNA, 2607 bp, Pseudomonas aeruginosa
atgacgacggaagcagaggcgctcgccaacatccttgcgtggtctgctgatagtcccggctggcagcgcgacgcactgcgccgacttgcaacgcaagcggctctggagccggccgagatcgacgagctggcttccatctgcaagggcgacaatccggcggtcccgctggaagctgggcaccttcgcggcccgaaccgcgatcagggggaagtctatctgcggcaggtgcatggagtccggcatgtcaacgccctggctcccgaccaacggctgacactccaccgcgtcggtttgacgatcatctatggcgacaacggatcgggaaaatccggctacgcgcggattctcaagaaggtatgtcgcgcccgtatgtctggccgagccgaggaaatcgcccccgacatctatgacgctgcgccaggcacgccgagcgccactattgaatacgcgatcagcggccagaaccgcacttgcgcttggcagcttggtcaggctgccgacaacgcgctttcaggcatcagcgtgttcgattcccgtaccgcgaacgtccacgtggacgatacgaatgacgtggcttacacgccgtttccgctcaagctgctaggtgcgctggcgcagctctgcaagtcggtcaaggataagctggcagccgagatcgcgcagataaaggcgcaaacgcccgaagcgatcaggaccccggcatgcagccgggacacagcggtcggcaagctcatggcccgaatcaccgccaacactgcgccggcgacggtcgaagcgttggcagcgctcacgcaagcagagcaagaccgattggcgcagctcacggcggacctggcaggtgatccggctcgcgcggcgcgtcagcttgcggcgatgaaggccaaggttgacgggcacattgcgcgcctggatcggctatttgcttcaatcagcgacgattccgccaataacctgcgccgccttgccgttgatagcgatgccgcacgccgggcggcagaagctgcttccagtgcgcttttccgcgacgaaccgttgccgcagattgggtcggaggtttggcaggcgctatgggccagtgcccgagcgttttctgacgcggaagcctatcccgaacggcgattccccgtcacagaccccggcagcgtatgcgtgctttgccagcaggaattgacgcccgtcgccgctgatcggctcaatcgcttcgaggcttttgtgcgcgacgacagccagcaacgtgccgacgctgcgcgcgtcgcatacgacagggcgctggcaacgttcaagggtgaggctgtttcgttggccgagctggcgaacattgtggcaaccgtccgcgacgaactgcgccaggatgccttggcgatggagatcaggggcgcgacccttcgcgccctgtggcgtcatcgccagatcaggcgacgccacgcaaatccaagcgccgctattgacgtgcccgttacggaatattcgcgtcaggcactggtcgatcaagcagcgggcatcgagactcgggcgaacgcccttgccgcggaggctggctctccagctcgcgccgccttgcttaccgaaaaggccgagcttgtggatcggcaatggcttggtggcatcaaagccgatgttctcgccgaaatcgaacgacagaagaaaatcgcactgcttgagacggcccagcgggacactgctaccaaccgcgtcaccaccaagagcaccgagatcgctcaggctttggtgacggacgcgctacgcgcgcaatttgctcgcgaggtggcgagcttcgagattgctggcctcgctgtggagcttcgacagcaaaacagcgttcagggcatccctcgcttcaaggtcgcacttacacggaagcccacggctgcggtgggacaggttttgagcgagggcgagcatcgctgtgttgccttggccgcgttcatggccgaactcgccaccaccgaaaacaagtctggcatcgtctttgacgatcccgtttcctcgctcgaccacatgcaccgggaggccgtagctaaacgcctggttgctgaggccgctcatcgccaggtcatcgtcttcacccatgatcttgcgtttctgttcgagctgaaccgcgcggctgacgatgcgcagccaaagccgccggttgcgattagctccatcagccgaggtgctgacaaggcaggcttctgccgcagcgagccgccattcaaagcgcgtcgggtcagtgacatcaccacaagtctgagcaatcagcttgccggtgaacgctaccatttcgagcaaggcaatcaagacgagtggcgaaagtccgtcaaatccatcgccgcgacgttgcgcgatacgtgggagatcgcggttgaagaagctgtcgggcacgtcatccggcggctgtccaacgaagtgaagacgcctggcttggtcaagctgaccgcgatcacggttcccgactgcgaggccatgcgtgacggctttggccgctgttccgagctgctgcacagcgccgccgctgcgttgaaccgcccgctaccgaggccagagacactgacagcggagattgataccttggcggcctgggcggacagccttcggcagcgtcagggcgctgcgaggttgccctga

SEQ ID NO: 325079 - DNA, 234 bp, Pseudomonas aeruginosa
atgacgaagactcatcaggaagaacaggctgagccgtttttcatcaccgaggaagtcgaggccgaattgatcgcggccggctacgaattcgaaccgcctggccacgcgaggaccgcaagcatctccgagctgttcggctggcggcctggtgagacgctgtcggaagccgtgagcaggcgcttggcgagcactggcacagctagcgagtgcgaaccgcgaggcaaaggtctatga

SEQ ID NO: 325080 - DNA, 1185 bp, Pseudomonas aeruginosa
atgagtaactccgatcttgacgacctggcggcagagctggccgagttcgcgccgcctgagaagaaaaatggccgcccagccagcgaggagcgtgtcattgccggcttcgaggaaatccaacgcttcacagagcagcacgggcgtgcgcctcagcatggcgaagaccgcgacatattcgagcgcctatatgccgtgcggctcgaccgtctacgcgcgctaccggattgccgcaccttgattgagccgctggaccatcagggcttgcttgctggggcatcgaccgttgccgcttcagcggacgaaactatcgacatcgacgacctggctgccgaactagcggatgttgccggcgcggacgacatcacggtcttgcgccatgtccgtaccagcgccgaaaagcgcgccgccgaggaggtcgcggatcgcaagccctgcgaggacttcgaaaccttccggcccttgttcgagcgcgtgcaagcggaagtcaagaccggtatgcgccagtcccagcccatcgaagcgggtcgccgtgcgattgaagccggggactttttcgttctcgatggccttactctctacgttgccgaggtcggcgagccgttgaaaaccaccgccggggaggtggaccgccgcctgcgcctcatcttctccaacggcaccgaaagcaatttgctgctgcgctcgctccagcgtgcgttctacaacgaccctgccgcgcggcggctggcctcgcccgagagcgggcaactctcctttggcggcgagcttgaggcggatgatgtggaaagcggcacgatctacgtcctgcgctccctgtccgatcatccctacgtcgcccagcaccgcgacatcatccacaagatgggcgtgacgggcggcagggttgaaacgcgcatcgccaacgccgagaacgaagcgacatatctgctggcaaaggtcgaggtcgttgcgacctacaagctcgcggggatcaatcgcattcggatggagaacctgttccacaggctgttcgcgaccgcacggttgaacatcactatcaatgaccgcttcggtcaccccgtgcagcccgaggagtggtttcttgttccgctgttcgttatcgacgaggccgtcgcgcgcatcaaggatggcagcatcaccggctacatctacgatcccaaggctgcgaagctggtgaaggcatag

SEQ ID NO: 325081 - DNA, 2058 bp, Pseudomonas aeruginosa
atgaacaacatcaaacctcggagcgtcccctccgtatctgttacgtatgcgcgtaacggtgcatcaaccaaggctaatgcgctcggtatgcgtccgatgcaggagcgggcctatgacaagcggggcgagcagtacctgctcatcaagtcgccgcccgcttcgggtaagagtcgcgccctgatgttcgtggcgctcgacaaattgcagaaccagggcttgaggcaagccatcatcgtcgtgcccgagaagtccatcggggccagcttcaacgatgagccgctgtcaaagtacggcttctgggctgattggcacgtcgagccaaagtggaacttgtgcaatgcgccaggcaacgacaacggcggtaaggtcaagtccctcggcgcgttcctcgaaggcgacgacaaggtgctggtctgcacgcacgccactttccgattcgcggtcgatgcctatggcatcgaggcgttcgacgaccgtctgatcgccgtcgatgagtttcatcacgtttcggccaaccccgacaacaagctgggcacgcacctgggccagttcatcgcgcgagacaagacgcacatcgtcgccatgaccggctcctacttccggggcgacgcggaggccgtcctcgctccgcacgacgagtcgaaattcgataccgttacctacacctactacgaacagctcaacggctacgagtacctcaagcaactcgacatcggctatttcttctacagcgggccttatgtcgatgacattctcaatgtcctcgaccctgttgagaagaccatcatccacatccccaacgtcaattcgcgcgaaagcacgaaggacaaaatgcgcgaggtggagcacatcatcgaggcgctgggggagtggcatggcatcgacgccaccacagggttccagctcgttaagctccccgatgaccgcgtgttgcgcatcgctgatctggtcgatgacgatgcctcgaagcgcgaccgagtgtccgccgcgttgaaagacccggctcagaagaacaatcgcgaccatgtggacatcatcatcgcgctgggtatggcgaaggaaggcttcgactggatttggtgcgaacacgcgctgaccgtgggctaccgtgccagcttgaccgagatcgttcagatcattggtcgtgccacccgagatgcgcctggaaagactcgcgcgaggttcaccaaccttatcgccgagccggacgcgaccgaggaagcggtcaccgaggccattaacgatacgttgaaggccatcgcggcgagtctgctgatggagcaggttctcgctccgcgcttcgagttcaagcccaagaatcccgacagcggcccgacgccaggctttaattatggcgagggtggctatgacccggaccgctgcaacatcggtgtcaatgagcagacaggggcctaccagatcgagatcaagggcctcgccgaacccaagagcaaagaggcagcgcgcatctgccaggaagacttgaacgaagtgatcgcggctttcgtgcaggacaagcacaccatcgagcgtggcttgttcgacgaagagctggttcccgaggagctcacgcaggttcgcatgggcaagattatcaaggacaaatatcccgagcttgacgctgaagatcaggaggcggtacgccagcacgccatcgccgccctcaaccttacgcagcaggccaagcggcttgtcaccgaaggcgagagcgacggatcgcccaacaccgccctgatcgatggcgtgcgccgctttgcgatggacgtgcgcgagctggacattgacctcatcgaccgcatcaacccctttggcgaagcctatgccatcctcgccaagacaatgagcgaggacagcttgaagcaggtcgcggcggccatctcggccaaacgcacctctatcacgcctgaagatgccaaagtgatcgccaagcgcgcggttgagttcaaacgcgaacgtgggagggctccatcggttacctcgcaggacgcctgggaaaagcaccttgccgaaggtgcggccgccttcatgcggttcagggcggagggacgctatgagtaa

SEQ ID NO: 325082 - DNA, 201 bp, Pseudomonas aeruginosa
atgatggagaagatctcgctgcctatcccggaaacgcatggtttcgacatctacgatggcaaggtccttttgttccaacgagccgaaggccgattcgtcatgagggcattggaggcggacgatttcgaaacatctttcggtgaccgtctggcggaggttcgtgtcatgaacagcggcaggcgttatggccatatcacatga

SEQ ID NO: 325083 - DNA, 2781 bp, Pseudomonas aeruginosa
atgaatgccgtagaaatcgaacaagccatcaccgacctcgcggagcagcccttcgaccgtgcagagttcccctacgccttccttgaagcctttggcaacaaggcgacgacaatcaagcgcctgcgtgcgggggcgtcgaacaaatccgacctcggcggtgttctccagaccagcaacatccacattctgaccagcgacgctgggcgggtgacgcagacgctggccgctctcaaggccagccctgcgacggccaaggccaaggcgaagttcatccttgctacggacggcgcggacttcgaggccgaagacctgaccagcggcgagaccgtcgcctgcgccttcaaggactttcccgatcacttcggcttcttcctgccgctggcgggcatcagcaccgtccgccagatcagtgaaaacgctttcgacatccgggccaccagtcggctgaaccggctgtacgttgaattgttgaaagacaacccggcctggggcacagcggagcgccgccacgacatgaacaagctcatggcgcggctgatcttctgcttcttcgccgaggacaccgatatctttggcggcaggggcaagttcaccgagaccgtcgcgcggatgagtgcgggggattcgaccaatacgcacgaggtcatcgccacgctgttccgcaccatgaataccaagcgtgaagaccgggcggccgccgggctgccccggtgggccaatatcgacgatttcccctacgtcaacgggcagttgttctctggcggcgacgaagtgccgcgattcagcaagatcgcccggtcctacctgctgcacgtcggcgggctggactggaccaagatcaacccggacatcttcggatcgatgatccaggccgtcgccgaggacgaggagcgcggcgagctggggatgcactacaccagtgttcccaacatcctgaaggtgctgaacccgctgtttctcgacgacctgcgtgcaaagctagaagaggcgggtgacaacccgcgcaccttgctcaacctgcgcaagcgcatcgccaagatccgagttttcgacccggcctgcggctcgggtaacttccttgttatcgcctacaaagagatgcgtgccatcgaggcagagatcaacaagcggcgcggcgaaccagatcgcgcgtctgacatcccgctcaccaactttcgcgggattgagctgcgcgacttcccggcggagatcgcccgccttgcgctggtcatcgccgagtaccagtgcgacgtgctgtaccgagggcagaagctggccctggccgagttcttgcccctgcgcaatgagaactggattacctgcggcaacgcgctgcgtcttgattggttgagcgtttgcccgccgactggaacgggggtgaagttgcaggcggacgacctgttcagctcgccgttggaccaagcccagatcgacttcgagaacgaagggggcgaaacatatatttgtggcaacccgccgtatctgggaagcaagtggcagtcagacgaacagaagggcgagcttaaggcgatcttcgaacgcattggtgtcgcgtggaaatctctggactacgttgccgggtggttcatgaaggctgcagcatatggcgagcgcactaatgcggccactgccttcgtttccaccaactcaatctgccaaggcttgcaggttcctattttgtggcctgcaatttttaacaccggacaccagatcgtattcgcgcacacatccttcaagtggaccaatctcgcaagcaataacgctggtgtgactgtggccatcgtgggtatttcatccacgccacaacctattaaaaggttgttctccgtgagtgaggatggctccgtgcaggagcggcaagttgactatatcaatgcctaccttgtgccggggcgcgtcaactcggtggagcaggagcgtcgaccgatttcatctgtatcgcccatgctgtttggcaacatgccgcgtgatggtggtgcatttgttttggacggcgaggaacgagcacgtgtgctgatgcagcaccccgaactcgaacgcttcgttcgcccgtacatgggctctgaacagatgatccagggaaaacctcggtggtgcctgtggattgaggacgacgatgcgccttatgcgcagcaacacccctacctgaagacggtgttggaccaagtacgggattttcgcctatcaagtgctgccagttctacccgcgacttcgcggcacggcctcatcgcttcgtccaaattgccggtaccgctaagcagcattcgcttgtcgtggcgaaagtctcgtccgagcgccgaccatacctgcctgtggaccttttagacggcagcgtgatcgttagcgatctcttgttcgcgctgtatgacgcgccgctatggaacttggcggtgttggcgtcacgacttcatctcgtgtggattgcaaccgtgtgcggaaaaatgaaaaccgacttccggtattcgaacaccatcggctggaataccttcccactgcctaagttgacagagaagaatatcgatgacctcaccagatgcgcacaagagatcctgctagcgcgtgagcgccactacccgcagactcttgccgaactctatgcgcctgacgcaatgccgaccgatctacttcgcgcacatgagcgtaacgatgaagttgtggagagaatctatataggtcgcttattcaagaatgacacggagcgccttgaaaaactctttgagctctattcacgcatgtccggtcaagcgggtgccgggcagcgccgagtcaaacgagcgtaa

SEQ ID NO: 325084 - DNA, 201 bp, Pseudomonas aeruginosa
atgaaccaacccgatagcgaaattctcacgctggatgaagtggcggtctacctcaaggcagggaagaagaccgtataccggctggcccagcagggggagataccgggattcaagctgggcggcacctggcggtttcgtcgcagcgagttggatcgctggattgccgcgcagatagccgagaagacgcaggacaagacatga

SEQ ID NO: 325085 - DNA, 339 bp, Pseudomonas aeruginosa
atgggcaaagaggaaacagagaaagtggatatggaacattggctacatgaacggatcggcccagcctacgatgcgttgaaggccgacccaggccgcgccgttaccgctgaccaggtgcgcacccgtctggccgacatcgcccaagctatcgaactggcccgccgcgtcgatgcggacctagaatccctaacgccctttgacccggccgaagacctgaccaccgccgaagccgtggccgcattcttggcggacgccgaggccacggccgacccggcttatatcgagcacgcgcaccaggtcgcggcacgtgcgcgaaccatgcacggcatcgcgtcgtga

SEQ ID NO: 325086 - DNA, 231 bp, Pseudomonas aeruginosa
atggcaactttgaatcctaccaacgcaactcaggcagtgcatcatgcggccgtgcagctcgcggccctagactggattgaccaggatgcagcccggcagctcgggccgctggccgaagcagtcgccaatgccttcatggtcgtcttctaccaggccgagacgggccgagcgacgccggcggacttccgtgaggcactgaatgccgtgcgccagtcgcttcacccagcgtaa

SEQ ID NO: 325087 - DNA, 1587 bp, Pseudomonas aeruginosa
atgaaagcactgcacaaggcggcgctgatcggcgtcgcgctcgcgctctactccacagccgcgtcggcccagctcaccaaccaggggatgcttgaccaagtggtaacggagttcgccacgcgggccacggcctggcagacggtggtgatgaatgccgcgacgttcttgttctggacgctgggcacgatctcgctggtcatcaccttcggcttcatggcgctgcgcaaggctgacattggtgagttcttcgccgagttcatcaggttcatcctgttcttcggcttcttcctctggttgctgcgcaatgggccgaactttgccaactcgatcatccagtcgctgtccaggattggcgagcaggcttccggtatctcctcgatcacgccgtcgggcatcgtcgatgtgggcttcctgatctggaagcaggccatcaacaacctgtcggcctggtcgcccatcgacagctttgtgggcgtggtcttgagcgccggcatcctgcttctgctggctgtcatcgccgtgaacatgttgctgctgctcgtgtcagcctggctgctgtcctatgccggcatcttcttcctcggcttcggcggatcgcgttggacttccgacatggcgatcaactactacaagaccgtgctgggcgtcgccgtgcagatcatgacgatggtgctgcttgttggcatcgggaatgatctgctgtccagcttctacgccaagatgagcaagggcacactgaacttcgaggagctgggcgtgatgctggtgttctgcctggcgttgctgctgctggtcaatcgcgtgccgccgctggtcgccggcgtgatttccggtacgggcgttgggaacgccggtggcatcggcaacttcggtgcgggcgctgctgttggtgccgcgatgggggctgccaccgtaatgagtggcgcggccaacctcgccggcggggcttcggccgtcaaagccgccttcgagaaggcccaaggcagcgcgaccggcgatgccggcgcgggcatggacatgatggcgagcgtggggggcgcgggtgcttcgggcggtcaggactcagccggcgcagggggatcgcccttcgcgcaggctgcgggcttcgggggctcgtcgtcgggtggcggcagcagctcggccggctcgaaggggggtgacaagggcggcgccggcgacaagggcagcagttcgaccaccagcaccggcgacggtgccgacaagtcggccaagagtgaacccaagccctcagccggcggtgttgggcaggggcagcaggccgcaccaggcagcactggccgcagtggcctgactcgtgccgcagcattggctgcgggcaccgccggcgagctggcgaagggtgcgggtgccgtgctcaggggcaaggcggtgcaacttgcggagggcttccacgaacgcatggaccaaacgatcggcggccaagtggcaacggcgatccgagccagcactgcggcagaggctcctgccttcgatggcgacagcttggccggcgagcaggccggtaatcaggcggccgatcccgatgatgaagtcgctgctttcgtgaatcgcacgacgccggcgtga

SEQ ID NO: 325088 - DNA, 276 bp, Pseudomonas aeruginosa
atgaaaccgacgatgctgcttgccggcctcgtggtggcgctgctggccggctgcgacagcaagccggccacccaggccatgcccgaggtcaatgacgcgaactgccagatcgagaagatcaaaaagatcgaggacaaggcgacgcgcgaaactttcgccgggctgtgctcgcgccggtcgcggaccggcggcggcatcgccccgaccgagaagccgatgaactggctggaactggccgacccgaaagactcgaaggggcaggaggcgaagccatga

SEQ ID NO: 325089 - DNA, 786 bp, Pseudomonas aeruginosa
atgaagcacgtccgttttttagcggctaaaaccgcgctcgccgccgttctggccggcagcatcgtcatcacgcctgtgcaggcgggtatccccgtcatcgacggcaccaacctgtcgcagaacatcatgacggccatcgaatcggtggctcaaacgctcaagcaaattgagcagtacagcacccagctccagcagtatcagaaccagctccagaacacgatggctccggcagcctatatctgggatcaggcgcagtccaccatcaatgggctgatgaacgccgtcaacacgctggactactacaagacgcagctcggcagcctggacagctacatcagcaagttccaggacgtgaactactacaaggggtcaccgtgcttctcggctactggctgctcggccgccgaattggccgccatgaacaacgtgcggcagctcgccagccagtcgcagaagaaggccaacgatgcgttgttcaagggcttggacaagcagcaatcgaacctgacggccgacgcggcgacgttgcagcgtctccagtcggccgcgcagggtgcgaccggccagatgcaggccatcggctacgccaaccagcttgccagccagcaggccaaccagctcttacagattcgtggcctgttgatcgcgcagcagaacgcggtggcgaccaagatgcaggccgacgccgaccttgaggcccggcagcaggcggcgcacgccgcttcgacggaatcgcggatcgggaaaacggcaagcccgaaaaactggctcgaactgacccgctga

SEQ ID NO: 325090 - DNA, 372 bp, Pseudomonas aeruginosa
atggacgacgagaagagagtcacgcggaagagcagcccgcccatcaaggtgtactgccttcccgaagagcgtgaactgatcgaggcgaacgccaagagggcggggatcagcgttgcgcgctacctgcgcgacgtgggccagggctaccagatcaagggcgtcatggattacgagtacgtgcgcgagctggtgcgcgtgaatggcgaccttggccggctaggcggcttgctcaagctttggctcaccgacgacccgcgcacagcccgcttcggcgatgacacgatcctcgctctgctgggtcggattgaggccacccaggacgaaatgagccggctcatgaagtcggtagtgcagccgagggtcgaatcatga

SEQ ID NO: 325091 - DNA, 288 bp, Pseudomonas aeruginosa
atggcgacaaagattgaacaggaactggccgcgcggctcatgcgcgcgcagcaaaccgggcggctgaagcggaaggacttcttgcccgcgttcatggcggcgcgctcggacgtgatggaagcaatggccgcaggctttgcgctaaagatcatctgggagcacatgcacgagatcgggcgcattccgtttcgctatgagactttcctgaagtacgtccatcggcacatcaccaacgcgccggctggttccgaaaatcccataactcaaccgcaacaagcggcggaatga

SEQ ID NO: 325092 - DNA, 435 bp, Pseudomonas aeruginosa
atggaaaacaatttggagaacctgaccattggcgttttcgccaaggcggccggggtcaatgtggagaccatccgtttctatcagcgcaagggcttgttgctggagcctgacaagccctatggcagcatccgccgctatggcgaggcggatgtaacgcgggtgcgcttcgtgaaatcagcccagcggctgggcttcagcctggatgagatcgccgagctgctgcggctggaggatggcacccattgcgaggaagccagcagtctggccgagcacaagctcaaggacgtgcgcgagaaaatggctgacctggcgcgcatggaggccgtgctgtctgagttggtgtgcgcctgccatgcgcgaagggggaacgtttcctgcccgctgatcgcgtcactacagggtggagcaagcttggcaggttcggctatgccttag

SEQ ID NO: 325093 - DNA, 351 bp, Pseudomonas aeruginosa
atgtctgaaccaaaaaccgggcgcggcgcgctcttcactggagggcttgccgccatcctcgcctcggcttgctgcctcgggccgttggttctgatcgccttggggttcagcggcgcttggatcggcaacttggcggtgttggatccctatcgccccatctttatcggcgtggcgctggtggcgttgttcttcgcctggcggcgcatctaccggcaggcagcggcctgcaaaccgggtgaggtctgcgcgattccccaagtgcgagctacttacaagctcattttctggatcgtggccgcgctggttctggtcgcgctcggatttccctacgtcatgccatttttctactga

SEQ ID NO: 325094 - DNA, 276 bp, Pseudomonas aeruginosa
atgaagaaactgtttgcctccctcgccctcgccgccgttgttgcccccgtctgggccgccacccagaccgtcacgctgtccgtaccgggcatgacctgctccgcctgcccgatcactgtcaagaaggcgatttccaaggtcgaaggcgtcagcaaagttgacgtgactttcgagacacgccaagcggtcgtcaccttcgacgatgccaagaccagcgtgcagaagctgaccaaggcaaccgcagacgcgggctatccgtccagcgtcaagcagtga

SEQ ID NO: 325095 - DNA, 1686 bp, Pseudomonas aeruginosa
atgacccatctaaaaatcaccggcatgacttgcgactcgtgcgcggcgcacgtcaaggaagcgctggaaaaagtgccaggcgtgcagtcggcggtggtgtcctatccgaagggcacagcgcaactcgccatcgtgccgggcacatcgccggacgcgctgactgccgccgtggccggactgggctacaaggcaacgctagccgatgcgccactggcggacaaccgcgtcggactgctcgacaaggtgcggggatggatggccgccgccgaaaagcacagtggcaacgagcccccggtgcaggtagcggtcattggcagcggtggagccgcgatggcggcggcgctgaaggccgtcgagcaaggcgcgcaggtcacgctgatcgagcgcggcaccatcggcggcacctgcgtcaatgtcggctgtgtgccgtccaagatcatgatccgcgccgcccacatcgcccatctgcgccgggaaagcccgttcgatggcggtattgcggcaactgtgcctacgattgaccgcagtaagctgctggcccagcagcaggcccgcgtcgacgaactgcggcacgccaagtacgaaggcatcctgggcggtaatccggccatcaccgttgtgcacggtgaggcgcgcttcaaggacgaccagagccttaccgtccgtttgaacgagggtggcgagcgcgtcgtgatgttcgaccgctgcctggtcgccgcgggtgccagcccggcggtcccgccgattccgggcttgaaagagtcaccctactggacttccaccgaggccctggcgagcgacaccattcccgaacgccttgccgtaatcggctcgtcggtggtggcgctggagctggcgcaagcctttgcccggctgggcagcaaggtcacggtcctggcgcgcaataccttgttcttccgtgaagacccggccatcggcgaggcggtgacagccgctttccgtgccgagggcatcgaggtgctggagcacacgcaagccagccaggtcgcccatatggacggtgaattcgtgctgaccaccacgcacggtgaattgcgcgccgacaaactgctggttgccaccggtcggacaccgaacacgcgcagcctcgcgctggacgcagcgggggtcactgtcaatgcgcaaggtgccatcgtcatcgaccaaggcatgcgcacgagcaacccgaacatctacgcggccggcgactgcaccgaccagccgcagttcgtctatgtggcggcagcggccggcacccgtgccgcgatcaacatgaccggcggcgatgcggcgctcgacctgaccgcaatgccggccgtggtgttcaccgatccgcaagtggcgaccgtgggctacagcgaggcggaagcccaccacgacgggatcgagaccgacagccgcaccttgaccttggacaacgtgccgcgtgcgctcgccaacttcgacacacgcggcttcatcaagttggttatcgaggaaggcagccatcggctgatcggcgtacaggcggtcgcgccggaagcgggtgaactgatccagacggcggctctggccattcgcaaccgcatgacggtgcaggaactggccgaccagttgttcccctacctgacgatggtcgaggggttgaagctcgcggcgcagaccttcaacaaggatgtgaagcagctttcctgctgcgccgggtga

SEQ ID NO: 325096 - DNA, 315 bp, Pseudomonas aeruginosa
atgaacgcctacacggtgtcccggctggctcttgatgccggggtgagcgtgcatatcgtgcgcgactacctgctgcgcggattgctgcgcccggtggcgtgcacaccaggcggctacggcttgttcgatgacgccgccttgcaacggctgtgcttcgtgcgggcggccttcgaggcgggcatcggcctcgacgcgctggcgcggctgtgccgggcgctggatgcggcggacggcgacgaagcggccgcgcagcttgccctgctgcgtgccaccctgccgaccgagccggcacagcacgcggagagtctgccatga

SEQ ID NO: 325097 - DNA, 237 bp, Pseudomonas aeruginosa
atgaacaaccccgagcgcttgccgtccgagacgcacaaaccgatcaccggctacctgtggggcggactggctgtgctgacttgcccctgccacctgcccatcctcgctgtcgtgctggccggcacaaccgccggtgctttcctcggcgagcattgggtcatcgcggcgctcggtttgaccggcctgttccttctgtccctgtcgcgggcgctgcgggcattcagggaaagagaatga

SEQ ID NO: 325098 - DNA, 990 bp, Pseudomonas aeruginosa
atgagcgctttccggccggatggatggacgacgccggaactggcccaagcggtcgagcgcgggcagcttgaactgcactaccagcccgtcgtcgatctgcgcagtggtgggattgtcggcgcggaagccctgttgcgctggcgtcatccgacgcttggactattgccaccgggccagttcctgcccgtggtcgaatcgtccggcctgatgcctgaaatcggcgcttgggtgctgggcgaagcctgccgccagatgcgtgactggcgaatgctggcatggcgaccgttccggctggccgtcaatgtttcggcgagccaagtgggaccggacttcgacgggtgggtaaagggcgtgctggctgatgccgagttgcccgccgagtatctcgaaatcgagctgaccgaatcggtcgcgtttggtgatccggcgatcttccccgccctggacgccttgcggcagatcggtgtgcgcttcgccgccgatgacttcgggacggggtattcctgtctgcaacatctgaagtgctgcccaatcagcacgctcaagatcgaccaatcgtttgtcgccgggctcgccaacgaccgccgcgaccaaaccatcgtgcacaccgtgattcagcttgcgcacgggctgggcatggatgtggtggctgaaggcgtggaaacatcggcgagtcttgatctattgcgacaagcggactgcgacacaggacaaggcttcctgttcgcgaagccaatgccggcggcggcattcgccgtcttcgtcagtcaatggaggggtgccaccatgaatgcaagtgactcgaccaccaccagttgctgcgtgtgctgcaaggaaatcccgctcgatgccgccttcaccccggaaggcgcggaatacgtcgagcacttctgcgggttggagtgttatcaacgcttcgaagcgcgtgccaagacagggaacgaaaccgatgccgatccgaacgcctgcgactcgctaccgtcagattga

SEQ ID NO: 325099 - DNA, 600 bp, Pseudomonas aeruginosa
atggatttcttcctgacacatttccctcaggaggataccttgcacggtcagcgcatcggttacgtccgcgtcagcagcttcgaccagaacccagaacggcagctcgaacagatccaggtggataaagtgttcaccgacaaggcgtcgggcaaggacacacggcggcccgaactggaacggctgctcgccttcgtgcgcgaaggcgacacggtcgtggtgcacagcatggatcgtctggcgcgcaacctcgacgacctgcgccgcctggtgcagggcctcacccagcgcggcgtacgcatcgagttccttaaggagcatttgaccttcaccggcgaggactcgccgatggcgaacctgatgctgtcggtaatgggcgcgttcgccgagttcgaacgcgccttgatccgcgagcggcagcgcgagggcatcgcgctcgccaagcagcgcggggcctaccgtggcaggaagaaatccctgtcgtctgagcgtattgccgaactgcgccaacgtgtcgaggctggcgagcaaaagaccaagctggctcgtgaattcggaatcagtcgcgaaaccctgtatcaatacttgagaacggatcagtaa

SEQ ID NO: 325100 - DNA, 165 bp, Pseudomonas aeruginosa
atgccacgtcgttcaatcctgtccgccgccgagcgcgaaagcctgctggcgttgccggacaccaaggatgagttgatccgtcactacacgttcagcgaaaccgacctctccatcatccggcagcggcgcggcccggctaccgggctagcggcctcaatctggtaa

SEQ ID NO: 325101 - DNA, 201 bp, Pseudomonas aeruginosa
gtgttgtggaacacggtctatctggaacgggctgcgcacgcgctgcgtggcaacggccatgccgttgatgacgcgctgttgcagtacctgtcgccgctcggttgggagcacatcaacctcaccggcgattacctctggcgcagcagcgccaagatcggcgcgggcaagttcaggccgctacgaccgctgcaaccggcttag

SEQ ID NO: 325102 - DNA, 888 bp, Pseudomonas aeruginosa
atggccggaggcgaagcgatggcttttgacctcacccatgccaggcacgatccaatgcactgcttggtccccggcttgttccgcagtctcaaacgcggagaacggaagaaactcaagctcgatgtgacgtatcactacgccgagaatgaacaagcgcggttcgtcggctttgagccgctcggtgccgatgacatgcggctgctgcaaggtctggtggctcttggcgggccgaaaggcattatcctgacgtcggagccaacagcagacttaccgaagcagctccgtctattccttgagccaaaatttgacgcggtagggcaggatgcgcttgtcgtgagagagagcatggccagcctactaagcgagatcggcttgaccgatggcggcgacaatatcagggcgatcaaggcgtgcttgctgcgcatggcaaacgtgacagtagtagtcaccaaagggagcaggcaacggtcttttcacttgatgagctatgccttcgatgaggaggacggacggctattcgtcgcgctgaatcctcagattgcagaggcgattcttgggcggcgtccgtatacccgcattgagatggccgaggtgcgggcgctacaaaccgatccggcccgcctgattcaccaacgactatgcggctggatcgatcctggcaaagccggccgcgtggaactggataccctttccggttacgtttggccggacgacgcgaacgctgaggccatgaagaagcgccgtcagaaggcccgcaaggctctggccgagcttgccgccgtgggctggaaggtgtccgaatatgcggaagggaagtgggaaatcgggaggccgaagcccgtagtaacgttccccaatctccgtagtaacgttccccttcacccgtag

SEQ ID NO: 325103 - DNA, 879 bp, Pseudomonas aeruginosa
atggcgattgatgtactggcggcgtttgagcacgaaccgccggtgctggacttcttatggcctggcttcctggcgggaacggtcggcgcgctcgtcgccccaggggctacgggcaagagtttctgggcgctagaagcggccatgagcatcgcatgcagcgttccgggtggcgacctcgtgggccttgcccccgcacattccgggcgcgtggtctatctggccggtgaagacccgccgcccgcgcttgtgcggcgcgttcacgccatcggccagcacctcgggcacgcagctcgccaagccatcgcagagaacttggtgcttgagccgatcatgggcaagcgcatggacatcatgaacaaggctcacctgcgccgcgtcattgaggacggtgccggggcgaggctgattgtgctggataccctgagccgtattcacgccctcgatgagaacagcaacggcaacatggcccacctcgtggccgtgttggagcacgttgcggccaccacgggcgcatccgtgctctacctacaccacgtcagcaagggaagcgcccgcgaagggcaaaccgaccagcagcaggctgcgcgtggcgcatcggcgttgatcgacaacgccaggtggtgtggttacgtcgctcgcatgaccgaggatgaggcaaagcgcctcagcgaccgcccccacgaccggcagcccatcggtaatgagcgccgcagctacttcgtgcgtttcggcgtcagcaagcagaactacgacgccacgccgcttgatcgctggtacatgcggcactccggcggcgtactggtgccagtggaactgcatgaggcccgcaggagtgaggagaagggatgcgatggccggaggcgaagcgatggcttttga

SEQ ID NO: 325104 - DNA, 222 bp, Pseudomonas aeruginosa
atgacgatagaagacacgctgctgcaacgcttcggcccactgctaagcatcgcgcagctcgccactgtccttgatcgctcgcctgatggactgcggatcagcttgcgcgcaacgaacgagtgggcgcagcgaatcaacagggcccgcttgaagatcggccggcgggtctacttccgaacctcgcagatcgccgaggtgttgagcgacgagtccctgtactga

SEQ ID NO: 325105 - DNA, 981 bp, Pseudomonas aeruginosa
atgaagaatgacccaatcatcgttatctgggaaggttgcgaccccaccgtctcggaagccatccggcagtttcaagatcgctggcggccgtactccgcatcctcgcggcgctatcccatcgtgcgattgatacaggaactgatcgatcccgccgtggccgcctacatggcagcccttccagtgcgctattcgggccacgtccccggcgccggcacgggagtgagcttcagcgcgatcattcgactggtggggcttgatgcgatggttcgcttgcagcggcaattgctgcgcgcgttcgttctcacggaagatcgacagtctgcgagagatcagcgttttgtcgcaacgctggaatcactgatcgaactggtgtgggactgtgcgtgcaaacgaccagccaagtcacaggtgcgcgacacccgcctgaatggtgaacgtcagcagggcttctgccggttttgcggagcactcgccgagttgacctcgttcgccggtgggagcgatgacccaaaggctgacgaccccgaggagaaacttcgactcagcagcctgtactgcctggatcaccggcccaaattgccgaatggcgcatggaatccctcatacagacaagcaagacgctcactcgcgcagttcgatctcgaactcgccaggctcagccagcagtgcgcaaagccagctacgcctcaagtgaaatcgggcgatcaactggttgacagctacttcttccactacgtcgccggccaaacctttcagccagcagacaaagcggagttgcgcaatcaagcgcggctcatggtggactcgaagctgtcagaccgcaaaaaacagatgctgatgctccagtggtctgggctcaaccagtcggagattgcgcgaaagctaggtatagaacgccaagccgtatcgaaggcactggcgtcgatccctgcgatgttccacttgagttcaaagtcgcgctcgcggcgtcaaccaaattga

SEQ ID NO: 325106 - DNA, 246 bp, Pseudomonas aeruginosa
atgcagacaacgacaagtaagacgctcatcaaccgcaagaagctactggcgatgatcccgctgtctgagcgcacgattttcaatatggagcagcgcggggagtttccgcgtcgcattgcgctcaccagccgaaacgtcgcctgggacttggccgaggtcgaggaatggatcgaggcgcgcaaggcatcgggcactcaggccatgcgtcccggcttcaccccgtcggtcgcagcagccactttttag

SEQ ID NO: 325107 - DNA, 1203 bp, Pseudomonas aeruginosa
atgctgaccgataccaagctgcgtaacctcaagccgagggacaagctatacaaggaaaacgaccgtgacggcctctatgtggccgtcacgcccgccggagcgatctcgttccgctacaactacttgatccacggccggcaggagaccatcaccttcggccgctatggcgttggcggcatcacccttgcggaagcccgcgagcggttgggcgaggccaagaagatgatcgcggccgggaagtcgccggccaaagagaaggcgcgggacaaggcccgcgtcaaggatgcggagacgttcggggcgtgggcggaaaagtggctgcgcggctaccagatggctgactccacccgcgacatgcgccgttcaatctacgagcgcgagctgaagcctaaattcagcaaccagaagctggtggagatcacccacgaggacttgcgggcgctgaccgatgccatcgtggagcgcggtgcaccggcgaccgcagtgcatgctcgcgaggtgatgttgcaggtctttcgctgggccatcgagcgcggccagaaggtcgagaacccggcagagctggtgcggccgacgactatcgccaagttcgagccgcgcgaccgtgcgctgacgcccgacgagatccgtctgatgtatcagtacatggagcgcatcggcacaacgccatccattcgggctgccgccaagttgttgctgctgacgatggtgcgcaagagcgagctgaccaacgcgacctggagcgagatcaacttcagcgaggcgctttggaccatcccgaaggagcggatgaagcgacgcaatccgcacctggtgttcctgtcccggcaggcgctggacatcttcattgccctcaagacctttgccggcggatcggactacgtgttgccgtcgcggtacgactcggacttgcccatgagcagcgccacgctcaaccaggtgctgacgctgacgtatcggctggcgcagaaggaagggaagtcgctcgccaagttcgggccacatgacttgcggcgcacagccagcacgttgttgcatgaggccggctacaacacggactggattgagaagtgcctggcgcacgagcagcgaggcgtcagggccgtctacaacaaggccgagtaccgcgagcagcggacggcgatgttgcaagactgggcggacatgatcgacgaatggacactgaagcggccgaaggcgtaa

SEQ ID NO: 325108 - DNA, 1578 bp, Pseudomonas aeruginosa
atgtcccaagacattcacgcccaccgtatcctgatcctcgatttcggctcccagtacacccaactgatcgcccgccgcgtgcgcgagatcggcgtgtattgcgaaatccatcccttcgacatgagcaacgaggcgatcatcgccttcgcgccgcgcggcatcatcctcgccggcggtcccgagtcggtgcacgaagccgacagcccgcgcgcgccgcaggcggtgttcgacctgaaggtgccgctgttcggcatctgctacggcatgcagaccatggccgagcagatgggcggcaaggtgcagggctccgacgtgcgcgagttcggctacgcccgcgtcgacgtggttggcaaggcgcgcctgctggacggcatcgaggaccacgtggacgacgacggcgtgctcggcctcgacgtgtggatgagccacggcgacaaggtcaccgagatgccggccggcttccacatcctggccagcaccccgagctgcccgatcgccgccatggccgacgatgcccgcgcctactacggcgtgcaattccacccggaagtcacccacaccaagcagggcctgcgcattctctcgcgcttcgtcctcgacatctgtggttgcgccgcgctgtggaccccctcgaacatcgtcgacgacgccatcgccaccgtgcgcgcccaggtcggttcctccaaggtcctgctcggcctctccggcggcgtggactcctcggtggtcgccgcgctgctgcacaaggccatcggcgaccaactgacctgcgtgttcgtcgacaacggcctgctgcgcctgcacgaaggcgaccaggtgatggccatgttcgccgagaacatgggcgtgaaggtgatccgcgccaacgccgaggacaagttcctcggccgcctggccggcgtcgccgatccggaagagaagcgcaagatcatcggccgcaccttcatcgaagtcttcgacgaagaagccaccaagctgcaggacgtgaagttcctcgcccagggcaccatctaccccgacgtgatcgagtcggccggcgccaaaaccggcaaggcccacgtgatcaagtcgcaccacaacgtcggcggcctgccggaggacatgcagttcgaactggtcgagccgctgcgcgaactgttcaaggacgaagtgcgcaagatcggcctggagctgggcctgccctacgacatggtctaccgccacccgttccccggcccgggcctgggcgtgcgcatcctcggcgaggtgaagaaggagtacgccgacctgctgcgccaggccgaccacatcttcatcgaggaactgcgcgccttcgactggtaccacaagaccagccaggcgttcgtggtgttccagccggtgaaatcggtcggcgtggtcggcgacggccgtcgctacgcctgggtcgtcgccctgcgcgcggtggagaccatcgacttcatgaccgcgcgctgggcgcacctgccctatgaactgctggagaaggtctcgaaccgcatcatcaacgagatcgccggtatctcccgggtcacctacgacgtgtcgagcaagccgccggcgactatcgagtgggagtga

SEQ ID NO: 325109 - DNA, 1665 bp, Pseudomonas aeruginosa
ttggctcagtacgtctacaccatgcatcgggtcggcaagatcgttccgcccaagcgtgaaatcctcaaggacatctccctgtcgttcttccccggcgccaagatcggcgtgctcggcctgaacggcgcgggcaagtccaccctgctgcggatcatggccggcgtcgacaccgagatcgaaggcgaggcccggccgatgccggggatcaacgtcggctacctgccgcaggagcccaagctggacccgcaggccaccgtgcgcgacatcgtcgaagaggccgtcggccagatcaagcaggcccaggcgcggctggacgaggtctatgccgcctatgccgagccggatgccgacttcgacgccctggccgccgagcaggccaagctggaggcgatcctccaggcatccgacggacacaacctggaacgccaactggaagtcgccgccgacgccctgcgcctgccgccgtgggatgccaaggtcgagcacctgtccggcggcgaaaagcgccgcgtagcgctgtgccgcctgctgctgtcggctcccgacatgctgctgctggacgaaccgaccaaccacctggacgccgactcggtggcctggctggagcatttcctgcacgacttccccggcaccgtggtggcgatcacccacgaccgctacttcctcgacaacgtcgccggctggatcctcgaactcgaccgtggccatggcatcccgttcgaaggcaactactccggctggctggaatccaaggccgcccgcctggcccaggaagccaagcaggaagcctcccacgccaaggccatgaaggccgagctggagtgggtacgccagggcgccaagggccgccaggccaagtccaaggcgcgcctgcagcgcttcgaggaactgcagtcgcaggaattccagaagcgcagcgagaccaacgagatctacatcccggccggtccgcgcctgggcgacaaggtcatcgaactgcacaacgtgaccaagggctacggcgaccgcgtgctgatcgacaacctgtccctgagcattcccaagggcgctatcgtcggtgtgatcggcggcaacggcgcgggcaagtcgaccctgttccgcatgctcaccggcaaggagcagccggactccggcaccatcgagatcggcgagaccgtgcagatcgccagcgtcgaccagagccgtgacagcctggaaggcaacaagaccgtgtgggagcaggtttccgacggtttcgagcagatcaagatcggcaactacgaagtcccgtcgcgcagctatgtcggtcgcttcaacttcaagggcgccgaccagcagaagttcgtcaaggacctctccggcggtgagcgtggccgtctgcacctggccctgaccctgaagcagggtggcaacgtgttgctgctcgacgaaccgtccaacgacctcgacgtggaaaccctgcgtgcgctggaagaggcgctgctggacttccccggctccgccatcgtgatctcccacgaccgctggttcctcgaccggatcgccacccacatcctctcctacgaggacgatggcaaggtgaccttcttcgaaggcaactacaccgagttcgaggccgaccgcaagaagcgcctgggcgacgccgcggcccagccgcaccgcgtgcgctacaagaaactggcgtaa

SEQ ID NO: 325110 - DNA, 261 bp, Pseudomonas aeruginosa
atgtcttcttcgcgtctcggcgtgcttgtcctcgccctgctcctgctcaccgccaccctgctcggcggctgcgaaaacacccaccagcacctgctcgcccagggctacccacccggctggggcgacggcttcgagcaatgccggtcgatggcgcggagcgaggagcggcggcgtttcgaggaacgccagtgggacgaccgcgacgacgattggcagcgcgaccgcgaccgcgcgctggcccgggccttgcgcgagcgctga

SEQ ID NO: 325111 - DNA, 1215 bp, Pseudomonas aeruginosa
atgaaagacatgaatatcctcgaagtggccggcggcaagccgatcaagctctggacccagggcgtcccggtggaggaggaagcgcgccagcagttgctgaacacggcgaagatgcccttcatcttcaagcacctggcggtgatgcctgacgtacacctgggcaagggctcgaccatcggtagcgtgatccctaccctcggcgcgatcatcccggccgcggtgggcgtggatatcggctgcggaatgatcgccgcgcgcacctcgctggtcgccgccgacctgccggacaacctgcacggcctgcgcagcgccatcgagcaggcggtaccccacggcaagaccttcggccgccgcgaccgcggcgcctggcacgaggtaccggaggccgccgaccaggcctggaaggcgctcgccgatcgcttcaaggcgatcaccgacaagcacccgaggctggagaagaccaacaaccgccagcacctgggaaccctcggcaccggcaaccacttcatcgaggtctgcctggacgaggccgaccgcgtctggttcatgctgcacagcggttcgcgcggggtcggcaacgccatcggcaacctgttcatcgaactggccaaggcggacatgcgccagcacatcgccaacctgccggacaaggacctggcctacttcgaggaaggcagccggcacttcgacgactatgtggaagcggtcggctgggcccaggatttcgcccggcagaaccgcgcgctgatgatgcacgcggtgatcgaggcggcgcgccaggtgatccgcaagccgttcgaagccaacctggaggcggtcgattgccaccataactacgtgcagaaggagcgccacttcggccaggaggtactggtcacccgcaaaggcgcggtgtccgcgcagaagggccagctcggcatcattcccggctcgatgggggcgaagagcttcattgtccgcggcctcggcaaccaggaagcgttctgctcgtgcagccacggcgccgggcggaccatgagccggaccaaggcgaagaaggtcttcagcgtcgccgaccaggcccgcgccaccgcccacgtcgaatgccgcaaggacgccgacgtgatcgacgagatcccgatggcctacaaggacatcgaccgggtcatggaagcccagcgcgagctggtggaagtgctgcacaccctgcgtcaggtggtgtgcgtgaaaggatga

SEQ ID NO: 325112 - DNA, 1596 bp, Pseudomonas aeruginosa
atgaaacgcacggtcgccatcggcttcatcggcgccaccctcgaccgtctcggcaagggcgcggcgcgctggcaaaagtggcggccgagcatcggcctgtgccagcagccggacctgctgatcgaccgcctcgaactgatccacggcaacgacgcccgcgacctcggcctggccgagcggattcgcgccgacatcgccgcggtgtcgccgcataccgaggtccgcctgcagcagatggaactgcgcaacccctgggacttcgaggaggtctatggcgccctgcacgatttcgtcagcgcctaccccttcgacaccgagcgcgaggactacctggtgcatatcaccaccgggacccatgtcgcgcagatctgctggttcctccttaccgaggcgcgctacctgccggcccggctggtgcagacctcgccgtcgcggcgcaaggacgaggcgcgccatcccgagggctcggcgacgctgatcgacctcgacctgtcccgctacgaccgcatcgcctcgcggttccgccgcgaacaggaggaaagcctggcttttctcaagtcgggaatcgccacgcgcaatgccgctttcaaccgctccatcgagcagatcgagcgggtcgccgtgcgttcgcgggcacccatgctgctggtggggccgaccggtgccggcaaatcgttcctcgcccggcgcatctatgaactcaagcgcagccggcaccagctcgacgggcgtttcgtcgaggtcaactgcgccaccttgcgcggcgacggcgcgatgtcggcactgttcggccacgtcaagggcgccttcaccggcgcgcagaatgcgcgcgaaggcctgctgcgcgcagccgacggtggcatgctgttcctcgacgagatcggcgagctgggtgccgacgaacaggcgatgctgctcaaggcgatcgaagagaagcgcttcttcccgctgggttcggaccgtgaggtggagagcgacttccagcttatcgccgggacccaccgcgacttgcgcggacgagtggccgaaggcctgttccgcgaggacctgttcgcccgcatcaacctgtggaccttcgagctgccgggcctggctggacgccgcgaggacatcgagccgaacatcgacttcgaactggagcggcacgcccgcgagcaagggcggcaggtgcgtttcaacctggaggccaagcgtcgctacctggccttcgccggttccagcgaagcgcgctgggccggcaacttccgcgagctgtcggcttccatcacacggatggcgaccctggccgacagcgggcggatcgacgaggcgctggtcgaggaggagatccttcgcctgcgccaggcctgggggctcgatgcgggccgggagccactggctgatctgctggggcagcgggtggaggccctggatctgttcgaccgcctgcaactgcagtcggtgctggaggtgtgccgcggggctaagaccctttccgaggcgggacgccggctgttcgccgtttcgcgccaggacaagcgcaaccccaacgacgccgaccggctgcgcaagtacctggcgcgtttcggcctggactgggcgcagatacgcgcctga

SEQ ID NO: 325113 - DNA, 426 bp, Pseudomonas aeruginosa
atgaagtcgaacagaggcttcactctcatcgagttgatgatcgtcgtagtaatcatcgctattcttgctggtatcgcctaccccagctacgacgaatacgtgaagcgcgggaatcgcaccgaaggacaggcattactcagcgaagcagccgctactcaagagcgctatttttcacagaacaatacttatatcactacccaagccgacatcggcaagctgcatatgcgcaacacatcgggcaccacagtgaagtcctccacaggcaaatacagccttaccgtcgatacggtagccaacgacggaggttatcgccttatcgctaaccaggcattcaacgatcttgattgtggcaacctgaccttgaccgccaacggcgagaaaggccggactggaagcaagaagagcgttgcagaatgctggcgctaa

SEQ ID NO: 325114 - DNA, 327 bp, Pseudomonas aeruginosa
atgaaccccttacgtcttctcgccacagctcttgcagctctagctctggcttgcccaacctttgccttgagtgccacgaatacgttcgagaatgtgggcgtggtcgaggatgttcatcctgccgccggtctggtagtagtcgatgggcagacatatcgcttgcccaaccgtgtccaacaacaggactcgccggtcatattcttggtacgtcagggacagacagtgtctttctccggcaaactcaccagcgacctgccagaaatcgagtcgttctacattatcaagcaggcccctctcgttcccttcggatcggagcagcaacaatga

SEQ ID NO: 325115 - DNA, 3477 bp, Pseudomonas aeruginosa
atgatccaccagattacccgcgcaggaaaaagcctgctggctgcaggttgcaccctgagcatcctgttcgcctctgacagttatgccgccacggccctgaatgtcagccagcaacccctgttcctaacccagggcgttgctcccaacctgctgttcactctagatgactcaggcagtatggcctgggcttacgtgcccgacggtattagcgggaatagcggcagagcgggacgttccagcgattacaacgcactgtactacaaccccgattatgcttaccaagtgcccaagaaattgacactgtcaggcgatcagatcatcgtttccgactatccagtgccacgcttcacagcagcctggcaggatggctacgcccaaggctccaccaccaacctgagcaataactatcgccctcaatggggaaccggctggcttggttgcatcgatagcagctgcaataccgggagagcttattactatacttataaggtaagcgctagctgccctgcacagccggtgagcagctccaactcctgttatacctacaatgctcttcctaccagtcaggaaagcaactttgcgatatggtactcctactatcgcaaccgcatcctggccacaaagaccgctgccaacctggccttttacagcctgccggaaaacgtgcgtctcacttggggggccctgaacacctgtagcatcggcgccaacagcagaagctgccaaaacaatgccctgctccaattcaacaagcagcacaaaatcaatttcttcaattggctggcgaacagcccggccagcggcggtactcctctgcatgcggctcttgaccgagccggacgcttcttgcaaaccaacggcacagcttataccaccgaagacggaaagacatattcctgccgggccagctatcacatcatgatgaccgacggtatctggaacggtcggaacgtcacccccggcaatctcgacaaccagaaccagacctttcctgatagcaccctctataggccacagcccccttatgccgacagcaatgccagctcattggctgacctggctttcaaatactggaccacagacttacgtcccagcatcgacaatgacctgaagcctttcatggcctacaagagtggggacgattccaaggattactgggaccctcgcaacaacccagccacttggcaacacatggtcaactttaccgttggcctaggtctttcctattcgctcacattgaactctgcaccaacttggacaggcagcacctttggcaactacgaggagttgatggctggaagcaaggcttggcccagcgtcgataacgacgccgcacccggtaacgtctacgacctctggcatgcagctatcaactctcgtggagacttctttagcgcggaatcaccggactctctggttcaggctttcaataagatcctgacacggatttccgagcgcaacacctcctcctccaaaccagcaatgacttccgcgctgcaggatgacggaaccggcgacaagctgatccgctacagctaccagtccagctttgccagtgacaagaactgggcgggcgaccttatacgttacaaggtggagtcgacttccaccggttcgaccaaaacccaggaatggagcgccggcgcactgctggacaaccgagctcccgctacccgtaatatttacatcgccagcaatagcggaaccaaccgccttaagcctttcacatggagcaatattgagggaagtcagttagccacttggctgaaccgcaacccggacaaggacaatcaggccgacaccaaaggagcacagcgggtcgacttcatccgtggccagcagaatatggatggattccggcaacgacaggcggtgttaggggacatcgtgcactcgtctccagccgtggtcggaccggcccaatacctcacttatctggccaaccccatcgaacccagcggcgactacggcacattcaagacagaggcagaccagcgcagccctagagtttatgttggatccaacgatggcatgttgcatggtttcaacatcaaaaccggcgtggaagagttcgctttcatccctacagcagtattcgaaaagcttaacaagcttaccggcatcagctaccagggcggtgcccaccaatatttcgtcgacgctacaccggtcgtcagcgatgcctttttcgatggagcttggcacactgttctgatcggaacgcttggtgctggaggtcgcggcctgttcgcactcgatgtaaccaagccggacgatgtcaagctgctttgggaatacgatagcagtaccgactcggaccttggttacaccttctccaaacctaccgtagccagactgcacagcggacaatgggcagtagttaccggcaacggctatggaagcgataatgacaaggcagctttactgctgattgatttgaaaaagggaacgctgatcaagaagctggaagtccaaagcgagcgcggaatagccaatggcctatcgacgcctcgcctggctgataacaacagcgatggcattgctgactacgcctatgctggcgatctgcagggaaatatctggcgcttcgatttgatcggcaatacccgcaacgacgacccagacacaaatacctctatcaatcccttcaagcccggagatgtagatccttctgctttcagagtatcgttcagcggcgccccgcttttccgtgctcgcgccgacaacaatactcgtcagcccatcacggctccgcctaccttggtacgccatcctagccgtaagggctacatcgtcatcgtaggtacaggaaaatacttcgaggacgatgacgctcaggccgataccagccgagccatgacgctctatggtatctgggatcgccagaccaagggcgaaagcgcaaacagtaccccaaccatcgaccgcaacgccctcacagcccaaaccatgacaacagaggcgaactccacattcggtagcgtgaacaggaatattcggcttattagccaaaacccggtgaagtggtacaaagacggagcaaccggtaccgcgaactcggatgtggctagctatggctggcgactgaatctggaggtcaatagcagcaagaaaggcgaaatgatgatcgaagatatgttcgctgccggccaagtgcttctattgcagaccttgacaccgaacgacgacccttgtgacagcggctctaccagctggacctacggcctcaatccatatactggcggacgtaccagtttcaccgtcttcgatctcaaacgtgcgggtatagtggactctggctcggattacaacggctcggtcgtatccgccttccaacaggatggactaggtggcttggccattacccagaacgaacagcgtcaatccgaggcttgcactggtgatgagtgcatcatcttcaaccccagcgacaagagtaacggacgacaaacctggcgggtcgtcgaggagaaatga

SEQ ID NO: 325116 - DNA, 606 bp, Pseudomonas aeruginosa
atgaccctgcgccatacctctcgacagcagggatccacgttgttgatctcgctggttatcttgttgatgatcacgctcctcgccgtttccaacatgcgcgaggtgtcactggaaagccgtatcaccggcaatctcatcgaacagaagcgcctgcgcaatgcgggcgaagctgggctacgcgaaggtgaacgacgctttttcaataccatcaagcccccagaggtcggcagcggatgcgccgatagcaatgtcaaacggccttgcatactgaacctgagtgccctctccgtaccccgagatgacgtgcacaacaatccggtggcagccctgaacggcaagacagataacgccaattcacgtgtctggatgccctaccgaggcagcgatctgaataaccctacgcagatcgacaaagaccgcgcagtcacctggcagaccatcacggtgcccgctggcgaacagaacaacgaagcggaaaatcccgagtacggcaacatgatgcgcggggtcggcacgttctactacgaaaccaacagccgcgccctcaacaaggcgggcggagagactgttctacaggccgttcatgcacgcctgtataccaactga

SEQ ID NO: 325117 - DNA, 816 bp, Pseudomonas aeruginosa
atgctcttcagcaaaatgcagaaaggcctatcgatggtagaactgctcgtggcactcgctataagcagcttcctgatcctggggatcagccagatctacatcgacaacaaacgcaactatcttttccagcaaggccaggccggcaaccaggaaaatagccgcttcgttcttatgctgctgcagcaacaactggataagacagcctatcgtcgccttcacgacgacaacatggagaatgctttcaaatccgcgacattcaatggctgtcgtgcatttgtggctggcgagactatcgctgcggcaactgccctcaaggcgggtgagtacggtgtctgcttgcgctatcaacccgcctacaaaggggagcatgattgcctcggtaatgaaattaccggagttccggaaaagcccttcacaaatactccccctgtcgtcgttcgcctggtctacctaccgagcgccggtaccctgagttgcagtcgtcccgatatcgcccagtcgaaatcgggagaattggtcagtggtctcacagacttccgcttggaagcgggggtcgggccagcagatcgtagcgaacgcaaagtatccagcttcgtcgcactacaggatgtcgccggtcgtcctatccgagcattgcgcttctcaatcctggcaggcagcgacaatacaagcctgcgcacaggagatgatagccaggcacgcgatcgctggatcgtcctttatcccgagagcaaaagcgccatcgaggccgcagacaaaggccagatttaccaaatagcgcgtggtaaccaaaccatcaggaatctcatgccatga

SEQ ID NO: 325118 - DNA, 525 bp, Pseudomonas aeruginosa
atgtctcgagaaacgggtttcagcatgatcgaagtactggttgctctggtgctgatcagcattggcgtactgggcatggttgccatgcaagggcgcacgatccagtacacgcaggagtcggtacaacgcaatgccgcagcaatgcttgctagcgacctgatggaaataatgcgtgcggacccagatgccgtactcaatctacgcgcccaactacgcgaagactcggtctactacaaggccaagggcagcgactttcccgcagccccagcgcgctgcgcgccattgccagcagatgctaaggaacgtctcggctgctgggcccaacaggcctcgaaagacttgccgggagcctccgcactcttgaatagccaattctacatttgtcgcagcccaaccccgggtacctgcgacaacaccaaaggctcggccatcgaaatccaggttgcctggcgagccatggatggagcgtgtttcaacgcctctgactccaccttgtgcacctacagcgtccgctccgaattgtga

SEQ ID NO: 325119 - DNA, 489 bp, Pseudomonas aeruginosa
atgcgctctatttgtcgcagcgccggcttttccctgatcgagttgatgatggtgttggttctggtcgccatattcgccagcattgccgtacccagtttcaacgccttgatcgagcgcaaccgaatccagactgccagcgaggaactctacagcctgcttcagtacgctcgcagcgaagctgtaaaccgtcatgccaatgtgagcatcagggcgacgcagaacaatgactgggcaaaaggcctggaaatcatcagcggcgcgaccaccgtgcaaaagcaccaaggtttccagcaggtctcgctatccgccagcagtgcgactgcggagctgaccttcaacgctaccggcacacttagcaaccaggctgcaaacattgacataaaggtctgcttcgccggtgacaaaagtacaggacgtctgcttaccgttcagcccagtggacgcgtgatcctgtacccatcttcaaagcaaccggacagctgtaactga

SEQ ID NO: 325120 - DNA, 501 bp, Pseudomonas aeruginosa
atgaaatcgagcggcttcaacttggtcgaactatcgatagtcctattgatccttgcgataggcctgacaattgcgctgcccaccctccacgacagaatgaagcgggacattagccgtgctactcgtgacagcctgactagtcatctgatggctgcgcgggctagcagcatacagaacggcgtgatcatcgaggtctgcggtagcggtgacggcagtacctgcagcgaggaatggcatctcggctggttcagccgtaacgacaggagccaacagatactggcccggcatgaaaatacgagtcgcaccgatattcattggcggggcttcgacaagcgactgcgctacctgcctaatggcaccagccctacaggtaacgggcgtttcttcgaatgtaaggacgatcgcatcgagtggcaattggtgctcaatcggcaaggccgcctcagggtggcgggaaagagcgaaaataaaaagctctcttacctgtgctccaggcggtga

SEQ ID NO: 325121 - DNA, 1338 bp, Pseudomonas aeruginosa
atgagccgacaaaaagccctgatcgtcgacgatgaaccggatatccgcgaactgctggaaatcactctcggccgcatgaagctggacacccgcagcgcccgcaacgtcaaggaagcccgcgagttgctggcccgcgagccgttcgacctgtgcctcaccgacatgcgcctgccggacggcagcggcctcgatctggtccagtacatccagcagcgccatccacagaccccggtggccatgatcaccgcgtacggcagcctggacaccgcgatccaggcgctcaaggccggtgccttcgacttcctcaccaaaccggtcgacctcggtcgcttgcgggagctggtggcaaccgccctacgcttgcgcaacccggaagccgaggaagcgccggtggacaaccgcctgctcggcgagtcgccgccgatgcgcgccctgcgcaaccagatcggcaagctggcgcgcagccaggcgccggtctacatcagtggcgagtccggcagcggcaaggaactggtggcgcgcctgatccacgagcaggggccacgtatcgagcggccgttcgtgccggtgaactgcggcgcgattccctccgagctgatggaaagcgagttcttcggccacaagaaaggcagcttcactggcgctatcgaagacaagcagggcctgttccaggccgccagcggtggcaccctgttcctcgacgaagtcgccgacctgccgatggccatgcaggtcaaactgctccgggcgatccaggaaaaggccgtgcgcgcggtcggcggccagcaggaggtcgccgtcgacgtgcgcatcctctgcgccacccacaaggacctcgccgccgaagtcggcgccgggcgcttccgccaggacctctactaccgcctcaacgtcatcgagctgcgcgtaccaccgctgcgcgaacgccgcgaggacatcccgctgctcgccgaacgcatcctcaagcgcctggccggcgacaccggcctgccggccgccaggctgaccggcgacgcacaggagaagctgaagaactaccgcttcccgggcaacgtccgcgagctggaaaacatgctggagcgcgcctataccctgtgcgaagacgaccagatccagcctcacgacctgcgcctggccgatgcgccgggtgccagccaggaaggcgccgcgagcctgagcgaaatcgacaacctcgaggactacctggaagacatcgagcgcaagctgatcatgcaggcactcgaggagacccgctggaaccgcaccgccgcggcccagcgcctgggcctgacgttccgctcgatgcgctaccgcctgaaaaagctgggcatcgactga

SEQ ID NO: 325122 - DNA, 1593 bp, Pseudomonas aeruginosa
gtgcgcgctgaacggctacggctgagcgaggagcaggggcaacgcatcctccgtctgtaccacctgtaccgcctgaccatcggcctggtactggtcctgctgatctccagcgaactggaagatcaggtcctcaagctcgtccaccctgaactgttccatgtcggcagttggtgctacctggtcttcaacatcctggtcgcgctgttcctgccgccgtcgcggcaattgctgccgatcttcatcctcgcgctcaccgacgtgctgatgctttgcggcctgttctacgcaggtggcggcgtacccagcggcatcggcagcctgctggtggtggcggtggccattgccaacatcctgctgcgcgggcgcatcggcctggtcatcgcggcggcggccagcctcggcctgctctacctgaccttcttcctcagcctgagcagtccggacgccaccaaccactacgtccaggccggcggcctcggcaccctgtgcttcgccgccgcgctggtgatccaggctctggtgcggcgccaggagcagaccgaaacgctggccgaagaacgcgccgagacggtcgccaacctggaggaactcaacgcattgatcctgcagcgcatgcgcaccggcatcctcgtggtcgatagccgtcaggccatcctcctcgccaaccaggccgccctcggcctgctcaggcaggacgacgtgcagggcgccagcctcggccgccacagcccgatgctgatgcactgcatgaagcaatggcgcctgaatcccagcctccgtccgccgacgctcaaggtggtgccggatggcccgacggtgcaacccagctttatcagcctcaaccgcgaagacgaccagcacgtgctgatcttcctcgaagacatttcgcagatcgcccagcaggcgcagcagatgaagctggccggtcttggccgcctgaccgccggcatcgcccatgagatccgcaacccgctgggcgcgatcagccacgccgcccaactgctgcaggagtcagaggaactggatgccccggaccgacgcctgacgcagatcatccaggaccagtcgaagcggatgaacctggtcatcgagaacgtcctgcagctctcccgtcgccgccaggccgaaccgcagcagctcgacctgaaggagtggcttcagcggttcgtcgacgaataccccggcaggctgcgcaacgacagccaactgcacctgcagctcggtgccggcgacatccagacccgcatggacccacaccagttgaaccaggtgctgagcaacctggtgcagaacggtcttcgctacagcgcccaggcgcacgggcgcggccaggtctggctgagcctcgcgcgcgacccggagagcgacctgccggtgctggaagtcatcgacgacggtcccggcgtaccggcggacaaactgaacaacctgttcgaacccttctttactacagaaagcaaaggcaccggcctgggcctctatctctcccgcgaactctgcgagagcaaccaggcacggatcgactaccgcaatcgcgaggaaggcggcggctgcttccgcatcaccttcgcccacccgcgcaaactcagctga

SEQ ID NO: 325123 - DNA, 729 bp, Pseudomonas aeruginosa
ttgaacgcctggctgacccccgactggccggcgccggcccgtgtgcgggcctgcgtgaccacgcgcagtggcggggtcagccaggcacccttcgacagtctgaaccttggcgcccacgtcgacgacgatccgcgcgccgtggaagaaaaccgccgacgcctgaccgagcgtctggaatgccggccgagctggttggaacaggtgcacggagtgacggtggtggaggccgacccgaaccgggtgctcagggccgacgccagctggagcgcgatgccgggcgtcgcctgtacgatcatgaccgccgactgcctgccggcgttgttctgcgaccgctcgggcacccgcgtggccgcggcccatgccggctggcgcgggctggcggcgggcgtgctggaggcgacggtggacagcctgggcgtgcccggcgacgaactgctggtctggctggggccggcgatcggcccgcaggccttcgaggtcggcggcgaggtccgcgatgcattcgtcgctgcgcacgccgaggcgcgctcggctttcgtacctagcgccaatccgggccgcttcatggccgacatctaccgactcgcgcggatccgcctgggcgcccatggcgtcaccgccgtgcatggcggcggcttctgcaccttcagcgataccgcgcgcttctattcctaccgccgctcgtcgcgtaccggccgttttgccagcctggtctggctccaggactag

SEQ ID NO: 325124 - DNA, 693 bp, Pseudomonas aeruginosa
atggcggtcttgccgacggcgggttcgccgatcagcaccgggttgttcttggtccgccgctgcaggacctggatggtccggcggatctcgtcgtcgcgaccgatcaccgggtcgagcttgccttcctcggcgcgcttggtcatgtcgacggtgtacttgtccagcgcctggcgcgactcctcgacgttcgggtcgttcaccgcttcgccgccacgcaggttggccacggcattctccagcgccttgcgcgacacgccctggccgagcagcagcttgccgagcctggtgttctcgtccatcgcggccagcaataccagctcgctggagatgaactggtcgcccttctgctgggccaggcggtcagcctggttgagcaggcgtgcgagatcctgggacaggttcacgtcgccggtcgggctctggatcttcggcagcgcgtcgagttctttgttgaggccgctgcgcagggcggcgatatcgaagccgacctgcatcagcaggggcttgatcgaaccgccttgctgctcgagcagggcggaaagcaggtgcaccggctcgatggccggatggtcatggccaacggccagggactgggcgtcggagagcgccagttgcagcttgctggtcaaacggtctattcgcatgggtcgtccttccttctatagagcgggccggaacgatgggtgtccctga

SEQ ID NO: 325125 - DNA, 573 bp, Pseudomonas aeruginosa
atgagtctgaccgctatcgctttctgggttgtcctgctgctgctcgccggctacgcggtggtgctctacaacggcctggtacggctgaagcacgccgtgggcaaggcctgggccaacatcgacgtgctcctcaagcagcgccatgacgagctgccgaagctggtcgaggcctgcaagcaatacatgcagcacgagcgcgccaccctggagcgggtcatcgccgcccgcaacgccgtcgccagcgcccgcgagcgcgccgacgtgaatgcccttggcaaggccgagagcggcctgcgcgccggcctggggcagctcttcgcgctggctgagaactacccgcagctcaaggccaacgaaagtttccagttcctttcccagcgcatcagcggcctggagaacgggatcgccgatcgccgcgagctgtacaacgaggcggtgaacctgaacaacgtgcgcatcgagcaatttcccgacctgctgatcgcccgtgtcgctggcttcaaggccgccgagctgttgcagttcagcgaggcggagaaggccgacgtcgatctcaaggccctgttcggctga

SEQ ID NO: 325126 - DNA, 2064 bp, Pseudomonas aeruginosa
ttgaaactggactcccgacacagcctctcgctcaagctgctgcgtgtcgtgctactggcggcgctggccgttggcgtagtgctcagttgcgcgcagatcgtcttcgacgcctacaaggccaagcaggcggtgagcagcgacgcccaacgcatcctcgcgatggtccgcgacccttccacccaggcggtctacagcctcgaccgggaaatggcgatgcaggtcctcgaaggcctgttccagcacgaggcggtgcgccaggcgagcatcggccatcccggcgagccgatgctggcggagaaatccaggccgctgctggacctgccgacgcgctggctgaccgacccgatcctcggccaggaacgcaccttcagcattcgactgatcggccgcccgccctatagcgaatactacggcgacctgaagatcaccctggacaccgcgccctacggcgagaacttcgtcaccacttcggaaatcatcttcatctccggcattctccgcgccctggccatgggcctggtgctgttcctggtctaccactggatgctgaccaaaccgctgtcgaagatcatcgagcacctggtcagcatcaatcccgaccgccccagccagcaccagttgccgctgctcaaggggcacgaacgcaacgagctggggctctgggtgaccaccgccaaccagttgctcgcctcgatcgaaagcaacagccacctgcgccgcgaggccgaagacaacctgctgcgcatttcccagtacgacttcctcaccggcctgccgaaccgccagttgctgcaacagcaactcgaccagatcctcgacggcgccggccgccagcagcgccgggtagcagtgctgtgcctgggcctcgacgatttcaaggggatcaacgagcagtacacctaccagctcggcgaccagttgctgatcgccctcgccgaccgcctgcgcgggcacagcgcgcggctcggttcgctggcgcgcctgggcggcgaccagttcgccctggtccaggccgacatcgagcaaccctacgaggcggccgaactggcgcagagcatcctcgacggcctggaagcgccgttcgagatcgaccagcacgaggtgcgcctgcgcgccaccatcggtatcaccctgttccccgaggacggcgagaccacggagaaactgctgcagaaggccgagcagaccatgaccctggccaagacccgctcgcgcaaccgctaccagttctacatcgccagcgtggacagcgagatgcgtcgccgccgggaactggaaaaggacctgcgcgacgccctgcagcgccacgagctgcacctcgtctaccagccgcaggtggactaccgcgaccaccgcgtggtcggcgtcgaggcactgctgcgctggcaacatccgttgcacggcttcgtcccgccggacctgttcatcccgctggcggaacagaacggcagcatcttcagcatcggcgagtgggtgctcgaccaggcctgccggcaattgcgcgaatggcacgaccagggcttcgacgacctgcgcatggcggtcaatctttccaccgtgcagctccaccacaacgccctgccacgggtggtcagcaacctgctgcaggtctaccgcctgccggcgcgcagcctggagctggaagtcaccgagaccggcctgatggaggacatctccactgccgcccagcacctcctcagcctgcgccgcgccggcgcgctgatcgccatcgacgatttcggcaccggctattcctcgctgagctacctgaagagcctgccgctggacaagatcaagatcgacaagagtttcgtccaggacctgctgcaggacgaggacgacgcgaccatcgttcgcgccatcatccagctcggcaagagcctgggcatgcaggtgatcgccgagggcgtggaaaccgccgagcaggaggcgtacatcatcgccgaaggttgcaacgaaggtcagggctacctgtacagcaagccgctgccggccagggaactgacccagtacctcaagcaggcgcgacgcctgagccaggccaccagcagcgaacggccctga

SEQ ID NO: 325127 - DNA, 477 bp, Pseudomonas aeruginosa
gtggtgaacctgaacaacctgatcccgggtaccgagttcgaaggcaagagcctcgaagagatcgtcaagagctcctccggcggcatcttcaacaacgccgcccaggtgtggaaccacaccttctactggaactgcctgagcccgaacggcggtggccagcccaccggcgccctggccgacgccatcaacgccgccttcggctccttcgacaagttcaaggaagagttcaccaagacttccgtcggcaccttcggttccggctggggctggctggtgaagaaggccgacggctccctggccctggccagcaccatcggtgccggcaacccgctgaccagcggcgacaccccgctgctgacctgcgacgtctgggaacacgcctactacatcgactaccgcaacctgcgtccgaagtacgtcgaggcgttctggaacctggtcaactgggacttcgtagcgaagaatttcgctgcctga

SEQ ID NO: 325128 - DNA, 990 bp, Pseudomonas aeruginosa
atgcggattctggtaacgggggcgacgggcttcatcggcgggcgtttcgctcgcttcgccctggagcagggcctgtcggtacgggtcagcggtcgtcgtgcggacgcggtggagcatctggtggcgcggggcgccgagttcgttcccggcgacctcgccgacccggcgctggtcctgcgcctctgcgaggatgtcgaggcggtggtgcattgtgccggcgcggtcggagtctgggggccgcgcgaacgcttcctggcggccaacgtcgggcttgccgagagcgtcgtcgaggcctgcatgcggcaaaaggtgcggcgcctggtgcatctgtcgtcgccgtcgatctatttcgacgggcgcgaccacctggacctgaacgaagagtacgtaccccggcgtttttccgaccattacggggcgaccaagtaccaggccgagcaactggtgctcagcgcccgcgacctgggcctggaagtgttggcgctgcgtccgcgcttcgtggtcggtgccggcgacaccagcatcttcccgcgaatgatccaggcccaccgcaagggacgcctgcggatcctcggcaacggcctgaaccgggtcgacttcaccagcgtgcacaatctcaacgacgcgctgttcagttgcctgctggccggcgagccggcgctgggcaaggtctacaacatcagcaacgggcagccggtaccgttctgggatgcggtcaactacgtgatgcgccagctcgagctgccgccggtcggcggtcacctgccgtatgccgtcggctatggcctggcggcgctcaacgaaggcgtctgccggatcctgccggggcgtccggagccggtgctgttccgcctgggcatggcggtgatggcgaagaacttcaccctggacatcaaccgcgcccgcgaatacctcgactacgacccgcgggtcagcctgtggaccgcgctcgacgagttctgcgcctggtggcgcgcccagggactctga

SEQ ID NO: 325129 - DNA, 630 bp, Pseudomonas aeruginosa
atggaggagggcgtgctggagctttgcgaagccgcgctgggcgatttcgccgagctgggctgcgacgtcgaggcgtgcctgccggactatcccctggagcgcctgtggcgcacctggctggtccatcgccagtggctggtgcagggctcgcttggcgagctttacgccgatcccgcacggcgcgtccgactcaagccggaggcgcagtgggaagtggagtccgggctcggcctcggcgccgccgaggtctatcgcgcctcgctggatcgcagcgactggtatcgggcgctggcgcgtctgttcgaacgttacgatttcctcttgctgcccagcgcccaggtgtttcctttcgatgcagaaacggcgtggccgcggcaggtcgccgggcggccgatggacacctatcaccgctggatggaggtggtgatcggcccgaccctggccggtttgccggcgatcagcgtacctatcggcttcggcgcggcgggcctgccgatgggattgcagatcatcggcccggcgcaggccgacctggcggtgctgcaactggcccatgcccacgagggcctgacccgttgggtcagccgccgtccgccggcgatgctcgaggctccagggggaatcgactag

SEQ ID NO: 325130 - DNA, 492 bp, Pseudomonas aeruginosa
  misc_feature (366)..(375): n is a, c, g, or t
atgcgtgccctgtggttctgtgtcgccctgatgcccgtgctggcacaggcggacatctatcgctggaccgatgcccagggcaaggtacacttctccgccacgccaccggccggcgcgcaacgcgtcgaagtcaggccgcaggtggtggaacgtgacgccgcgacccgccagcgcgagcagcgcacccaggagtatttcgatgctcgtcgcgaggaacgcaccgccgccgccgaacgtgccggccagcgccaggctgcgctggccgaggaatgcgggcgcttgcggcaacagttgtcccagctcgaacgcggcggccgcttctatcggcaggacgccgcgttcgagctgggacaactgttgccgcannnnnnnnnncgcggcggccgcttctatcggcaggacgccggcggcgggccggtttacctgagcgatgccgagctggacgccattcgtcgcgaactggcctcgcgggagtccgaacgctgccgctga

SEQ ID NO: 325131 - DNA, 2016 bp, Pseudomonas aeruginosa
  misc_feature (1975)..(1984): n is a, c, g, or t
atgaagcaagttcttcaagatatggctaaaggtggcaccagtgtcacggtcgctccggcaccgcagatatcgcgtgatcatgtgattatcaatagtactgtctcgctgatatcggcggggaccgagcgtatgttggttggcttcggtaaggcatcctaccttgataaggctcgtcaacagccagagaaggtcaagatggtcttggaaaagatcaaaaccgatggattgatgaccacagtagaggctgtacagtccaagctcgcacagccacttcccctaggctactgcaatgtaggagtggtgtctgagatcggctctggtgttgagggcttcaaggttggtgatcgagttgtttccaacggtcctcatgctgatctagtcaaagtgtcgaagaacctctgtgcacgtattccggatggcgtcgatgatgaatcggcggcatttgtagtcgtggcgagcattggtctacagggtatccgtcttgcacaaccaaccttgggcgagtgttttgttgtcacaggagttggcctcattggtctactcactgttcagttgctacgggctcatggctgtcgggtgttggctattgattttgatgattcgaagctagaacttgctcgacagtacggggcgcagacttgtaaccctggtaaaggtgaggatccggttgctgcaggcatggcattcagccgaggaaaaggtgtcgacggcgtaattatcactgcctcaacaaagtccagtgaccctgtaactcaggctgcacgcatgagtcgtaagcgtggacggattgttttggtgggagtggtgggattggagctcaatcgcgctgacttttatgaaaaggagttgacttttcaggtatcgtgctcatatggaccggggcgctatgatcctgaatacgaggagaaaggaggagactaccctctcggctttgtccgttggactgagcaaagaaattttgaagctgtcctagacatgctggatagcggccaactggaagtgaaaacgttgattactcatcgttttaaattcgaggacgctccggcggcttattccactttaactcaggataactctggtctaggaatgctccttctgtatgcttcggatacggccgagcgagttgtccgtcatgtcccactatccgatatgaagggcttcaatgctcaaaagcccgtggttggtttcattggagcgggaaattacgcgtctcgtattctgatccctgccttcaagacggctggagcgcaattccatactctcgttacctccggcgggatcaatagtgttattcatggtgaaaaagctggattctcacaggcatcaaccaatattgatgcagtgctgaacgagcggatgatcaataccatcgctattgtgacccgacacgatacccatgcgcgtttagttgtcgatgcattgcgcaccgggaagaacgttttcgtggaaaagcctctggctatcacccatgcggagttggaggatgtacaagcagtccatgctattacgcatcagaccggtggtggtccgcaattgatggttggtttcaatcggcgttttgctccccatatacagaaaatgaagggcttgttggcgtctgtaagggagcctaagtccttcatcatgacgatgaatgcaggcgcaattccggtgggtcattggactcaagatattgctgtaggtggcggcagaatcataggtgaagcatgccacttcatcgatttgatgcgctacctggcaggaagccggatagtttcggttcaggcacgacgcatgggagattccaacgcaattgatacttctgaggacaaggcttcgattactctaggttttgaggatggttccttcggtactattctctacttggcaaacggtgcaagtagtttccccaaggagcgtattgaggtctttactgcggggcgagttttgcaattggataattttagaaagctgaaagggtatggttggccaggtnnnnnnnnnnggccagcggcagtgtgttgcggcgttccttga

SEQ ID NO: 325132 - DNA, 1653 bp, Pseudomonas aeruginosa
atggcacttcaaaaactcgtccgtctctatcatacgcttcggtacctgaggctcaagcagataatatttcgagtgtattatcgctttgcccaggtccgagttcatatttatcgaaatgttgctgtgcgtcgttggcgtagggactggtctgcgccctcttggaggaatttgtcaacgaatgatgctgtggagttcacctttctcgggataacagggaaagtgcagtgccccgaggactggcaagctgataggagcagtaaattatggctctataatctgcactatttggatgatctgaacgctagggacattggcagtcagcctgggctagccgataaactaattcaaagttggatccaggctaatccaccggtatccggtgaaggttgggagccttatcctctttccttgcgtatcgttaatcttgtgaaatggcttgctcgccatgatgagcgttcgacctttctggcggacagtctagctgtacaagcggacgcgctggtgcaacaagtagaatatcatatcttgggaaatcatctattcgctaatgggaaggcgttggtgtttgccggcgcttatctgtcaggcgcgatggctgatcgttggcttgccaaggggttacggatacttgacgaagagcttcctgagcaatttctgaatgatggtgggcatttcgaattgtctccgatgtatcacgccactttactctgggatatgtgcgacctggtgaatctctccacgcggtcgggcctacctgatttggctgagcgtctaccgcaatggcgagaggttgtggtccaaggattgaagtggcttcgtagcatgcagcatccggatggtagaattagcttcttcaatgatgctgcattcggaattgcacctgaatatgaagatattgcagcgtacgccaagcgcctcgatatatcacctccagctcatgaaaaccacctggcggcgatttataattcggctacaggttatgctgctgtacttcctgccgatggcgtgaaagctatattggatcttgcaaaggtcggtcccgactatcagccgggacatgcgcatgccgacacattgagttttgagttaagcgtctttggaaaacgcttagtagtcaattccggaacttctcagtacggtgatgactctgagcgacaaaggcagcgtggtactgcggcgcataatacggtgggattgcttggctatgattcctctgaagtttgggcgggatttcgcgttgcaaggcgtgcggcagtagtaattgagcgattcgaggttgaacctgaaataacctgtattcaggccagccatgatggatatggaaggcttgtgaaggggctacggcatcgtcgcacctggaccttcactcgtacgagtatggaaattttcgatagcataacaggtgatcaggttgtggctacttctcgattcttctttagtccagaagtaaaggtttctatgaaggccgatggatttgttgccgatatgggggcgggaaagaaagtctctatcgatttctcgggaagtgatgatgttcgtttgatttcttcaacgtggcatccggagtttgggtgttcattggccaatcagtgtctcgtggcgacttttagtggtgattcgctgactactcgtatttgctggggtggaatttga

SEQ ID NO: 325133 - DNA, 954 bp, Pseudomonas aeruginosa
atgttagaccagtcgcgtgcatttttcagctacctcaagggcgttcttggtatcactcgtaataaggattatgatgtggtatatgcaacttcctctcggttgatgacggcttctcttggtgccttggtggcgaggcaattgcgatgtcctctgtatttggatattcgagatatcttcgtcgatacaattaaggatgtgttgccaagtcggataagtttctttgtaaagcctattttctcaatgatggagcgtatcactgttcgaactgctacccgagttaatctggtctctgcaggttttctgccttacttcaactcgcgttaccctggtggtgattttgttgtatttacaaatggaattgatgatgagtttgtcaaggtgcagacttcttgtgagcgtgaagaaagctctagtctgtatacggtgctttacgcaggtaatatgggcgagggccagggactccatttgattattcctcagattgcccggcatttcgacggccatttgaggttcctctgtatcggtgatggaggaagaagaaagcagttacaagatgccattgaagaggctggttgcaccaatgttgagataacatctcctgttccccgtagtgagttgatcgcagcctatcagaaagcagatgttctatttttgcacctaaatgattacgatgctttccgaaaagttcttccctcgaagatttttgagtatgccgccttgggaaaacctatttgggctggagtggccggttattcagcggggtttattcaggattttatttcgaatgctgcggtctttaggccttgtaatgtcgaagatgcgataaaggcattttcttctttgtccatggtgacaaaacctcggaaagagtttgtcgaacgcttcgcacgcgaaaagatcatgaaagcactagcggaggatattatctttgtggttcgcggtgaggtgaaatga

SEQ ID NO: 325134 - DNA, 954 bp, Pseudomonas aeruginosa
atgagagtctttcttactggtataacgggctttgttgggcttgctacttcaaagcgtctactgcaagaggggcattgtgtgcgagcggcagtgcgtgatgccaatccagcgcttgcgcaagaagttgagcaggttgtttttgggaatttggtaaagcacgactgggcttcttcgcttgaggggcaagaggtagtgatacactgtgctgctcgtgttcatgtgatgaaggatgcatcccgcgaccctttgagtgagtttcgacgggtcaatgttgagggtaccctaaatctagcgcgccaggcggcgaaagctggcgtcaagaggtttgttttcattagctcaataaaggtcaatggtgaaagtactagactgggtgttccttataccgctgatgatattgccatgccgcttgatccatatggcgtttccaaacttgaggctgaacagaagctgctctctctagccgctcgggttgacatggaagtgagcataatacggccggttttggtatatgggccaggtgtaaaggcgaattttttgagcatgatggaatggctgaaaaaaggaatgccattgcctcttggcgctattgataataagcgtagtctggttgcgttggacaatctggttgatcttattctcacttgtatgaaacatccggctgccgcaaatcagatatttctcgtcagcgacgatgaggatctttccaccacagaattattgcggcgtaccggcaaagcgatggggcgtccagccaggttgatacccattccatctcggtttctcggtttttccgctcgcttgctcggtaagccggctattgtgcagcgtctgtgcgagtcgctacaggtcgatattgaaaagactcgagacctgttaggctggcagcctcctgtcagcgtagatgaagccttgcataagactgtgcatcacttcttggagcatcaacaataa

SEQ ID NO: 325135 - DNA, 1017 bp, Pseudomonas aeruginosa
atgaacttctggttttggcttcccgtagttatggggctttctttagtcttgaccggaggtctgcgtcgatacgctttggcgcgtagcttgatggacgttcccaatgcccgtagctctcactcggtacctacaccccgtggggggggggtggctatcgttatgagtttcctactggttttgctgattctggcggcccttggtcaagtgagctgggactatacgtgggcgttgctaggtgctggtattggcattgcggttcttggctttctagacgatcatggccatatcgcagcacgctggcgtcttttggggcacttcttggcagcagcgtggggcctattttggatcggcggcttgccacctttgacagtatttggcttttttctggatctgggtttgttagggagtgtactggcagcgttctatctggtgtggttgcttaatctatacaacttcatggatggcattgatggtatcgctagtgtggaggcaattagtgtttgtctcggtggggctctacttttcctgttcgtcggagagtttaaggtagcacaggtcacattggtactggcggcagcagttatggggtttctattttggaatttcccgtcggctcgaattttcatgggggatgcgggaagtggtttccttggtatcgttctaggtattcaatctttacaggcagcttggattgctcctcaattgctatggagctggattattctgctcggcgtgttcattgtggatgcaaccttcacgctactgcgccggctgatacgcggagagaaagtctacgaggctcaccgcagtcatgcctatcagtttgcttctcgtcattatggacgacatctcccggttactcttgctgtatttgctatcaatttcgtatggttgctaccatttgcagtacttgtagcccttgggaagcttgatggttttttgggggttttgttttcctatgttccattgttgatgctggcgatccgttataaggctggtgagctggaaaggctatag

SEQ ID NO: 325136 - DNA, 1965 bp, Pseudomonas aeruginosa
atgcctcgcaggtacaagaggatgctgcagatcatcgcagatgtgattttggtatggctatcgctctggctagccttcctggtcaggctgggcacggaagacatgatcagccccttcgagggccatgcctggctgttcatcgccgccccgttggtggccattcccctgttcatccgcttcggcatgtaccgggcggtgatgcgctacctaggcaacgacgcccttatcgcgatcgccaaggccgtcaccatttccgcgctggtcctgtcgttgctggtctattggtaccgctccccgccggcggtggtgccgcgttccctggtgttcaactactggtggttgagcatgctgctgatcggcggcttgcgtctggctatgcgccagtatttcatgggcgactggtactctgctgtgcagtcggtaccatttctcaatcgccaggacggcctgcccagggtggtcatctatggcgctggcgcggccggcaaccagttggttgcggcattgcgtctcggtcgggcgatgcgtccggtggcgttcatcgatgatgacaagcagatcgccaaccgggtcatcgccggtctgcgggtctataccgccaagcatatccgccagatgatcgacgagacgggcgcgcaggaggttctcctggcgattccttccgccactcgggcccggcgccgagagattctcgagtccctggagccgttcccgctgcacgtgcgcagcatgcccggcttcatggacctggccagcggccgggtcaaggtggatgacctgcaggaggtggacatcgctgacctgctggggcgcgacagcgtcgcaccgcgcaaggagctgctggaacggtgcatccgcggtcaggtggtgatggtgaccggggcgggcggctctatcggttcggaactctgtcggcagatcatgagttgttcgcctagcgtgctgatcctgttcgaacacagcgaatacaacctctatagcatccatcaggaactggagcgtcggatcaagcgcgagtcgctttcggtgaacctgttgccgatcctcggttcggtgcgcaatcccgagcgcctggtggacgtgatgcgtacctggaaggtcaataccgtctaccatgcggcggcctacaagcatgtgccgatcgtcgagcacaacatcgccgagggcgttctcaacaacgtgataggcaccttgcatgcggtgcaggccgcggtgcaggtcggcgtgcagaacttcgtgctgatttccaccgacaaggcggtgcgaccgaccaatgtgatgggcagcaccaagcgcctggcggagatggtccttcaggcgctcagcaacgaatcggcgccggtgctgttcggcgaccggaaggacgtgcatcacgtcaacaagacccgtttcaccatggtccgcttcggcaacgtcctcggttcgtccggttcggtcattccgctgttccgcgagcagatcaagcgcggcggcccggtgacggtcacccacccgagcatcacccgttacttcatgaccattcccgaggcggcgcagttggtcatccaggccggttcgatggggcagggcggagatgtattcgtgctggacatggggccgccggtgaagatcctggagctcgccgagaagatgatccacctgtccggcctgagcgtgcgttccgagcgttcgccccatggtgacatcgccatcgagttcagtggcctgcgtcctggcgagaagctctacgaagagctgctgatcggtgacaacgtgaatcccaccgaccatccgatgatcatgcgggccaacgaggaacacctgagctgggaggccttcaaggtcgtgctggagcagttgctggccgccgtggagaaggacgactactcgcgggttcgccagttgctgcgggaaaccgtcagcggctatgcgcctgacggtgaaatcgtcgactggatctatcgccagaggcggcgagaaccctga

SEQ ID NO: 325137 - DNA, 1092 bp, Pseudomonas aeruginosa
  misc_feature (707)..(716): n is a, c, g, or t
atgagtctgttttctgccgtcgaaatggcaccgcgtgatcccatccttggcctgaacgaagccttcaacgccgatacccgtccgggcaagatcaacctgggcgtgggcgtgtactacaacgaggaggggcgcattccgctgttgcgtgccgtgcaggctgccgagaaggcccgcatcgaggcccacgcgccgcgcggctacctgccgatcgaagggatcgccgcctacgaccagggcgtacagaaactgctgttcggtaacgaatccgagctgctggccgccggccgcgtggtcacgacccaggccgtcggcggcaccggcgccctcaagctcggcgccgacttcctcaagcgcctgctgcccgacgccaccgtggccatcagcgacccgagctgggaaaaccaccgcgcactgttcgaagccgccggcttcccggtgcagaactaccgctattacgacgccgccagcaatggcgtgaaccgcgccggcctgctggaagacctgaatgccctgccggcccgctcgatcgtggtcctgcacgcctgctgccataatccgaccggcgtcgatctcgagctggacgactggaaacaggtgctggacgtgctcaaggccaagggccacgtgccgttcctcgacatcgcctaccagggcttcggcaacggcatcgaggaagacgccgccgcggtgcgcctgttcgcccagtnnnnnnnnnngtcccaggtgaagcgggtgatccgcaccaactattcgaacccaccgacccacggcgccagcgtcgtctcctccgtgctcaacagctcggaactgcgggccctctgggagcaggaactgggcgagatgcgcgaccgcatccgcgacatgcgcctggcgatggtcgagcaactggcagcccacggcgccaagcgcgacttcagcttcgtcggtcgccagcgtggcatgttctcctattccggcctgaccgccgaccaggtcgagcgcctgaagaccgagttcggtatctatgccgtcagcaccggccgtatctgcgtcgccgcgctgaacaaatcgaacctggagaccatcaccaaggccatcgtccaggtcctgtag

SEQ ID NO: 325138 - DNA, 2013 bp, Pseudomonas aeruginosa
atggatacgttccaactcgactcgcgcttcaagcccgccggcgaccagccggaagccatccggcagatggtcgaggggctggaggcggggctttcgcaccagaccctgctgggggtgacgggctctggcaagactttcagcatcgccaacgtgattgcccaggtgcagcgcccgaccctggtcctggcgccgaacaagaccctggcggcccagctctacggggagttcaagacgttcttcccgcacaattccgtggagtacttcgtttcctactacgactactaccagccggaggcctacgtaccgtcttccgatacctatatcgagaaggactcctcgatcaacgaccatatcgagcagatgcgcctgtcggcgaccaaggcgctgctcgagcgtccggatgcgatcatcgtcgccaccgtatcgtccatctacggcctcggtgatcccgcgtcctacctgaagatggtcctgcacctggaccgcggcgaccgcatcgaccagcgcgaactgttacggcgactgaccagcctgcagtacacccgcaacgacatggatttcgcccgtgcgactttccgtgtgcgtggcgatgtgatcgacatcttcccggccgaatccgatctcgaggcgattcgtgtcgagttgttcgacgacgaggtggaaagtctctcggccttcgacccgctcaccggcgaggtgatccgcaagctgccgcgcttcaccttctaccccaagagccactacgtgaccccgcgcgagacgctgctggaggcggtcgaccagatcaaggccgaactcaaggaacgcctggactacctgcgcaacaacaacaagctggtggaagcgcagcgcctggagcagcgcacgcgtttcgacctggagatgatcctcgaactgggctactgcaacggcatcgagaactactcgcgctatctttccgggcgggcccccggcgagccgccgccgacgctctacgactacctgccggccaactcgctgctggttatcgacgaatcgcacgtcagcgttccgcaggtcggcgcgatgttcaagggcgaccgctcgcgcaaggagaccctggtggaatacggtttccgcctgccttcggcgctggacaaccggccgctgcgcttcgaagagtgggaggcggtgagtccgcagaccatcttcgtctccgccaccccgggcccctacgaggcggaacatgccgggcggatcatcgagcaggtggtgcgtcccaccgggctggtcgatccggagatcgaggtacgcccggcgatgacccaggtggatgacctgctctcgcagatccgccagcgggtggccaaggacgagcgggtgctggtgactaccctgaccaagcgcatggccgaagacctcaccgattatctcggcgatcacgacgtgcgggtgcgctacctgcactcggacatcgataccgtcgagcgagtggagatcatccgcgacctgcgcgccggtgcgttcgacgtgctggtggggatcaacctgctgcgcgaaggcctggacatgcccgaggtgtcgctggtggcgatcctcgacgcggacaaggaaggcttcctgcgctcggagcgctcgctgatccagaccatcggtcgtgccgcgcgcaacctgcacggcaaggcgatcctctacgccgacaacgtcaccggctcgatgcagcgtgcgatcgacgagaccgagcggcgtcgggccaagcagatcgccttcaacgaagcccatggcatcgtgcccaagggggtgcgcaaggacatcaaggacattctcgaaggcgccgtggtgcccggcgcgcgcggcaagcgcaagggcgtggccaaggtggcggaggagagcgggcgctacgagaacgaactgcgctcgccgagcgagatcagcaagcgcatccgccaactggaggaaaagatgtaccagttggcccgcgacctggagttcgaggcggcggcgcaactgcgcgacgagatccagacgctgcgcgagcgcctggtcaacgtctga

SEQ ID NO: 325139 - DNA, 768 bp, Pseudomonas aeruginosa
gtgatcgagcccaacctgcgaggcaacggcaaggtcgccctggtcaccggggcggcccggggcattggcctgggcatcagtgcctggctgatcgccgagggctggcaggtagtgctggccgacaacgaccgtgaacgcggtgccagggtggccgaggcgctgggcgagcacgcctggttcgtggccatggacgtggcccaggagggccaggtggcgatgagcgtggccgaggtgctcggtcagttcggccgcctcgacggcctggtctgcaacgccgccatcgccaatccgcgcaatacgccgctggaggcgctgagcctcggcgagtggacccggaccctggcggtcaacctgaccggtccgatgctgctggccaagtactgcacgccttatctgcgcgcgcacaacggcgccatcgtcaacatcgcctcgactcgtgcccaccagtcggagcctgactccgaggcctacgccgcgagcaagggcgggttgctggcgctgacccatgccctggccgccagcctgggcccggagatccgtgtcaatgcgctcagccccggctggatcgatacccgcgaggccgccgagcgcgaggctgcgccgctgaccgagctggaccacgaccaacacctggtcggccgggtcggaacggtggaggatgtcgcgtcgctggtggcctggctgctctccgaggacgccggtttcgtcaccggccaggaattcctggtcgatggcggcatgacccggaaaatggtctacctcgactga

SEQ ID NO: 325140 - DNA, 1440 bp, Pseudomonas aeruginosa
  misc_feature (1399)..(1408): n is a, c, g, or t
gtgaaacagaaacaggaaaccgtcaaagcctggttcggcagcggctcgccctgggtgtggatgaacgccggcgcggtgtcgatcgcggtgatcatgaccatcggcctgctggcggtgatcgcggtacgcggcctcggccacttctggccggcgaacgtcatcgaggcgacttaccagatccctggcgaagccgccaagaccgtgatcggcgaggtggtccaggccgaggaagtgccgcgcgcgcgcctgcgcagcgccggcatgccggtcccggaggccggccccgaattcatgacccgcgagctgctcaagctgggcaaccgcgagctttacggcagcgatttctcctgggtcgtcggcgagtggctgcaggacatcaagcgtcccgaagcgctgatggttctcgaacgccgcgagtggggcaacttctacggctacctgctgagcgtcaaggagaacggccaggtggtcgccgaaggcgacgccgcggtaggcgaactgcagaagcgcatgcagcgggtggatgacctctacgccaagctctacaagctggagaagggcgacatcggcgggatcaaccacggtctcgagcgcctgcgcctgaaagagcgcaagttgcagttggacggcaagctggacgccgccgcccaggccgacctggccgccgagcgcagcgagttgcaggcgcgctacaaggtcctggaagagcagctcaacggcctgcaccaggagttcaaccgcgacagcgtggtaatgcgcgacgccagcggccgcgagagcgaaatcacccttggcaagctggtgcatgcctaccagcccaacgccatgggcctgggcaccaagatgacggtgtacttcaagaagctctgggagttcctcagcgacgatccgcgcgaggccaataccgagggcggtatcttcccggcgatcttcggcaccgtgatgatgaccctggtgatggcgctgatcgtcaccccgttcggcgtgatcgctgcggtctacctgcgcgagtacgccaagcaggggccgctgacccgggtgatccgcatcgccgtgaacaacctcgccggcgtaccggcgatcgtctacggcgtgttcggcctgggcttcttcgtctacgtgctgggcggttccatcgaccggctgttcttccccgaggccctgccggcgccgaccttcggtacccccggactgttctgggcctcgctgaccctggcgatcctcgccgtgccggtggtgatcgtcgccaccgaggaaggcctggcgcggattccgcgcgcggtccgcgaaggctccctggcgctcggcgcgaccaaggcggaaacgctgtggaagatcgtcctgccgatggccagcccggcgatgatgaccggcctgatcctcgccgtggctcgtgccnnnnnnnnnnaaatgtggcagaagatggagcagagcgcctga

SEQ ID NO: 325141 - DNA, 903 bp, Pseudomonas aeruginosa
atgagcaaagtcagcgcgctagtggtggatgacgcccccttcatccgagatctgatgaagaaagggttgcgcgacaacttccccggccttcatatcgaggaggccgtgaacggccgcaaggcccagcaactgctcagtcggcagaacgtcgacctgatcctctgcgactgggagatgccggagatgtccggcctcgaactgctgacctggtgccgtgcccaggaaaacctcaagactaccccgttcatcatggtcaccagtcgcggcgacaaggagaacgtggtccaggcgatccaggccggggtgtcggactacatcggcaagccattctccaatgaccagctggtggccaagatcaagaaggccctgagccgcagcggcaagctggaagccctggcggcccacgcgccgcgccgggagatcgccagcggcatggccaacgattcgctggccgctctgaccggcggtcgcgccgaggtgatcaagcccgccgccagtccggcaaaaccggcccccgccccgaagccggcttcggctccccaggccagcgcgcgtcccgccggcagcggcaacccgctgggccaggcgcaattgcgcctgccgcagagcagcatgccctgcgtgatcaaggcggtcagcctgaaggaagcgcaactggtggtgaagcgcgccgacccgctgccgcaggtgctggaaagcgcggtgctggacctcgaggaaaacagcgacgtggcgcgcctgaacggctacctgcacgccatcgccgcgctggagccgaagccggatagcgattggctgctgctgaccctgcgtttcgtcgaccgcgacccgcagaagctcgactacctgtcgcgcctgatcgcccgcggaagtacccagaagcactacgttcccggcgcctga

SEQ ID NO: 325142 - DNA, 1161 bp, Pseudomonas aeruginosa
atgcaaaccaacctctgcgattccgcccggcaacgcgccgaggccgccgaagccgagcgcatcctgcgcagctgcgtgcactgcggtttctgcaacgccacctgcccgacctaccaggagctgggcgacgaactcgacggcccgcgcggacggatctacctgatcaagcagttcctcgagcgcttcgccaccgaggcggtcgcgcgccgagcgtaccgggatatcggccgcgacctcctcgccgaacgcctgccgcgcggcttccggcaacgcctgctgcgcgacgtgctgcgcctgctggccccgcgcccggggttgttcggcgtgctggccggcgctgccgggcggctgaggcctctgctgcctgaggcgatgcagggcaagctgccacgtcgggtcgcggcgccgggcaggcggccgcagccccggcatgcgcggcgcgtgctgctgctcgaaggttgcgtgcagccggcgctgtcgccgaataccaacgccgccgccgcgcgggttctggaccgcctgggaatcagcgtgacgccggcggccgcggccggctgctgcggcgcgctggatttccacctggatgcgcaggagcgcggccgccagcgcgcgcggcgcaatatcgacgcctggtggccgttgctgcgcgagggtgccgaggccatcgtgcagaccgccagcggctgcggcgccttcgtcaaggactacgcctacctgctgcgcgacgacccacggtacgcggacaaggcgcgcgaggtcgccgccgctgcccgcgacctggtggaagtgcttcgcgacgagccgctggagtccctcggcctgcgctgcgaccagcgcctggcattccactgcccatgcacactgcagcacgcgcaacgactgggcggggccgtggaggcggtgctgcggcgactgggcttccatctcaccgaggtggccgacggtcatctctgctgcggctccgccggcacctactcgctgacccagccggcgctgtcccggcgtctgcgcgacaaccgcctggacgccctggaaagcggcgcgccggatgtcatcgccacggccaacgtcggttgccaggcccatctcgacggggccggacggaccccggtacgccactggatcgagctgctcgaccaggccttgcccggaggagagtga

SEQ ID NO: 325143 - DNA, 1155 bp, Pseudomonas aeruginosa
atgagcgagcgtgcgcccctggtaatcatcggaaccggcctggcgggctacaacctggcccgcgagtggcgcaagctggacggcgagacgccgctgctgatgatcaccgccgacgacggccgttcctattccaagccgatgctctctaccggcttctcgaagaacaaggacgccgacggcctggccatggccgaaccgggcgccatggccgagcaactgaacgcgcgcatcctgacccatacccgggtcaccggtatcgatccgggccatcagcggatctggatcggcgaggaagaggtgcgttatcgcgacctggtcctggcctggggcgcggagccgatccgggtgccggtcgagggcgatgcccaggacgcgctctacccgatcaacgacctggaagactacgcgcgcttccgccaggcggctgccggcaagcgccgggtactgctgctcggtgcggggctgatcggttgcgaattcgccaacgacctctccagcggcggctaccagctcgacgtggtggcgccttgcgagcaggtcatgccgggcctgctccacccggccgcggcaaaggccgtgcaggccggcctggaaggcctcggcgtgcgcttccacctggggccggtgctggccagcctgaagaaggccggcgaggggctggaagcgcatctttcggatggcgaggtgattccctgcgacctggtcgtctccgccgtcggcctgcgtccgcgcaccgaactggccttcgccgccgggctggcggtcaaccgcgggatcgtcgtcgaccgctcgctgcgcacctcccacgccaacatctacgcgctgggcgactgcgccgaagtggacggcctcaacctgctctatgtgatgccgctgatggcttgcgcacgcgcgctggcgcagaccctcgccggcaaccccagccaggtggcctacggtcccatgccggtgacggtgaagaccccggcctgcccgctggtggtgtcgccgccgccgcgcggaatggatggccaatggctagtggaaggctctggaacggacctcaaggtcctgtgccgggataccgctggtcgagtgatcggttatgccctgaccggagcggcggtgaacgaaaaattggccctgaacaaagagttacccggcctcatggcttga

SEQ ID NO: 325144 - DNA, 813 bp, Pseudomonas aeruginosa
  misc_feature (744)..(753): n is a, c, g, or t
atgcagcggctctatcggaaacgcatcgtcctcggcgtgggcggcggcattgccgcctacaagagcgccgaactggtccgccgcctgcgcgaccagggcgctgaagtccgagtggtgatgacccagggcggccgcgagttcatcacgcccctgaccctccaggcgttgtccggccatccggtgcacaccgatctgctggacccggcggcggaagccgcgatgggccacatcgaactagcccgctgggccgatctggtgctgatcgcaccggccaccgccgacctcatggcgcgcctggtccagggcgtggccaacgacctgctgaccaccctggtgctggccaccgacgcgcaaatcgccctggcaccggcgatgaaccaggccatgtggcgcgacaccgcgacccaggccaacgccgagctgctgcgccagcgcggcttccacctgttcggtccggcagcgggcagccaggcctgcggcgacgtcggcctcgggcgcatgctcgaagccgaggaactggcgcagcgcgccgccgactgcttccagcgccaggcgctgaccggcgtgcatgtgctgatcaccgccggcccgacccaggaaaacatcgatccggtgcgctacatcaccaaccacagttccggaaagatgggcttcgccctcgccgaggcggcggtggaagccggcgcacgggtgaccctggtcaccggcccggtgcacctgccgacgcccgaccgggtgcagcgnnnnnnnnnntggtcagcgcccgcgacatgctggccgcctgcgaggcggcaatgccctgcgacctgctga

SEQ ID NO: 325145 - DNA, 1824 bp, Pseudomonas aeruginosa
atggaaaaccagagcccccacctctcgttgcgcgtccccactccgacgcagcagaacctgagcttctgcgacgccaccccgaaggacatcaagtactggctggcgcacctgcccaaggccaacctcggggaaaccgcgcgccagctctaccagggcctgatcgaactcaaccagttggtgctgcccgtcgaggcccgcctgcaactgctcgaactgttccgtccagaggtgcatttcgtctgcacccacctggaacggcacttcctcaaccaggccatcgtcctcgacgaacggccgcgcaagatcgccaacctctgccaggccctgcagaaccacctggccatcggctacaagctgatcgtggtccaggaagcgccgcgcaacagccgcgaccgcgcgcagttgctcgcggtcggcatccagcgggcgatccgcagcctgtgcggcccgctgatccgtgccagccagttgtactgcccggtccccgaggggctttggctggaactccaccagctctaccagttggccagccagcgcggcgtgcatcgtctcgcggtgcgcgacgaactggccaagcacacccccggcctgagcgtcgagcaggcctacctgataccgctgctgctcggctgcgcgcgctgcaaccagatgcgccagaacaacattgcacggctcgccgaggtgctcgaaccctggagccaattgctgtcgatacagagcgcggcgctgcccggctcgctgttcatcgccgtgccgcagatcgacggcccgccgcgctaccgctcgctgtacccggagacccaactggccaatgccctgggcatcgacacccagccgctggtcgaactgatccgcgaatacctgctgcagcccgaggccgagcgcgcgaaggcgcgcctgccgctgatcgaaggggtgaccctggacctgctgcaacatctctcctcggcctggggagacatcgccgaacgtaccttccagcgcacccagggccagggccagttgaccctgtgcatcggcatgagcgccctgcactacttcctcgccgggcgccgcccgttcaacgaggtcctgcagatccaggaagcgcccgaggcgcctcgcttcaaggccgacgtccaggacgcctgggccggcgccttcgatgcgcagaaggtcaccgactggcagcccggcatgccgctggaggaaatcgagtaccgcccgcaccagtcgtcccgcggtgggcagcccgatcacccgcaggcccacgcacagactgacgccaccgaggactatccgacctacgccctgcccatcgtcaaccacagccccggcggttattgcctgagctggccgaaggaggtgcccgcccaactgcaggcgggcgaactggtcggtctgcaggaccttcccggccaggcgtggagcatcgcggtggtgcgctggatccgccaggtgcgcaatggcggcacgcagatgggcatcgagatgatcgccccggcggcgcagccctgcggcctgcaactgctgcgcaagaccgagcagagcagccactacctgcgcgccctgctgctgccggaaatcgccgcgatctcgcggccggcgacggtgatcaccccgcgcctgccgttccaggagggcagccgggtgcagatcaacctgcacggcgaggagcggcgcgcggtgctgaatcgccggcaggcctcgaccggcagcttcagccagttcgaataccgctcggcggaaccggtgaacaccccgagcgataagccggtcacagcgccagtggcccggccgcctgcgggggaggaagattttgactcgctctggaagtctctgtag

SEQ ID NO: 325146 - DNA, 255 bp, Pseudomonas aeruginosa
atgatcgtggcctccatcgaaaccgtctgggccggcctggttacgccgccgaagcgcgaactgaagaccttccgctacgacgaagccgcccgcgcgccgatccgcctggaaaaaggcgccgagctgggtcgcttcaagctgggctccaccgccatcgtcctgttcggcccgcagcaggtcgcgttcaacgacggcctcggggcagcgagcccggtgcgcatgggcgagtgcctggccctgccgaaacaggcctga

SEQ ID NO: 325147 - DNA, 510 bp, Pseudomonas aeruginosa
  misc_feature (299)..(308): n is a, c, g, or t
atggcgaccgccccgcgaccgctgcgcgagcagtaccttcatttccagccgatcaccacgcgctggcacgacaacgacatctacggacacgtgaacaacgtgacctactatgcgttcttcgacacggcggtgaatacctacctgatcgagcgcggcggcctggatatccagggcggcgaagtgatcggcctggtggtcagttccagttgcgactatttcgcgccggtggccttcccccagcggatcgagatgggcctgcgggtggcgcgcctgggcaacagctcggtgcagtacgaaannnnnnnnnnggcctgcgcctcggcgcgggtggcgcgcctgggcaacagctcggtgcagtacgaactggccttgttcctcgaaggggagcgggaggcctgcgcggccgggcgtttcgtgcatgtcttcgtggagcgccgaagcagccgcccggtggccattccgcagggactacgcgatgctctggccgcgcttcagagcgcggcccagtga

SEQ ID NO: 325148 - DNA, 408 bp, Pseudomonas aeruginosa
atgcgtaaatctctcctggtaatcgcgttcggcctgctgggcgcacaagccgcgttcgccggcgactccaccaagaccgccgtgggcggcggcgtgggcggcgccctgggcaacgtcgtgggcaacgccatcggcggtagcaccggtgcggccataggtgccggcctaggtggcgcggccggcggcgcgatgaccgccaaggacgggcgcaagaccgaagcagccctgggtggcgggctaggcgcggccggcggttcggtgatcggcaacaagctgggcggcagcaccggcgcgaccataggtgcaggcctcggcggcgcagcgggtggcgcggtcggtaacaacctgggcaaggacaacgacagcggtcaccgcggcaagaaacaccgcaagcacaagcatcgttga

SEQ ID NO: 325149 - DNA, 2322 bp, Pseudomonas aeruginosa
atgagcctgcaacctctccaaccccgctacaagccctacgccggtgccgccgccggctggggcgcgctgcgcagcgtggcgcacttctggctggacagcaaacagccgttcaagaacctccgcgccctgctcaagaccaaccagaacggcggtttcgactgccccggctgcgcctggggcgactcgccggaagacggccgggtgaagttctgcgagaacggcgccaaggcagtcaactgggaagccaccaagcgccgcgtcgacacggcgttcttcgcccgttacagcgtcagcgccctgcgcgaacagagcgactactggctggaataccagggccgcctcaccggaccgatgcgctacgacccgctcagcgaccactaccagccgatcacctgggacgccgccttcgccctggtcgccgagcacctgcgccgcctggatagccccgaccaggcggagttctatacctccgggcgggccagcaacgaggcggcctacctctaccagttgttcgtccgcgcgttcggcaccaacaacttccccgactgctcgaacatgtgccacgaggccagcggcgtggcactgggccgcagcgtcggggtcggcaagggcagcgtgaccttcgacgacttcgaacacgccgacgcgatcttcatccttgggcagaaccccggcaccaaccacccgcgcatgctcgagccgctgcgcgaagcagtgaagcgcggcgcccaggtggtctgcttcaaccctctcaaggagcgcggcctggagcgcttccagcatccgcagaatgcgctggaaatgctgaccaacggctcctcgccgctgaacaccgcgttcttccgtccggcactgggcggcgacatggcggcgatccgcgggatcgccaagttcctcctcgcctgggagcgcgacgctcaggccgagggcggcgagccggtattcgaccacgccttcatcgccgagcacaccgacggcctcgaggcctacctggccgaactggatgccaccccctgggaacacctggagcgccagtccgggctgagcctggcggaaatcgagcaggctgcgcggatgtaccggcgggcgaacagggtcatcgtctgctgggcgatgggcatcacccagcaccatcattcggtggcgatcatccaggaaatcgtcaacctgcaactcctgcgcggcaacctgggccgcccgggcgccggtctctgcccggtccgcggccacagcaacgtgcagggcgaccgcaccatgggcatcaacgagcggccgccggcggcgctgctcgacgcactggaacggcgcttcggcttcgaagtgccacgccacaacgggcacaacgccgtcgaggcgatcgccgcgatgctcgcgggcaagtcgaaggtcttcatcggcctgggcggcaatttcgcccaggccaccccggacagtccgcgcacccacgccgccctggcgtcatgcgacctgaccgtgcacatcagcaccaagctcaaccgcagccacctgaccaccggccgcgacgcactgatcctgccctgcctggggcgcaccgacatcgaccgccaggccgaaggcccgcaggcggtcacggtggaagactcgttcagcatgatccacgcatcctacggacaactggagccgctctcgcagcagatgcgttcggaaccggcgatcatcgccggcatcgccaaggcaaccctgggcaaccatccggtggactgggacgcgctgatcgccaactacgagcgcatccgcgagctgatcgccgacaccatccccggtttcgccgacttcaaccgccgcgtccggcatcccggcggcttctacctcggcaacgccgccggcgaacgacgctggaacaccgccagcggcaaggccaacttcatcgccaacccgctgccccgcgacctgttgccggcacaggtgcgcgacagcggcctcgaacccgacctgatcctgcagaccctgcgctcccatgaccagtacaacaccaccatctacggcctggacgatcgctatcgcggagtgaagggccagcgcgaagtggtattcgccaacgaggcggatatccgccgcctgggctaccagccgggcgacaaggtcgacctggtctcgctgtggagcgatggcatcgaacgccgggtacgccgcttcaccctgctcgccttcgacatcccggccggccaggcagccgcctactacccggaaaccaatcccctggtgccgctggagagcgtcggcgtcggcagccatacgccgacttcgaagttcatcgcggtacgcctggaaaaggccacgggcgacgggcgcattatctga

SEQ ID NO: 325150 - DNA, 840 bp, Pseudomonas aeruginosa
atgccttgccagcctgcatgcccggtatccgccgatacctgggcgccttccgccgttcccgacgtttaccgctacgccgacctgcacctgccgcagcagatcggccaggcctcccttgccgccgagtgcgccctggcgatcagttacaacggactgaaccaggcggtgatgatggcctcgcccgaggacatcgaggatttcgtccgcggcttcagcctcagcagtggcttcgtacaggccatcgacgaaatctatgaaatccgcgtcagcggccagggcgaatccctccacgccgaggtcgagatcagcagccgcgcattctggaacctcaagcgccagcgccggcaactggccggcacgtcaggctgcggcctgtgcggcgtcgaagccctggagcaggcgctgccgcaactgccggagcggtcgtcgcaggcgctgcctcccgccgcccatctcggcgccctgcgccagcgtatcgagcaggcccagcgactggcgcgccatagcggcgccctgcatgccgcgctgtatttcgacgggcatggcgagctgcgcctgtgtcgcgaggacatcggccgccacaacgccctcgacaagctgatcggcgccctgcatggacagggactggatgctgcgcagggcttcgccgtggtcaccagccgctgcagcctggagcttatccacaaggccgtacgcgccgggatcggcaccctggtcagcctctccgcgccaaccgccctgaccgtgcaatgggcgcgccgccaccagctgaacctgatccaccagccccatcacagtgccccgcgggtctacagcccggcgccggccgcaaccgagtga

SEQ ID NO: 325151 - DNA, 672 bp, Pseudomonas aeruginosa
atgaggccggtgccttggggcgaattggtggcgctggtgcggcgcgccggcgaggcgatcctgccgcactggcgcgccgacgtggcggtgcgctcgaaggccgacgaatcgccggtgactgccgccgacctggccgcgcaccatatattggaggcgggattgcgggcgctggcgccggacattccggtgctttccgaagaggattgcgagataccgctgagcgagcgcggccactggcggcgctggtggctggtggacccgctggacggcaccaaggagttcatctccggtagcgaggagttcaccgtcaacgtggccctggtcgaggatggccgggtgctgttcggcctggtcggcgtgccggtgagcggccgctgctactacggtggcgccggtctcggtgcctggcgcgaggaggccgatggccgcgcgcaaccgatcagtgtgcgcctggagcccgaggaggccttcaccgtggtggccagcaagcgccacggcagcccggcccaggagcgcctgctggatggcttgagcgagcgcttcggcgacctgcggcgcgcgccattcacctacgagccgcgcgaggactacctcaacggctccttcctggccctgccgcgcgctgccgagtggcgcagcgaactgatccaactggcgcgcgcgctgcactga

SEQ ID NO: 325152 - DNA, 447 bp, Pseudomonas aeruginosa
atgagcagcgacttctggaactcggtgatcaacgtcaacctcaatgccccgcaggtgctgacccaggccctgctcgacggcggcaagctgcatgacaacggccgggtggtgttgctggcgtcgatcagcggcatcgccggcaacctcgggcagagcaactacgcggtgagcaaggccggcctgatcggcctggcccaggcctgggcgccggcgctgggcaagcgcggcatcaccatcaacgcggtggcgccggggttcatcgagacgcagatgaccgccgccattccgctgaccatccgcgaggccggccggcggatgaactccatgagccagggcggcctgccgcaggacgtcgccgaaacggtggcctggttcgcccagccgtcgtccggcgcggtcagcggccaggtgctgagggtgtgcgggcagagcctgctgggggcctga

SEQ ID NO: 325153 - DNA, 885 bp, Pseudomonas aeruginosa
  misc_feature (841)..(850): n is a, c, g, or t
atgaccgatcgttacatcgccttcgccaactcccccgtcggccgccgcctggttggcgccgtcggccttccctccccgctgcgcctggagcgctggcaggccggccgggtgcggccggtggacggcccgctggtgatcggcgggagcggcgcgctggccgaggccatgctgcccttcgccggcaagctgaccgacgcagtgttcgccgccgtcgagggacagttcgagctgccgcgctggaccgccgagcacagcccacgggccaaggcggtgctgttcgacgccagcggcctgacccgcttcgagcagttggtggcgctgcgcgacttcttccagccggtgctcaagggcgcccccgagtctctcaaggacccggtcgccgccagcgtgcaacgcagcctggaaggtttcacccgctccctgggcaaggaaatccgtcgcggcggcaacgtgcagttgctgtacgtcggcaagggcgccgaggaccaactggaaggcgcactgcgcttcttcctctcgccgaagagcgcctacgtctccggccaggtgatccgtcttgccgccaacagcgcccaggtccacgactggagcaagccgctggccggccagcgcgcgctggtcaccggcgccgcccgcggcattggcgcggccatcgcggaaaccctggcgcgcgacggcgcggaagtggtgctgctcgacgtgccgccggccagggaggccctcgaaggcctcgccgcgcgcctcggcggccgtgccgtggctctcgacatctgcgccgcggacgccgggcagcaactggtggacgcgctgcctgagggcgtcgatatcgtcgtgcacaacnnnnnnnnnncgggatcactcgcgacaagaccctggcgaagatga

SEQ ID NO: 325154 - DNA, 1278 bp, Pseudomonas aeruginosa
atgacccagctgcgccgggtcgccattgtcggcggcaaccgtattcccttcgcccgctcgaacaccgtgtacgccacggcgagcaaccaggagatgctcacttccgccctggaaggcctggtggagcgctacaacctgcatggcgagcgtcttggcgaggtggtggccggcgccgtgctgaagcattcgcgcgacttcaacctgacccgcgaatgcgtgctcggttcgcgcctggccccggaaaccccggcctacgatatccagcaggcctgcggtaccggcctggaggcggcgatcctggtggccaacaagatcgccctcgggcagatcgacagcggcatcgccggcggcgtcgacaccacttccgacgcgccgatcggggtcaacgagggtctgcgcaagattctcctcgaggccaaccgtggcaagagcaacctggacaagctcaggagcctattgaagatccgcccgcgccacgtggtcccggccatcccgcgcaacggcgagccgcgcaccgggctgtcgatgggggagtcctgcgaactgatggcgcagacctggcagattccccgcgacgagcaggacaggctggccttcgagagccaccacaagctggccgcggcctatgaggaaggctggcagaacgacctgatgacgccgttccgcggcctgacccgcgaccagaacctgcgcccggatatcgacctggagaagatcggcaccctcaagccggtgttcgagcgcggctcgcgcggcaccctcacggcggccaactcgacgccgctgaccgacggcgcctcggtggtactgctggccagcgaggagtgggcgaaggcgcgcggcctgccgatcctggcctacttcaaggacggcgaggcggcggcggtgaacttcgtcgatcgccaggagggcctgctgatggcgccggtctacgcggtgccgcggctgctggcacgcaacggcctgagcctgcaggacttcgactactacgagatccacgaggccttcgccgcccaggtgctctgcaccctgaaggcctgggaagaccccgagtactgcaagacccgtctcggcctcgaccagccgctgggctccatcgaccgcagcaagctcaacgtcaagggcagctcgctggccgccggccacccgttcgccgccacgggaggacggatcgtcgccaacctggccaagctgctctcggtggcggagcagggacgcgggctgatttccatctgcgccgccggtgggcagggtgtgaccgcgatcatcgagcggtaa

SEQ ID NO: 325155 - DNA, 318 bp, Pseudomonas aeruginosa
gtgctgctggtcggcagtctggccagcggtgagcgcctggagcattggccgagcaccagcggctggctggcgctggtgtacctgatcctgttcggctcgatcatcgccttcagcgcctaccagtacctgctgcgcaacgtacggccggcggcggccaccagctatgcctacgtcaatccggcggtggcggtgttgctcggcaccctgttcgccggcgagcggatcggcggtatcgaggggctggcgatgctggtgatcatcagcgccgtggtgctcatcggcctgccccagtggcgcgccagccgcgccgccgcctga

SEQ ID NO: 325156 - DNA, 960 bp, Pseudomonas aeruginosa
  misc_feature (709)..(718): n is a, c, g, or t
atgaagacacccagacgcctggaaccgttgatcgaagacggtctgatcgacgaggtcgtgcgcccgctgatgagcggcaaggaagcctcggtctatgtggtgcgttgcggcgacagcctgcgttgcgccaaggtctacaaggaggccaacaagcgcagcttccgccaggccgccgagtaccaggagggccgcaaggtccgcaacagccgccaggcgcgggccatggccaagggctcgaagtatggccgccgcgaacaggaggaagcctggcagaatgccgaagtggcggccctgttccgtctcgccggggccggtgtgcgggtgccgaagccctatgatttcctcgatggcgtgttgctgatggaactggtggcggacgccgacggcgatgctgcgccgcgtctcaacgacgtgacgctggagcccgacgaggcacggcgccaccacgctttcctgatccgccagatcgttgccatgctctgcgccggcctggtgcacggcgacctctccgagttcaacgtcctgctcggtccggatggcccggtgatcatcgacttgccgcaggcggtcgacgcggccggcaacaaccatgcgttcagcatgctcgaacgcgacgtcggcaacatggccgcctacttcggccgcttcgccccggaactcaggcagacccgctatgccaaggaaatgtgggcgctctacgaagccggcnnnnnnnnnngacagcggaaaccccgctcagcggcaccttcgtcgaagccgaagaggccgccgacgtgcgcgcggtgctccgcgagatcgaggccgcgcagcgcgaggaggcgcgtcgccaggcgctgcgccaggccgacgacgcgccgcgtggcgagcgcgaggaaccgccgccgccctggttgcagtgagcggctggcggatgttttttcccgccaactgtatcgcgacccttgcgcacgcaactgctag

SEQ ID NO: 325157 - DNA, 894 bp, Pseudomonas aeruginosa
atgcctgttgcacatatcctgctcgccctgctggtgaccctgatctggggtctgaacttcgtcgttatcaaggtcggcctcggcgacttcccgccgctactgttctgcgccctgcgcttcgccctggcggcgctgccgctgctggtcctgcgcgggccgatgccggcgccgttcggacgcatcctgctgatcggcgtgctcctcggagtggtcaagttcggcctgctgttcgtcggcatggcccagggcatgccggccgggctgtcgtcgctggtgctgcagagccaggtattcttcaccatcctcatcgccgccctgtggctgggcgagcggccgtcgccgcgcgggttgttcggcctcctgctggcggcggcggggctggtcctgatcggcctggagcggccgctgggagacagcctgctggcattcctgctggtggtcgccgcggcgctggcctggtccttcgccaacatcgccaccaagcgttccggggccaccgacatgctgcgcctgatctgctgggtcagcctggtcccgcctttgccgctgctggcgctttcctatctattcgaaggtccgcacgccatcgagcgcgcagtgctgaacatgagctggggcggcttcggcgcgctgctctacatcgccttcggcgcgaccacggtgggcttcgccatctggagtttcctcctgcgccactacccggccagcctggtgacgccgttcgccctggcggtgccggtgtcgggcatgctcgccggctggctgctgctcggcgaacgcctcgacctggacagcctgctggcctgcgcgctggtgttcgtcgggctggccatcaccctgttgccggccagcctgctgcgacgcttcgcctggccggtgcggcgggtgggatga

SEQ ID NO: 325158 - DNA, 564 bp, Pseudomonas aeruginosa
  misc_feature (22)..(31): n is a, c, g, or t
atgaaaacggcggaagacatcnnnnnnnnnnccgccgattcctcgcgcctgcatctgctccgcgtgctgcgcgaggtcggcccggagggcgcctggatcggcgccggcttcgtgcgcaacgcggtatgggaccatctgcatggctacggcgaagccacgccgctggcggacatcgacgtacttcatttcgccccgcgggccctcgacccgcaggccgacgccgacttcgaggccgcgttgcgccgtcgctgcgaggcgccctggtcggtgaagaaccaggcgcgcatgcacctgcgcaacggcgaccggccctaccgggattgcgccgatgcgctgtgccactgggcggaaacgtgcacggcggtggcgctgcggctcgtcggcgaacgcctggagctactggcaccgctgggcgtcgacgacctgctggcgctgaaggtgcggcccaccgcgcatttcgccggcaagccggaggtctaccggcggcgcctgcgggagaagaactggacggcgcgctggccactgctggatatcagtggcagcagccagacgccaggtccttga

SEQ ID NO: 325159 - DNA, 834 bp, Pseudomonas aeruginosa
atgtccgccgctcccctggccagcgtaccgctggccgtcaacggcgcgccctgcctgctgcaccgggtacgcttccgctccgccgcggacagcggcggcctgccgctgctggccaccctgcgcgatccgcagccggcgctggcgcttctggcgcagcgcagcgagctgggcggcgacaacgaactgctggtgatcttcgccagcgccggcctgcagaccggacacgcctggcgtcagcgcctggaagcctggatggccgccggcgaggacgagcgccagccacccctggaagcgccctcgttcggcgagcgggtgctgtggcgccccggccgcgcgctgatcatcggcaaccccgaacgctgccaggaactgctcgagggcctggccgtcttcgcctggcacgaaggtcacctgcggcgcctggaagacgacaccgcggcggcctgggagccggcccaggccgatgtcgaactgacccagctaccgcgccgtgccgccctgcggcgccaggaacatgtgaaccggcaggtacgacgcactacactctggcgcatggcctacgcccgcctggagtcgcacctggagaagccgccgctgcaactgaacagcgctgtgcgccggctctacaacgaactggccatgcaggccgaagtgcacgatcgcctggcgaccctggacgaccgcatcgaagtgctgcaggacctctacgaattggccgccgaccgcctcggtgaataccgttacttccggggcgaactgcgggtcgaatggctgatcgtcgccatcctcctgctggaggccggcctgagcctgtgggaattgtggaatcactga

SEQ ID NO: 325160 - DNA, 402 bp, Pseudomonas aeruginosa
  misc_feature (315)..(324): n is a, c, g, or t
atgcgacgtatagccgtagtgggcgccgccgggcgcatgggcaagaacctgatcgaggccgttcagcagaccggcggtgccgccgggctgacggcggcggtggatcgtccggatagcaccctggtgggggcggacgccggcgagctggccggtctcggccggatcggcgtgccgctgtccggggacctgggcaaggtctgcgaggagttcgacgtcctgatcgacttcacccatccctccgtaaccctgaagaacatcgagcagtgccgcaaggcgcgccgcgcgatggtcatcggcaccaccggcttcagcgcnnnnnnnnnnccgacgagaagctgctgctggccgaagcggcgaaggatatcccgatcgtcttcgctgccaacttcagcgtcggcgtga

SEQ ID NO: 325161 - DNA, 231 bp, Pseudomonas aeruginosa
gtggcgcgcctcgaactcggcatccgcgtccagccactggtacggcgtaccgtccgtctcgccgaggcgcaggcggaacgcctcggtgtctcgcgccgcctgcagcagcgcccgttccagggcctgggtatcgacctcgccggtgaagcggtcgtagctgaagatggtgtactggtcgagttccggaaactgcgcggcggcgacccagatgtcccgttggtagggcgatag

SEQ ID NO: 325162 - DNA, 6708 bp, Pseudomonas aeruginosa
gtggacctggccctgctgcatagcgaccaggcgctctacgtctacgtgcgcacccaccatatcgtcagcgacgcctggggcctgcagctattcctcagccgggtgcgcgccggctacctgggcgagctaggcgagccgcaggcgcagatgccgacggcttccctcctggcgcagctcgagaccgacgactactccggttcggaacagtaccgcgacgaccgcgcctatttcgccgaggccctggagggcctggagccggccctcttcacccgcaggcgcccggccgggctgcgccgcaccgcgcgccacaggctgacgctggaacgcacactgctcgatgcgatccgcgatcgtggcgaatcgcccttcctgttcctctccgccgccgtggcgctgtacctggcgcggatccaccagaacgacgacgtggtcctcggcgtaccggtgctgaaccgcgccgaccgcgcggccaagcaagtggtcgggcacttcgccaataccctgccgctacgcatccgcaccgcgccggaacagaccgtcgacgaattcctggcgcagttgcgcgaggcgacccggacgctgctgcgccaccagaagatgcccctcggcgacctgttgcgcggcgcctcgccactgttcgacaccaccctttcctacatgcgctggcccgccgcccaggcgatcccgaacgccagcgtcgagaccgtggcgcagacccacgcccatgacccggacgcgttggccatctgggtctccgagttcgacgggcacagcgacgcgcaggtggatttcgaatacgcctgcgatgtgttcgacgccgacttccccatggacgccgcggcgcggcatatcgaaaccttcctgcgcgccctggtggagggcggcgagcgccgcctcggcgaactcgatccgctgtcggccgccgagcgcgaggaactgatccacacccgcaacgccaccgaccaggcattccccgagcaggctaccctgcccacgctgtttgccgagcaggtggcacgcaccccgcaacgcaccgcgctgctggaagccgacggcggcacgctcagctatgccgagctggacgccaaggtccaggccgtggccgacgccttgcgcgcagcgggtgttagcgccgacgagcgggtagcgctactggtcgcccgcggtccccacctgctgccggcgatcctcggcgtgcagcgcgccggcggcgcctatgtgccgatcaatcccgaccatcccctggagcgcgtccgcctgctgctggaagactgcggcgcccgcgtggtgctggtggacgaacgcgcggcgacactcggcgagagcctcggcgagacgcgcgtgctgcacctcgaacgcctgccgcagagcaccggcgacctgccggcggccaacgtggcgcccagcgacctggcctatatcatctatacctccggttcgaccggcgtgcccaagggcgtgatggtcgaacaccgctcggtggtcaaccgcctgaactggatgcagcgtcgttatccgatcggcgaacgcgacgtgcttctgcaaaagactccggtgacgttcgacgtatccgtctgggaactgttctggtggagcttcaccggcgcccgcctgtcgctgttgccgcccggcgccgagaaggacccgcgggaaatgctgcggagcatccagcgcgacgcggtcacggtcatccacttcgtgccgtcgatgctgacgccgttcctcgacctgctcgacggcgacccgaccgcccgcgcggcggcaagctcgctgcgcctggtgttctgcagcggcgaagccctcgcgccgttgcaggtcgcgcgcttccgccggctgttcggcgacgccgtgcgactggtcaacctgtacggaccgaccgaggccaccgtcgacgtgtccgaccatgagtgcgccagcgacaaccccacgcgggtcccgatcggccggccgatcgacaacctgcgcctgtacgtcctcgaccgcgcgctcaggccgcagcccctcggcgccgtcggcgagctatatataggaggcgtcggcgtcgcccgcggctacctgaaccggccggagttgaacgccgagcgcttcctcgccgaccccttcgtcgccggcggccgtctctaccgtaccggcgacctggcccgctggctggccgacggcaacctcgaatacctcggccgcgccgacgaccaggtgaagatccgcggcaaccgggtcgaacccgacgaagtacgcgaccgcctcgccgcgcttcccggcgtacgcgacgccgcggtcgtggcacgcgattcggcggtacgcggcacgcacctggtcggctactacgtggctgcggcggaactcgacgccggtcaattgcgcgccggactttcggcgacgctgccggacttcatgctgccagccttcttcgtgcgcatcgacagcctcccgctcagcgccaacggcaagctcgaccgccggcaactgccggcaccgccggaacaggtggcggcggttgcgccgcgcacggcgaccgaggccgaactggcggcggtgtgggccgatgtcctcggcgtggcggaggtcggcgtgcacgacgacttctacgccctcggcggcgactcgatcctgatgctgcgcatccgcgccgccgcacagcggcgcggcctgggcttcgaactcgccgacctgatgcgcaacccgacggtggcgggtcttgccgagcgcctggtgcgtccgctcgcggagcgaagctaccagccgttcgaactggtttccgaagtcgacaagccgcgcctggaagggctggaggacgccttcccgaccagccggctgagtctcggcctgctcttccatagccgccagcgccccgactcgtcggtctaccacgacgtgttccactaccgcttcgatctggcctgggacgaagccgcgttccgccacgcgctggaccgggtggtcgccgcctatcccgcgctgcgttcgtcgttcgacctcagcggcgcatccgaaccgctgcaactggtgcatgcccaggcgcgcagcgaaccgctgatcctggacctgcgcggcaacccggaggccgggacggtgctcgacgagcacatccgccaacgccgcttccatcgctattcgctgcaacagcccgggctgttcctgttcgccgcgttcgtccgcgaggacggcctggacctggtgttcagcttccaccatgcgatcctcgacggctggagcgtggccaacctgatcgtcgcgctggtcgccgcctaccgtggcgagccgctgccgagccccgcgccggcgctggcctgccatgtccgcgaggagctggccgcgctggcttcgccggccgccgtggggtactggaccgggctgctggagggcgcgaggatgacccgcctcgacggcttcggcgcccacgagccgcaagccgcgcaaggtccggccagccatcgcgaagcgctgccggacgggctgctcgaacgactcaaggccactgcggcgcaacgcggactgccattgaaatcgctgctgctcgccgcccattgcctgaccctgcatctgttctcccgcagcgacagcgtggtcaccggcgcgatcagcaacggccgccccgaactgcccgacgccgaccgcatggtcggcctgttcctgaataccgtgccggtccgctcggagattgccgggcatagctggatcgaggtagccgatgcgctgttccgccaggagcgcgacggacacgcccatcgccgctatccgctcagcgccatccagcagatcgtcggcgacgaactgagcagcgccttcaactacgtcaacctgcatgtcctcgaaccgctgtggcaattgcgcgacttccgcgtctgggaagaaaccaacttcgccctgctggtcaacgtgatcgccacgcccagcgacggcatgtacctgcgcatcgacagcgacggccgcggcatcagccgcagccaggccgcgctgatcggcgcgaccttcgtcgaactcctgtggcgcctcgccgagcatcccgacgaagccgccgacttcgccttcctcgcccctcgccgcgacgccgcttcccagcccgagccgctggtcgacgtcgtcagcctgttcgaacgccaggtcgaggcgctgccgggcagcgccgcgctggccttcgaggagcaacgctggacctatcgcgacctcgaccatgtggcgcgctgcgtggccacccgcctggtccgcgccggcgcgcgccgcggcgatgcgatcggagtggcgctgaaccgttcgccggagatgatcgcgacgatctggggcatcctgcgcgccggcctggtctgcgtgccgctggacgtcagctatcccgcgcagcgcctggcgctgatcctggagaccgcacagccgttccgggtggtcgcgcatcccgagcacgcccatgtcgccgcggcggaacgggtgctgccggtagaggaactggtcgccgacatcgagcccgagaccttcgccgcgccgcagctcgacgagctggccatgctgctgttcacctccggttccaccgggcggccgaagggcgtcgagcttagccaccggatgtgggccaactacacccagtggcaattgcgcgtcgccagcggcgtaccggggctgcgcaccctgcagttcgcgccgctgagcttcgacatggccttccaggagatcttctccacgctgtgcggcggcggcgagctgcaactcatctccaaccgcgagcggatggacccctccgcgctgctgcatgtcctcgaacgccgccaggtccagcgcgtgctgttgcccttcgtcgccctgcaacgcctcgccgaggcctccaacaccctgggcgtacgccccggcgccctgcgcgtggtggtgtcctccggcgagcagttgcgcatcaccgaagacgtccgcacgttctgcgcggcgatgcccgggctactgctggagaaccagtacggtcccaccgagacgcaccaggtcacctaccactcgctgagcggcgatccggcgcactacccggacctgccgccgatcggccggccgctggacggggtcgaggtgcaggtgctcgacgccgcgctgcgcccggtaccggtcggcgttaccggcgagctgtacttcggcggcgactgcctcgcgcgcggctaccaccgcgcccccgaactcaccgccgagcgcttcgtcgaacatccctggcgccccggcgccaggctctaccgcaccggcgacctcggtcgcatcctcggcaacggcgagatcgtctggctcggccgcgccgatacccaggtcaaggtccgcggcttccgcatcgagccggccgaggtcgagctggcgatcatgcgccaggccgagcgccagccgggcctgcgcggcgcggcggtggtggctcgcgagcgccagggcaacgatgcattcctcgctgccttcctgctcggcgagcccgaggcggtggatctcgccgaactgaagcaggcgctgcgcagcgaactgccggaacacatggtgccggcgcacttcgcctgggtcgacggcttcgccctcactcccagcggcaagcgcgacgacgccgccctgcgcgcgctgccgctggagcacgggtcgaacatcgagtacctggccccgcgcgacgactacgagcgcaccctggccggactcctcggcgagttgctggatcgtccccgggtaggcatccgcgacagcttcttcgacctcggcggcacctcgctcagcgcgatgcgcttcatgctgctgatcgagaagcgctatggcgtcgacctgccgatggccgcgctgatcgagacgccgaccgtggagggcctggccgaacgcctgcgggaacgctcggcggtgcgcgccttcgacccgctggtaccgatccgtgccggcggcagccgcccgcctctgttcctcgtccacccgctcggcggccacgtactctgctacctgccgctggtccgcgcactgccgccggaccagccggtatatgccctgcaggcggccggcaccggccagggcagtacgccgctggcggtcctcgaggacatcgccgccagttacctcgcggcgatccgccgggtgcagccggaaggcccctattacctcggcggctggtcgttcggcggcttcgtcgcctacgagatggcccggcaactgcgcgcgctcgacccgcaggcggtcgcccaactgatcgtgctcgactccatcaccgtcgaccgcaaccacgccggcagcgccagcgacgaagccctgctgctgttcttctactgggaactggtctggttcgagcgcagcgacgaggaagtcgagccgctgcctgaaggcgcgagcctggagcagaaactcgaccacatcgtcgaacgcgccatcgaggccggcgtacttcccgccggcaccccgcgcgccaccgtgcagcggctctacgagctgttccgggcgagctggcaggcactcatcggctatcgcccggaagtcagcgaccaggacatgaccctgctgcgcgcggacggcccgctgccgctggcgctgaagccgatgcacgacgccgccggcacccactacggcgacccgaagaacggctggcagcactggaccagcggccgcctcgatgtgatcgacgtacccggcgaccacctggtgctgatgaaagaaccctatgtcgagacggtcgcggcagagatcgccgcgttgctcgaaccctccacctccagcgaacggacccgcccatga

SEQ ID NO: 325163 - DNA, 708 bp, Pseudomonas aeruginosa
gtgccgctggaagcgcggcgtacccgcctgctgcaccgggagctggacggcgcgcagctggaacagctgcaacgacgcgcccgcgaacacggcaccacggtacacggcgcgctgaccgcggcgctggccatcgccgccggccacgaccaccagcgccgcccgagccacatcgccatcggctcgccgatcgacttccgcgacgaactggagccgccggtgcgccccgacgaagtaggcacctacgtcgccacggtaccggtggtgctggacatcgcccgaccgttctgggaggtcgcccgcgcgctcaccgacgacctcggcgaacgccgtcgccagggccatcatttcaacctggtcaccctggtcgccagcgctgcgccgcgctgcatggccgacgcgcggccattcatggccttcatggaagccgaagggccgatcaacctgtgctcctccaacatcggtcgctatccgttccccgagcggatcggcgccttgcgcctctccgacgcgcagttcctcaccggcatctcggtgaacggctacttcgtggccgccatcaactccagccatggccggctgttctggaacttcacctatatcgacgaagcggtccccggcgaacgcgccgaacgcctggccgaagattgcctgggcaccctgctgtcggcgatccacgccccccaacgatccgccctcgaggagcaatga

SEQ ID NO: 325164 - DNA, 1257 bp, Pseudomonas aeruginosa
gtgcctgatcgcaaactgagactgggcgaggaactgatctcgccactgcacgcgctctacgacggcctgcaggtggacggcgcgccgcgtcccgcgcatcgcgccgccgagcatccggtgtgggtggtgacgcgctaccgcgacgcgcgcaaggtcctcaaccatccgggcgtccgccgcgacgcccggcaggccgccgaactctacgcgaagcgtaccggcagcccgcgcgcggggatcggcgagggactcagccaccacatgctcaacctcgacccgccggaccatacccgcctgcgctcgctggtcggccgcgccttcaccccgcgccaggtggaacgcctgcaaccgcatatagaacggatcaccgaggaattgctggacgccatggccggccgcgaacaggccgacctgatggccgacttcgcgatcccgctgaccatcgcggtgatcttcgagctgctgggcattcccgaggccgagcgcgaacacgcccgccagtcctgggagcgccaggcggaactgctgtcgccggaggaggcccaggccctggccgatgcgcaggtcgactacctgcgcgtgctgctcgaggccaagcgccggcagccggccgacgacgtctacagcgggctggtgcaggccgccgacgagagcggccaactgagcgaggcggaactcgtctccatggcccacctgctgatgatgagcggcttcgagaccaccatgaacatgatcggcaacgcgctggtcaccctgctggtcaacccggagcaactggcgttgctgcgggcgcagccggaactcctgcccaacgccatggaagaactggtccgccacgacagcccggtgcgcgcctcgatgttgcgcttcaccgtggaagacgtagaactggacggggtcaccattcccgccggcgaatacatcctggtctccaacctgaccgccaaccacgacgccgagcgcttcggcgatcccgaccgcctcgacctcacccgcaacaccgatggccatctcggctacggcttcggcgtgcactactgcgtcggcgcctcgctggcccggctggaggggcggatcgccatccagcgcctgctcgcgcgcttccccgacctccagttggcggtgccccacgcggaactgcaatggctgccgatcaccttcctccgagccctgatcagcgtgccggtgcgcaccggatgcagcgccccggcgaacaccgcctcccacgccaacccgatcgagaggatcgcccaatga

SEQ ID NO: 325165 - DNA, 627 bp, Pseudomonas aeruginosa
atggatctcacgatcgggacgcatcgggagtcggctttctacgagctggagttcggaccgaggacgataatgaccctggccaactttccggacgacgtgctgccgttgttgcaaatggaaagcctgatgaccttcgaggcgatggcttacctgcgctgcgacgcactggtcgagctaggctgctacgacggccgggcgctggaaatcgcgcgcctgctcaatgcccgctatctcggcgtcgacctcgaccagcgggcgatcgagacgctgcgcaccaacctgctgggcaacttccgcgagccgaaacggctgctcgactccctcgccgagcgcagcgtggcggcggtggtttcggtgttcggcgacagcgccgaggccacccgcgtccgccagagctactaccgccgttgcggggtgcagggcctggagctgcacgcgcgggacgacggcaccgtgttcaccggcagcgacggcttctactcgcgctcgtattcgcgcgcctgcctccacgccctgctcgccgagtgcgggctgaccgtggtgcgcagcgcttcgaacctgttcgcccactgcgtgacggtgctgcccgaaggcgccgaccagggcttcggttcgtcggcggcatga

SEQ ID NO: 325166 - DNA, 612 bp, Pseudomonas aeruginosa
atgagtccgacgctttcccttcacctgatggtgcgcaacctgccgcccgggcagcggcggccgaagatcgcccaggccatcggcgaggagagcgcgggacgcttgcagcgggtattgctggaacgcgccctgcgcctgcccgatcgcggtttcagtgcccgcatcctctggttcgacgacgatctggacagcgatctgcaggcgctggcggtggcgttgggctggagcctgatgagccagccggccggcgatcccggcgagcgcatgcggcgtatcgcggcgctagggttggcggaaagcgaggcggtactgctgattcggcacgactgcccggtgctggacggcgactacctggaagcggcctgcaccgccctgggccgccaccaggcggtgctggggccggtggagcggggcggctacgcgctgctcggcctgacccgggtcgacccgctgttgttcgaagcgatgccctggggcggagaccgcctgctggcgctgacctgcgagcgtctccggcaactgggctgggagcatcacctgctgccggcgctctgggacgtcgaccgtcccgaggacctgccgcgcctggcggcgctgggagtggtcctgtga

SEQ ID NO: 325167 - DNA, 249 bp, Pseudomonas aeruginosa
atgctcgcggcgattcccagggccagcagcaacgccagcggcatctgttgcaacaatgccagcggcaaggcgaacaggcacagcaggatggcgcaggcgcggatcagccaggcgcggtcgcgacggtcggacagccagccgagcggccactgcaccagcagcccggcgaagatgcaggcgcccatgtacaggccgacctgctcgttgggcaaccccaactggttggcgtacagcggcgccaggccatag

SEQ ID NO: 325168 - DNA, 162 bp, Pseudomonas aeruginosa
atgtacgatgccctgcggcgtctgaaaggcagcgcgctggcgcgcgaactgttcggcagcgagttcgtcgaaggctacgtggcgaccaagagcatggaactgaccagcttcttcgacgagatcagcccctgggagcgtcgtgtcctggcagcccaggcctga

SEQ ID NO: 325169 - DNA, 888 bp, Pseudomonas aeruginosa
gtgcggcgcgaagaagggcgtgaagtccgccaggcaggcctgctggccgccgatgaagtggcggaacgcggcggaaggctcgccatcggcttcgctgaagatgtttcgcccgccgtccagttcgacgatgctctggtggatgtgcatcgagctgcccggcgtcttcgccagcggcttggccatgcacaccacgatcaggccgtgcttgagcgcgacctccttgagcaggtgcttgaacaggaaggtctggtcggccagcaggaccgggtcgccatgcaggaagttgatctcgaactggctggtgcccatctcgtgcatgaaggtgtcgcgcaccaggcccagcgcatccatgcagcggtagacgtcctcgaagaacggccgcaggccgttgttggaagacacgctgaaggccgaatagcccagctcgcgccggccatccggccccagcggggcctggaacggctcgttgggatcggtgttcggggcgaagacgaagaattccagttcggtggccaccaccggttgccagccgtgggcggcgtagcgcgccaccacctgcttgagcaggccgcgggtggacagcccggacggcgagccatccagttcctgcgcatcgcagatggcgaaggcgcgcggagtgttgctccagggcaggcgatggacctgggtcggctcggcgaccagcgccaggtcgccatcgtcgctgccatagaagcgcgccggcgggtagccgcccatgatgcattgcagcagcacgccacgggcgagctgcaggcgccggccgctgaggaagccctcgccggtcataaccttgccgcgcggcaccccgttgaggtcgggggtgacgcattcgatttcttcaactccagccagccgttcggcgagtga

SEQ ID NO: 325170 - DNA, 675 bp, Pseudomonas aeruginosa
atgaaacgacttcgagttgccgtttcctgcgcgctgctggcggcgctggtgggttgttccaatggtcaggtcaagccggaaaactactcgggcttcatcggtgactattcgacgctggcgcctgccaccgcgccttccggagcgccgctcctgcgctgggtagacccgcaggcggacgtgcggcgctaccagcggatctacatcgagcccagcaggttctatccggtcccgaaaccgaacgacaaggtttccgcgaagacgcttgcggacatcacgacctactacgatcaggcattgcgccgtgagctgggcaagagcctgccgctggccagcgcccccggcccgggtatcctggtgctgaaaccggcgatcaccgcagtttccagccatacccagggtctacggccatacgaggtcatccccatcgcgctgatcgctgctgggatgagcacggcggtcgggattcgcgaccaggatacccagatcgccaccgaggccatgctgctcgacggtggggacaacaaggtattggcgaagatggtgcgccagggcaccggcaaggcgctggacgattccgatcagccgatcacgggagacgatgtcaaggcggtgctggacggttgggcggccgacatgcgcatgtcgtacgagaagactctcggttctcgtcgatga

SEQ ID NO: 325171 - DNA, 339 bp, Pseudomonas aeruginosa
atgaaattcggactcttcgcctcgatcgccctcttcctcctgtcggtctgcgcacttccggcgctggctgccaatagcccctgctcgggaaagaaaggcggtatcgccggttgcgacggcgatatcttcctctgcaacgacggctccatcagcgcctcgaagcgcagttgcgcggcctacttcggcaacgccggcggacgtaccggacaacccgccgtacagcgtctgcaaggcacgacgcagggctgtgcctgtggcagcggctcgttctgcacgggcccgcgcggaggggtgtactgcctgacgccgggcggcaagaaaagctatcggagaaagtga

SEQ ID NO: 325172 - DNA, 165 bp, Pseudomonas aeruginosa
atgaagtatttaaccggagaaacagtcgagctaggggacttagtgttgattgagtccggcaaaacgctgggcgtggtatatgcgattatagaaacccctgaagatgcactaagctgggggctgatgaggctggtatttcaattgaggcggaaccatttggattag

SEQ ID NO: 325173 - DNA, 453 bp, Pseudomonas aeruginosa
atgaccaccagtgacggaataacagatagcgactgggaaagcattatcatttctgcagaggagattgccgagttgacaggcagggagatagatgctcgctttgctcaaaaaaagatacttttccagctagatagattggagaaaaaatatggccgccttccaaccatactaagcacaaaagcggactatatcgactctactgacgagcggctatctttactcaaagaggcatatataacggctgacgaaattcaggacaaaaaaaacaaggcatttatcagcagttccatcatagaagtctatctagaattgccagaaaaaaaatcctttgccctgtactggttagagaaattcgagagcgacctgaaagactatcccaaggacgaatatcttctcgatctacacgtgcagttcaataaaaaacttaatcaaccaaaccctagcaatcagtaa

SEQ ID NO: 325174 - DNA, 3606 bp, Pseudomonas aeruginosa
atgcaatggattttcatgctggtgggcctgatcctcggcggcttcgccggggaatcgctggtcggcgccctcctcggcggcctttccggcctggccctgggacaggccgtctcgctgcagaacctggcgcaacagaacgatcgcctgcgcaagcagatgagcgaattcgccgaacgcttcgagcgcggcaccgaggtcatccaccagcgcttgctgcgcgtggagcgccaggcgcaggaccttcccgaaagcgttcccgagccggccgccggcatcgaccagccgctcgcagacacgcctcccgctcctcccgccgaggttgccccgccgctggactgggacatcgagctgccggccgtcgaggctgcgccgcctccgcctcgtccccccgaacccgtccagcccatcgagcgtcagccggcgttccagcctgacgcccagccagcgccgcgccgtgccgcccctccagcgcctccacgcgaaccctcgctggtcgagcgtggcttcgccgcggccaagggctggctgttcggcggcaacacggtattgcgcatcggcgtggtgctgctgttcatcggcctggccttcctcctgcgctatgcctcggaacgggtggcggtgccggtggagtaccgctacgccggggtggcgctggcagcgatggcgctgctcggcgtcggctggtggttgcgcgagcggcgcgccgcctacggcctgatcctgcaaggcaccggtatcgcggtgctgtacctgaccatcttcgccgccatgcgcctgcatccgctgatctctcccggcgcggcgctggccctgctggtggtggtgacgatctgctcggcgatcctcgccgtgctgcagaacgccatgggcctggcggtggtggcggcgctcggcggcttcgccgcgccgatcctgacctccaccggcagcggcaaccatgtagcgctgttcagctacttcgccctgctcaacgccggcatcttcgccatcgcctggttccgcgcctggcggccgctcaacctggtcggcttcgtcggcaccttcggcatcggcttcgcctggggactgcgctcctatacaccggagctgttcgccagcaccgagccgttcctggccctgttcttcctgatgtacgtcgggatcggcctgctcttcgcccgccgcaagctgctggaggccgcgcaggcgcctgccgagcgcggcgaactgctgcgctggtcggcgcgacaggccgactacatcgacgccaccgtgctgttcggcccgccactggtggggttcggcctgcaatgcgcggtgatcggccacatcgacttcggcatggccttcagcgccctggccctgggcctcttctacatggtcctggcgcgggtgctgcgcggccatgcttcggccggacgcaccagcctgctggtggaaatctgcctggcgctgggggtggtcttcggcaccctggccattccgctcggcctggacgcgcgctggacctcggccgcctgggccgtcgagggcgccggcatctactggctcggcctgcaccagcaacgccgcctggcgcggctcttcgccctgctgttgcagggcggtgcggcgttggcctacctgaatggcgtgcgcccgggtgagacgacgttgctggagggttcgccgctgggcgcgctgatgctcggtgcggcggcgctgttcagcttctggcagctgcgtcgcgcgccggcgaaagcgctggccgactgggagccggcctgccggccgttgctggcggccgccggcctggccttcctctacctggtcgcaccgctctgcctggccgtcgacagcaccgccatcgcctgggccgtggccggcctggcgagcttgttcgccggcttgcgcctgggctcgcgtaccttcctgttctgcgccttcgccgtgcaactgctgggcggtgcgctgttcctcctgcatttgcagggcggcgatggccagggtggggtattcgactcgggctggcgtggcttgatgaccgcctcgctgattggcctggcgctgatcggcggcatgctgctggcggcgcgcgacccgctggtgaaggacgacagtcggctgctcatgggcttgagcctggtgctgctggccggtctggcgttcgtcaacctggcagtgctgttcgtcctgccttggcgcagcgccagcgcggtatgggccggtagcgggctgctgatcatctggctgagcctggtgctgcgccagcgcctgagcttctacttcggcctcgccttgcaggtagtgggcggcctggcgttcctcctcgccgggccgtcgctgttcggctcgctgagcggcgaaggcctgcggcccctggcccattccgggttctggacgccggcagtgctggccctggcggcgctggtcggcgcctggcggctgcgccgcgccggcgagcgcgagcgggcgctgggtatcggtaccctcggcctggccgagctgtcgcacttgctgctgctctggggagccggctggtgggcgctgaccgcgctgtgcgaaaccgtccgcttcgtgccttatggcctgcgcgagcatgcgttgctgctggtggccgcggcgacagtggcgtcgtggatgctgctggcgctgcgcgagcgctggcgcgaactggccctgctgtgcctggcgctggtcccggtggcgctgttggccctggccagtgcctggcgtttcgattaccagccgttcggcgaattcggctggctggcctggccgctgctgttcgccacgcacctgctgtcgctgcgacgccttgccccgttgctgccggcgaaggccctgagcgttgcccatgtgctcggttgctggctgttgctaggggtgctggcgctggagctgcgctacctgttcgccctgctcgccgaacagtacaacgcctggcgttggctgggctgggcgttggtcccgagcgcctacctgctgctggtggctggcgggcggagcctgccctggccgctgcgcgacttcccgcgggagtatcggctgctcgccgctgcgccggtggcgctgttgctgctcggctggttctggagcgccaacctgctcagcgacggcgctgccgagccgctgccttacctgccgctggccaacccgctggaactggggctgctgatcgtgctgttcgccctctaccgctggagcgacgccagcctggcctcgctcgtcgatggcaatgccagcgcgcgcctggggcgccaggcgttggccggcgcctcgctgttcgccctgctgaccctggcggtgtgccgcgccgcgcaccacctggccggcgtaccgttccaggccgaggcgctggccgcgtcgatgctggtgcaggcggggctgtcgctggtctggacgctctgtgcgctgggcctgaccatcgccggtacccgtctcggccggcgcgacctgtggatggtcggcgcggcgctggtcggcgtcgtggtggtcaagctgttcttcgtcgagctgggcaacagtggcagcctggagcgaatcatctccttcatcggggtcggcgtcctgttgctggtcgtcggctacttctcacccttgcctccgcgtcgcgccgaggtcgcatcggaggccgagcagccatga

SEQ ID NO: 325175 - DNA, 1401 bp, Pseudomonas aeruginosa
  misc_feature (46)..(55): n is a, c, g, or t
  misc_feature (842)..(851): n is a, c, g, or t
atgacgcgctccttttcgttcagaaccgccggcctgctcctgctgnnnnnnnnnncctgcctgtccctgccgctgtcggcgaaggagtctgccgaaggtttcagccgccaggtggcgctgtcgctgcagggcgaaggtccctggtatcgcctgagcatcccgatgagcgtgcagttgtcggctgcccatgccgacctgcgcgacctgcgggtcttcgatgccgaaggcgaggccttgccctacgccctggtggccggcagcgagcgccaggccagcacgccgcatgaggccgaggtgcggctgttcccgttgcgaggcacgtccgccgccgacgcgacgcaaccgaacctgcgggtgcagcgcaacaccagcggcaccatagtcgaggtgctgccggaaaacgccgggccggctgccgagactttgcgcggctggctgatcgacgcgagcgcggtgacgtttcccctggagcgcctgcggctggactggagcagcccggaggagggcttccagcgcttctccgtggaagccagcgacgacctcgagcattggcaggcctggggtgacggacagatcgcccgcttgaccttcaacggcgaacgcatcgacgtcagcgaggtcaagcttcccggccgccaggcccgctacctgcgtctggcctggccggccggggcaaccgcggcagaccttcatggcgcccgcctgcaaggcagcacgcggagcaccgagccggcgccgatgatctggtccgagccgctggccgggcgccaggcgggggacggcgagtaccgctggcagttgccgctggcgttgccgttgcagcgggtgcgggtgtccctggnnnnnnnnnngacccacaccatcgtcccggtggaactgtccggccgtgatcgtacggagaacgcttcgccgcgccgggaggccgcctggagcagcctggcacgcggggtcctctaccggctgccgatcgacggccgcaacgtacagcagaacgagctggaactgccgggctgggcggtgcgcgagctgcgtctgcaggtggaccaacgaggtaccggcctgggcccggaggtcccgtccctgagtgtcggcctgccggccagcgaactggtgttcctagtgcgcggcagcccgccgtaccggctggcgttcggcaagcccggcgcgcagtcggcggcgctgccgctcggcgtactgattcccggctataccgagagcaagcgcgccaccctgggtagcgccagcctgggcgaaccgctggaggtggccatggcggccgcggcgccggcaccgggtagcgactggaagaagatcggcctgtgggcggtacttctgctgggggtcgctctgctggtaataatggcaatgagcctgctgcgttcctcgccgaacaagccatga

SEQ ID NO: 325176 - DNA, 1941 bp, Pseudomonas aeruginosa
atgatcagaatggcgctcaagccactggtagcggcctgcctgctggcttcgctgtccaccgccccgcaggctgctccttcgccctattcgacgctggtggtgttcggcgacagcctcagcgatgccgggcagttccccgatcctgccggccccgccggaagcacctcgcgtttcaccaaccgggtcggcccgacctaccagaacggcagcggcgagatcttcggaccgaccgcgcccatgctgctcggcaatcagctcggcatcgccccgggcgacctggctgcctcgacctcgccggtcaacgcccagcagggcatcgccgacggcaacaactgggcggtgggcggctaccggaccgatcagatctacgactcgatcaccgcggccaacggctcgctgatcgagcgcgacaataccctcctgcgcagccgcgatggctacctggtggaccgtgcccgccagggcctgggtgccgacccgaacgcgttgtactacatcaccggcggcggcaacgacttcctccaggggcgcatcctcaacgacgtccaggcacaacaggccgccggtcgcctggtggatagcgtgcaggccctgcagcaggccggcgcgcgctacatcgtggtctggctgttgcccgacctgggcctgaccccggctaccttcggtggtcccttgcagcctttcgccagccaactcagcggcacgttcaacgccgagctgaccgcccagttgagccaggccggcgccaacgtcattccgttgaacatcccgctgctgctcaaggaaggcatggccaacccggcttccttcggcctggccgccgaccagaacctgatcggcacctgtttcagcggcaacggctgcaccatgaacccgacctacgggatcaacggcagcacgcccgacccgagcaaattgctgttcaacgacagcgtgcacccgaccatcaccggccagcgcctgatcgccgactacacctactcgctgctgtcggcgccctgggagctgaccctgctgccggaaatggcccacggcaccctgcgtgcctaccaggacgaactgcgcagccagtggcaggcggactgggagaactggccgaacgtcggccagtggcgcggcttcgtcggcggcggtggccagcgcctggacttcgactcccaggacagcgccgccagcggcgacggcaatggctacaacctgacccttggtggcagctaccgcatcgacgaggcctggcgcgccggggtcgccgccggtttctaccggcagaagttggaagccggcgccaaggattccgactaccggatgaacagctacatggccagcgccttcgtgcagtaccaggaaaaccgctggtgggctgacgcggcgctgaccggcggctacctcgactacgacgacctgaagcgcaagttcgccctgggcggcggcgagcgcagcgagaaaggcgacaccaacggccatctgtgggcgttcagcgcgcgcctgggctacgacatcgcccagcaggccgacagtccctggcacctgtcgccgttcgtcagcgccgactacgcgcgggtcgaggtcgacggctattccgagaagggcgccagcgccaccgcgctcgactacgatgaccagaagcgcagctcgaagcgcctgggcgccggcctgcaaggcaagtacgcgttcggcagcgatacccagctgttcgccgagtacgcccacgaacgcgagtacgaggacgacacccaggacctgaccatgtccctcaacagcctgccgggcaatcgcttcaccctcgaaggctacaccccgcaggaccacctcaaccgcgtctccctcggcttcagccagaagctggcgccggagctgtcgctgcgcggcggctacaactggcgcaagggcgaggacgatacccagcagagcgtcagcctggcgctgagcctggacttctga

SEQ ID NO: 325177 - DNA, 531 bp, Pseudomonas aeruginosa
atgagtttcaacaccgaagtacagcccggcatctgcatggagccggacgccatcacccaggaatacgtgttcaaccacaccatgttgcgggtcaaggatccgaagcgctcgctcgacttctactcgcgggtgctcggcatgcgcctgctgcgtcgcctggatttcgaggaaggacggttctccctgtatttcctcgccatgacccgtggcgaagaggtgcccgacgcgctcgacgaacgccagcgctacaccttcggacgccagtcggtcctcgagctgacccacaactggggcagcgagagcgacgacagccagtaccacaacggcaaccaggacccgcgcgggttcggccacatctgcttctcggtgcccgacctggtggcggcctgcgagcgtttcgagacgctcggggtgaacttcgtcaagccgctggaccgaggcatgaagaacgtggcgttcatcagcgatcccgacggctactgggtggaaatcgtccaggccagcctgaacggcgagatgggacgcggctga

SEQ ID NO: 325178 - DNA, 1011 bp, Pseudomonas aeruginosa
atgtcccgcgttaccctgagccgctatctgatcgagcagacccgcagccacaacaccccggccgacctgcgcttcctcatcgaggtcgtggcgcgtgcctgcaaggaaatcagccatgcggtgtccaagggcgcgctgggcggcgtactcggcagcatgggcaccgagaacgtgcagggcgaggtgcagaagaagctggacgtgatgtccaacgagatcctgctggaagccaacgaatgggccggcaacctggccggcatggcctccgaggagatggaccacccctaccagattccggggcgctacccgaaaggcgcctacctgctggtcttcgacccgctggacggctccagcaacatcgacgtcaacgtctcggtcggcaccatcttctcggtgctgcgctgccccagcgagtacctgaaccagaacgataccctgcgcgaggaggccttcctccagccgggcaccacccaggtcgccgccggctacgccatctacggcccgcagaccatgctgatgctgaccctcggcaacggcgtcaagggcttcaccctggaccgcgagctgggcagcttcgtcctcacccacgacaacatcagcgtgccggaaagcaccgccgagttcgccatcaacatgtccaaccagcgccactgggaagcgccggtgaaacgctacgtggaagaactgctggccggcaaggaaggtccgctgggcaagaactacaacatgcgctggatcgcctcgatggtcgccgacgtccaccgcatcctgacccgcggcggcgtcttcatgtacccgcgcgacgcccgcgagccggagaagcccggcaagctgcgcctgatgtacgaagccaacccgatgtcgttcatcatcgagcaggccggcggcgccgccaccaacggcacccagcgcatcctcgacatcaagccggagaacctgcaccagcgtgtcgcggtgttcctcggctcgaagcaggaagtcgagcgcatcaccggctaccacgcggagtag

SEQ ID NO: 325179 - DNA, 879 bp, Pseudomonas aeruginosa
atgcggctgatggctattggactttgggtcgtgctctgtcttgcaggcgtccgcgtgatggccaacagcaaatcgtttgtctgcgttaatgaaaaagaccatctgccgccgttggattcgcaaaccgatgcttggtaccgcgaagcagccgccttggccaagcccgatactctgcggccctggggccgtatcgtcgagctttacagtaaggcagtggagcgcggccattggaaggccatgcataatttggcgaatctttatcgtacagggtggcccggaggagtagaaaaagatacgcagaaggcattggatctctatcaaaagatgatagatctggatgtgcctcaggggttctatgatatgggagcaatgattggaaatcgcgccggggttaaaaaccctgcaactgacggacttactttccttgataaggctgctagcctaggaaatccgccggcactaactgaactaggtaagctttatatatatgtggccaaaaaaaaggatttggggttggcgtatactcactgtgctgctagtcagggttatgcgccggctagttatgagctgggggcgtattacaagatagtagaacacaatttcccaaaggcactggtttattatcaggtgtcagtctctcaggggggcaagagtgcggcttttttcctatcacgagtcttcggaagtgagactccccctgcaagtgcaatgtggtacgcccccgacgaaaagttgcgagaagcgtattattcaatctacaaaaagcttgaagctgaccccgacttacgtttccccaatctgatagaggactatcctctgcctcctcatcccacccagggctacgacgcggaccgcccagactggaagccggagcggtaa

SEQ ID NO: 325180 - DNA, 813 bp, Pseudomonas aeruginosa
atgctcctcggcctgctggcgacccgccgctacggtttcgtctgggaaaccaccattctcggcagcgataccttcatcgccctcacccaggcgctcggcgccctgccggcgttgcttggcttcccgttgccggacgccgagctgatccgcgccagcggcgacgccgccctggccagcgaagccgcacggcacgcctgggccggctggctggtaggcgtactgctggtctatggggtcctgccgcgcgcgctgctcggtctgttctgcctgtggcgctggaaacgcggcctggccgacctcgacctggacctcgacgacccaggctacagcctgctgcgcgaacgcttgatgccggccagcgaacgcctcggcgtcagcgacgcggcgccggactggctaccggagccgcagggcggccagtccggccaggaagccgccggagcggtgctggtggcggtggagctggacgatcgccggccctggccgccgaagctcgccgaaggcgtcgccgacgccggcatcctcgacgacggccagcagcgccgtcgcctgctcgatcaactgacccgctacccgccggcgcgcctggccatcgcctgcgacccgcgtcgctcgccggaccgcggcaccctggcactgctcggcgaactcgcccgctgcgccgccagcactcgcatctggctgctccaggctccgcccggcgaagcgctcgacagcgaccgcctgggcgactggcacaccgccctggagcgcctgcaactgccgcacggcgagacctcgccgctggcctggctggagaccggccatgactga

SEQ ID NO: 325181 - DNA, 795 bp, Pseudomonas aeruginosa
atgaaacagtacctcgacctgatgcgccacgtgcgcgagcacggcaccttcaagagcgaccgcaccggcaccggcacctatagcgtgttcggccaccagatgcgcttcgacctggccgcgggcttccccctggtgaccaccaagaagtgccatctcaagtcgatcgtccacgagctgctgtggttcctcaagggctccaccaatatcgcctacctcaaggagcacggcgtctcgatctgggacgagtgggccgacgagaacggcgacctcggcccggtgtatggctaccagtggcgctcctggccggcgccggacggccgccacatcgaccagatcgccaacctgatggcgatgctgaagaagaatccggactcgcgccggctgatcgtctccgcctggaacccggcgctgatcgacgagatggccctgccgccctgccacgcgctgttccagttctacgtcgccgacggcaagctcagctgccagctctaccagcgttcggcggacatcttcctcggcgtacccttcaacatcgccagctacgctttgctgaccctgatggtggcgcaggtcgccggcctgcagccgggcgagttcatctggaccggcggcgattgccacctgtacgccaaccacctggagcaggccgacctgcagttgacccgcgagccgctgccgttgccgagcatgaagctgaatcccgaggtgaaggatctgttcgacttccgcttcgaggacttcgagctggtcggctacgaggcccatccgcacatcaaggcaccggtcgcggtctga

SEQ ID NO: 325182 - DNA, 1272 bp, Pseudomonas aeruginosa
atgcgtattctgctggtaggcgcgggaggtttcgtcgggcggcacctgctcccggcgctgctcgccgccggacacgaactgctcctcaccgcgcgccgcccgccggtcgatgcgcctgccggcgtacgctggctggcgctcgacctggagcggcttgcggaaaggccggacagcttcgcctggcccgccggggtcgacctgctgatcaacgccgccggcaccatgagcctcgacgaggcgagcatggctcgcgtccaggacagcggcgcgcgagcactcttcgacctcgctgcggcccatggggcgaaggtcctgcagatttccgcgctgggcgccggtgcgcacccggacgtgaccttcctcgccagcaaggcggcggccgaccgccacctgctggaactgggcatcccggcgctggtgctgcgcccgtccctgctgctggggccgggcggcgccagcagcgcctggctggaacgcctgtcgccgctaccgctgattcccttgctggacaatcgcgcgcgcctgcaaccgctgcatgtcgaggacctggtcggcgcggtgctggccttgctgcgctgctggccggagcgggcgcaggtgattccgctggtgggtccgcaggcgctgacccagggcgagctgctggacgagctgcgccgcgcccagggttggccgcgcggccgctatgtggtgccgcccgcggcgcttctcgatgcgttgggcgggcttggccggcgtgctggctggcggacactgagtccatcgatgctgaagctggtgcgccacgacaacctggccgacccggcactcctcgatgcggcctgcggctatcgttgcgcgccgctggccagtcggctgctcggctggccgcaggcggcacgcagcctggcggctctgatgcggccgctgatgctggcggccctggtgctgatctggctgggtaccctggtcgcctgcctggggccgggttacggctggggcctgcggatcctcggcgaggccggcatccacggctggccggcgagcctggcggtgatcgccggggccctgctcgacggcgcgctcggcgtcggcctgctgctccgccgctggcgtcggcgcgcgctgctggcgcagttctggctgatgcttggctacagcctggcgatcagcctgatcctgccgcactactggtacgacccctacatggcggtcggcaagaacatcgtgctgatggtggccacgctctggctgctgggcgacgaacctcgagccaaggaggcccgtggatga

SEQ ID NO: 325183 - DNA, 942 bp, Pseudomonas aeruginosa
atgtcagaagccttcaaccccgattacctgcgccagcacctgcgacccttggccgcggccgaggcggacgccgccgtcctcgcctaccaggcctactacggcctggacctgcgctcccgccatccgcgcctgcaagcgcggctcggcagcatggcggtcgacgggcgccgcctggcggtgcaggcctggctgctgccggaggcgcgcggcagcctgttgctgatgcatggctattacgaccacatgggactgtatcggcacgtggtcgactgggcgctgggcatgggcttctcggtgctcgcctgcgacctgccggggcatggcctgtccgaaggcgagcgggccagcatccgcgacttcgccgaataccaggcggtgttcaagggcctgctgggccaggctgccgaactcgacctggcggcgccctggcacctctgcggacaaagcaccggtggggcgatcctgctggactacctgctgcacggcggcgaacgtcccgagctgggcgagacgattctcctggcgccgctggtgcgcccgcgcgcctggggctggtcgaagctcagctaccgcctgctgagccccttcgtcgactcgatcccgcggcgcttctcggagaactccagcgatccgcagttcctcgacttcctccgcgagcacgatccgttgcagccacgcaccctgccgaccgcctgggtcggcgcgctgacccgctgggtgccgcgcatcgagcgggcgcctcggcgtgccctgagccccctggtggtgcagggcgagtccgacgagacggtggactggcgccatggccttaaggtgctgcgggagaaattcgacgagccgcggatactgttgctggaagaggcgcgccatcacctggcgaacgaaagcgaggggctgcggcggcgctatttcgatttcctgagcgacgcgctgggggcctga

SEQ ID NO: 325184 - DNA, 1026 bp, Pseudomonas aeruginosa
  misc_feature (964)..(973): n is a, c, g, or t
atgaaacgcaccctgaccgtgatcgccgtggcggtcgccgccgcggctgccggcggcgcctggtacctccatgccaagcagccgctccgcaacggctcgctcgccctggcccacctgcaggcgccggtcgacgtgcgctacgacgagcgcggggttccgcacctgtatgcgcagaaccagaccgacctctaccgcgccctcggctacgtgcacgcccaggaccgcctgttccagatggaaatgctgcggcgcctggcgcgcggcgagctggccgaagtgctcggacccaagctggtggataccgaccgtctgttccgcaccctgcgcatccgcgaccacgccgccgaatacagcgcccgccaggacaagcagtcgcagccctggaaggtgctggaggcctacctggacggggtcaaccagttccaggaaaacaacccggcgccgctcgaattcgacctgctgggcatacccaggcgtcccttcacccccgaagacaccctgagcatcgccggctacatggcctacagcttcgccgccgccttccgcaccgagccggtgctgacctacatccgcgacgaactgggcagcgactacctgcgcatcttcgatctcgactggcatccgcagggcgtgctgacgccctccggcgcactgggcgccggcgactggaaggaccttggcgccctcgcccgtctcagccagcaggccctggaggacgccggcctgccgcagttcgagggcagcaacgcctgggtcgtcgccggcagccgcaccgccagcggcaagcccctgctggccggcgacccgcatatccgcttcgccgcgccggcggtatggtacgaggcccagctgagcgcgcccggtttcgaactctatggccaccaccaggcgctcaaccccttcgcctcgctgggccacaaccgcgcgctcagctgggcctcgtaccataccgccggcgcggcgnnnnnnnnnngctcaaccccttcgcctcgctgggccacaaccgcgcgttcggctggagcctga

SEQ ID NO: 325185 - DNA, 870 bp, Pseudomonas aeruginosa
atgaagcgctggaatttctccaacgtcatgctgatcgtcggcctgctcttcatctacctgccgatgctgatcctggtgatctattcgttcaacgcctccaagctggtgacggtgtggggcggctggtcggtgaagtggtacgtcggcctgctggacaacacccaactggtcagttcggtcggccgctccctggagatcgccttctatacggcgttctcctcggtgctcctcggcaccctggcggccttcgtcctcacccgcatcccgcgcttccgcggtcgtacgctgttcggcggcatggtcaccgcgccgctggtgatgccggaagtgatcaccggcctgtcgctgctgctgttgttcgtggccatggcgcaactgatcggctggccgcaggaacggggtatcgtgaccatctggatcgcccacaccagcttctgctcgtcctacgtggcggtggtggtgtcggcgcgcctgcgtgaactcgacctgtcgatcgaggaagcggcgatggacctgggcgccaagccctggaaggtgttcctgctgatcaccatcccgatgatcgcgccctcgctggcggcgggcggcatgatgtccttcgccctgtcgctggacgacctggtactggccagcttcgtctccggacccggctcgaccaccttgccgatggaagtgttctcggcggtacgcctgggcgtgaagccggagatcaacgcggtggccagcctgatcctgctgagcgtttcgctgttcaccttcttcgcctggtacttcacccgccaggccgaggagcggcgtcgccgggcgatccagcaggcgatggaagagaccgcgaccgactggcagaaaggctcgccgaccccggcctga

SEQ ID NO: 325186 - DNA, 1098 bp, Pseudomonas aeruginosa
atgcaacattccattggcaagacactgctggtagccgctctggctacggcgatcgcgggccccgtgcaggcggagaagaagagcctgcacatctataactggaccgattacatcgctcccaccaccctcaaggacttcaccaaggagagcgggatcgacgtcagctacgacgtcttcgactccaacgagaccctcgagggcaagctggtctccggccactccggctatgacatcgtggtgccgtcgaacaacttcctcggcaagcagatccaggccggtgccttccagaagctggacaagagcaagctgccgaactggaagaacctcgatccggcgctgctcaagcaactggaggtcagcgacccgggcaaccagtacgcggttccctacctgtggggcaccaacggcatcggttacaacgtggccaaggtcaaggaagtcctcggcgaccagccgatcgactcctgggccatcctcttcgagccggagaacatgaagaagctcgccaagtgcggcgtagccttcatggacagcggcgacgagatgctgcccgccgccctcaactacctggggctggaccccaacacccacgacccgaaggactacaagaaggccgaggaagtcctgaccaaggttcgcccctacgtcagctacttccactcctccaagtacatctccgacctggccaacggcaacatctgcgtcgccttcggctattccggggacgtcttccaggccgctgcccgcgccgaagaggccggcaagggcatcgacatccagtacgtgattcccaaggaaggcgccaacctgtggttcgacctgatggcgattcccgccgatgccaaggccgccgataacgcctatgcgttcatcgactacctgctgcgtccggaggtgatcgccaaggtcagcgactacgtcggctacgccaacgcgataccgggggcccgcccgctgatggacaagagcgtcagcgacagcgaggaggtgtatccgccgcaggccgtgctcgacaagctctacgtttccgccgtgttgccggccaaggtgctgcgcctgcagacccgtacctggacccggatcaagaccggcaaataa

SEQ ID NO: 325187 - DNA, 171 bp, Pseudomonas aeruginosa
atgagcaaactccagcacatcggcctgttcttcttcgtcctcctttccgccggtctggccctcggctaccagctcgactgtgcggacggcagtcacatcgagacctatctgttgcgcggcctgggcgcccgcctgctgggcatcgacctgtgcctgccgcccagccactga

SEQ ID NO: 325188 - DNA, 225 bp, Pseudomonas aeruginosa
atgcgcgacgaagacgacatccacgagcccgagcacgaccacctgctggacaacgaatacctggaggacgagttcgacgcggcgtccgccgaagactacgccgatggcggcgaggagagcgaagccgggccggcctggcaaccctgcgcttgctgcgaggacgtgctggtggcgagggacgcggacgggcactacgtttgcgcggagtgcgcggcgctcgactga

SEQ ID NO: 325189 - DNA, 834 bp, Pseudomonas aeruginosa
atgccacgaaccagaacaacaataatcgccgccaccctgctgctggccagctccctgctccacgcccaggagcagatgcccgccgcaacgccagcctcgaacctgctcaccgccgcagtcgcctggcggcaggccgccgccgaataccgcgccctctactaccagggcttcaacgttgcccgcgatcgactggaccgggcgctggccgcgcgccagcccggggcgaggaaaccggcgatcgtcagcgacctcgacgatacactgctcggcagcaacagctactggagcttcctgctcagccaggacaaggagttcttcgacgacgccgtctgggaccgttgggtcgcagccaacggcccgagcctgacccccggcgccctggagttcctcgaatacgccaggtcccgaggcgtggagattttctacgtgtccagccgcgaccagggcgaaaagaccctggagtatgccctgggcaacatgcgcgccctgcgcatgccgttcgccgacgcagagcatgtgaccatcctgcgcgacagctcgaataaagagccggcgcagaaggccatcgccgcgcagtacgacgtgttgctgatgctcggcgacaacctgaacgacttccagcgccgctactacgtcgacgacgtgatgcagcgcaaccggctgctcgacgaggaccacaaggcattcggcgagaagtacgtgatcttccccaatcccaccgacggccattggatgaaagccatcttcggtgaatcggaacccgccgacacgccgaccaaccgcgcccgcttccgcgctgcggcgagccagggcgcctggatgggcggcgactga

SEQ ID NO: 325190 - DNA, 483 bp, Pseudomonas aeruginosa
atgactgcctccccttccccggtttccgccacgccttggctgaccctgagcattcgcctgatggccggcggcttcctgctgttcttcggcctggccctggccacgctgctcctgcggctcgaccagtcgctgctcgactccgacgccgggcgcctgctgctccgcctggttcgctggggcgaccagcaaggcggcggacagcactatgagctaatgatctcgacgatctacctggtctggggcgcattcctctggcgcgccgccagccagcccttccgccaccggctgttcatcgacttcaccgtggcggccaatgccgcgcacttcggcctgatgctcctgcagggactgttgatgcccggcgaacacatccacctggccggcgatgtcctgctgggctgggcctcgctggtgccgctgatgctgttctggataccgcaacgcaagcgggcagccccttcgctcgccgtcgagcggaggtga

SEQ ID NO: 325191 - DNA, 489 bp, Pseudomonas aeruginosa
atgatcttccgcaccctcgccctgttgccgctctgcgccgccctggcgttcgccgccgacgccggggagcgccgcttcgactgcacggtggtggcgatacacgacgacgccagcctgggctgccgcctgcccggcgcgaacaaggcactgcgcatccagccgaagccgaagttgctgcggtcgccgttgacctcgccgatgctcggcaaatcggcgaccatccgcgagcaaggccgcgacgcgcacttccgcatcctcggcgcggcctgggtgaccccggccgactgccccacctgcggacataccctggatgccgggctggccctgctgaccattggcctggccagttggcgcgacgcgccggacagcggccagacggccgaggcgcgcggccagtaccggttcgccgaggaagaagcacgggcgcgcaaggctggccagtggggaccgcgcgacgccgctcctacagatggatctccgcgaacttga

SEQ ID NO: 325192 - DNA, 714 bp, Pseudomonas aeruginosa
atgctttcccgtttgtttgtaggccttttcgccctcgctggcgcgggtgcgcggctaaaggccgggatgaccttcaccatcgaagcgaagaaaatcggctggaagctctacgcccggcaatccgtggagttctactgcggctgtcgctactcgggaaatcgtgtcgacctcgccagttgcggctacaagccgaggaagaacgccaaccgcgcgcggcgcatcgagtgggaacacatcgttccggcctgggtgatcggtcaccagcgacgctgctggcagaacggcgggcggagcaactgcgcgaggcacgacagcacctaccagcgcgccgaggccgacctgcacaacctggtgccgagcatcggcgaggtcaacggcgaccgcagcaacttcggcttcggctggctgccgcagaaaccccagcaatacggcgcctgcccgatggtggtggacttcaaggcgcgcaaggcgatgccacgcccgcagattcgcgggatgatcgcccgcacctacttctacatgagcgaccgctacggtctgcgcctgtcgaagcaggatcgccagctctacaacgcctggcacaagcagtacccgccacagacctgggagcgccagcgcaaccacatggtcggctgcgtgatgggctggggcaatccctatgtcggcccggtggacctggcaacctgcagcaacctatcctcgcgtcgacgctga

SEQ ID NO: 325193 - DNA, 1644 bp, Pseudomonas aeruginosa
atggataatctgaaaacacgaatcgtcaattcatacaatgacctgtcagcggacgctgactcattttcggagtcgagcggaaagtcgcgaactgtggtggagccagtgctcaggctgttgcgcaaggcgttactcttggatatttccggtggcgaaaagcgagttcctgatgctgatgaaatcaaagactgggtgctgaaactattcgcgaaaaatcccaccgttggtgacatggtgcgagcccttctattgattaaggaggatctagttgttagcgagcaccaactgccttctatcgaagaggcactgcgcgaaatcggcctattggagcagctccacttgccagacttcttcttcgtttcctcggagttggagggagagccttgtggtgtactgttcgaacgttatgaatcggacggtgaagtcctcgtgtttctggccactctcttcgataagaagaacctaatgcaaaaggttggcaggatggcgattcgtgtcagcaaagagtctcctgagcctttcttgtccatctgtaccccggacggctggcttagggtgccaaaaaatcagatcgtgccgggttcagtcagttccttcacggtccaatgcctgcttgaatataagtattacatttatcccactctgcccttgagctccattattgctcccgaattgactaggagaaaggataacattcatttagtaagcctgataaaagaggcttatctggacaaagtagtttgcacacgagtccgcgttcccctagacgtcgtgcaaccacgagacatcgactatgcactgcatacgccggatgagcagatacgagattgtatgccttatgcggcacatactgagttcctgctatacgaagaggatggagtgcttatcatggatgatgactataccccgtatttagcctgccaagcgctcagggtcaaggaagtcacagcggtcatcttgggtaagtttaaccagtcgcgggccaaagttctttccattgggtacagcgagcttatgtctcccatctccgtttcacccagtgcacaccagtcgcagaagcgccttagagacaagcaagagcttcttaagaaaaaattacaatccctgaggccttccttcctcccggcggcaaaaatggagaggagtttcattgagttgtgctggttactgaacagggttaaaactcgggaaagagatctacacagattcctgaaggaaaattaccagatactggactctcacctggcggcaatcttcagcgaagtacccataggcaagtatcgggcagacctagttctgcagtatcaccagtctgacaagcgtgtggtgctggtcgaacttgagccacacgataagaaaatttttaccaaaaaaaatcgccttaggcaccaggtgactcatgctctacagcaggtagaagattggatacaggaaatacatagaggcgtacccaatataccaggctggcttcagggaagttacactgcagaaggcatgatagttattggacgctcgaaagacctgacagaagagcagagggaaactctcgcgctgaagaatgccaaatccagcatcaagatactgacctacgatgatttgctggagcgcctgtctcggcttataaaaacgcttgacaaggaatag

SEQ ID NO: 325194 - DNA, 996 bp, Pseudomonas aeruginosa
atgagaaaataccagccaccgttgacgttaacgccacgcatgttggcgctggctgccgagattggggagcgtgttgggcatttgtccgctctgcatgaaggggcgctgacgccgcaactgcgtcggggtaaccgcatccgtactatccaggcgtcactcgctattgagaacaacacgttaagcgtcgagcaggtcactgctgtgttggatggcaagcgtgtgcttggtttgccgcgtgaaattcaggaagtgcgcaatgccttttcagcctacgaggtgatgcccgagtggcaaccgagtttgcgtgatgatttactggcagcccacgcgctgctgatgcacgggctgatcgatgatgccggtagctatcggcgcgggggtgtaggcatctatcgaggagaacgtttgctgcacatggcaccaccggccaaccgggttccgcagttgatggacgatttgctggcatggctgagccgctgcgagctgcatccactgatcgccagttgcgtgttccattacgagttcgagttcatccaccccttcgcagatggcaatgggcgaatggggcgcctatggcaaaccttgatactcagccaatggcgagcggttcttgcgtatttgcccgtcgagagtgtgattcgcgagcagcaggatgcttattacgaggcattggctgtttctgacaaggcagcagaggcggcgccttttgtcgaattcatgctggctgccctgcgtcaggcattgcttgaaggtgtttcaggcgatcaagtaagcgatcaagtaagcgatcaagtagcacgcctgctgcaagcgttaccgccaggtgaggccctcaaagccagcgaattgatgcagcgcttagggctggcgcaccgtccgacctttagcaacaactacctcaagcctgccctggttgccggcttgatcgagatgaccgaccccgcgtcgccgcgcagtccggcacagaagtaccggcgaactgggttttccaagtaa

SEQ ID NO: 325195 - DNA, 5043 bp, Pseudomonas aeruginosa
atgatggtcggtgcccttcggcctgacttaggggcagagttggagctgaaggtctctggagacccgtccccagctttgcagcagctggatgcactgtccgacggggcgagtttcgtgctcggccacaatgtcatcgaccacgatctgcctatcttgcgcgaacattttcccggcatggctttgcatgctctgccggtcatcgacaccctgcgtctgtcgccactggcgtttccacaaaacccgtatcaccggctgatcaaggattacaagcttatccgtgacagcctcaactcgccgttgtccgactgccgctcgacgttggttctttttctggatcaacgccaggccttcacgcagttgaacgagaccaaccagacggagcttctctgctatcaggcgttgctggcgccgagtatgcggggagatctgggggctttcttcgcatccctgactgggcagtctccggtgtctgtacccgagctccgagcgcggtttccacaattgctgcaagagacggatccagcccttcagcgtgacttgaaggtatgccgagcacggcttgagcaactacttgaggaggatttacagcgggaggatctgcattggccgttggcctacgcactggcctggctccgtgtatctggcggcaactcggtactggcgccctgggtgcgacatcagtttccagaggttgggcggctaatctccgagctgcgtgatatgccgtgtgagcgcgaggattgtcagtactgtcagacgactcatgacccacgccacgagctgaagcgctatttcggcttccccgattttcgttacgagggtcctggagagagtctccagcacgatatagtgctggccggcatgcgtggtcaacacgtcctggccatcctggcgaccggcgggggcaagtcgctgtgctatcagttgccggcgctgaaccggtttcatcgtaacggcagccttaccgtcatcgtctcgccgctgcagtcgctgatgaaggatcaggtcgacgggctgctggaacgtaacgtccagtgcgccgcagcgctgaatggcctgttgacgatgccggagcgcgccgaggtactggagaaaatccagatgggcgatgtcggcattttgctggtatcgcccgagcagttccgcaacaaggctttccggcgagcgatccgccagcgtcaggtcggtgcctggattttcgatgaggcgcattgcctgtcgaaatggggtagcgactttcggccagactacctgtatgtctcccgcttcatccgggtgtacaccggtgatcaaccgctggcgcagattggttgttttaccgcgacggccaagcctgatgtgctcgcagatatccagagccatttcagggaaagcctgggcattgagttcaaggtgttccccggagggcacgagcgaaccaatctgcattttgatgtgctgccctgcaccaaggcagagaagtggtcgcgtacggatggattattgcgagagcacctggacgctcaggagggcggtgcagtcgtcttcgtttccagtcgcaagagtgctgaggagctgtccgatttcctgattggccaaggatggccttgcaagcactttcatgccggtcttgagcccaacaccaaaacggatattcaggacgacttcaaggctgggcaactgagaatcatcgtagctaccaacgccttcggaatgggcgtggacaaggctgatatccgtctcgtcgtgcatgccgacataccaggttcgctggagaactacctgcaggaggcgggcagggctgggcgtgatcagggcgatgcgcgctgtgtgctgttgtacgacccgcaggacatcgaaacccagttcggcatgagcgagcgctcgaagctcagcatccgcgacatccagcagatcctgcgcaagttgcgtaacgagagcaatcggcgtaagggcggcaagctggtcatcacggcgggtgaaatcctgctggacgatgatgttgaaaccagcttctccgcggatgagcgtgatgccgaaaccaaggtcgttacggcggttgcctggctggagcgtggtgattacctcaaacgtgaggaaaaccatacgcagattttcccggcacggctggatgtgagcgaggaagaggccgagaagcgcttgctgaaggccgagttgccgcaacgtcgattggaggagttcaaggctattctgcgctttctctacggcgccgatgttgatgaacgggtgaataccgaccagttgatgcagttgaccagtctggagtcggaagaggttgccagcgcactcaagcaattggaggagatggggctgctggtcaacgactcgcagataacgctgtatgtgcgccatggtgtgacgggggcttccagtcaacgcctttccagctccctggagctggaaagggctttgttgcaatgcctgccagagcaggcaccggacgccgagcatggcgattggcaggatttgaatctgccggcattgaccgctgaacttaagtccgcgacagggttggatgaactgctcccgctgcatgtgctgcggctgttgcgcagcctggcccaagatcatgatgccgatgatcagcagcgcagtagccttgagctcaggcaactcaatcgtgactacctcaaactgcgtatcaagggtggtcactcctgggcgaagattgttggctttggtgacgtgcggcgtgcattggctagcaagttcctggaactgttggtcggtaagctaccggcaggattgcgtggcgcggatctgctggtcgaaacgagttttggcgaattgctccaggtgatcgaaggtgacctcgaactgccgcatctgattccgccgaacaggcgccgtaaggtgattgagcatgtcctgctttatttgcatcggcaggacattttgaccctcaaccacggcatgacggtcatgcgtcgggccatgaccatcgaggtcaagaaggaagacaagcgtaagaccttcctcaaggaggactacttgcgactcgacgagcactaccgcgagaagcgcattcaggttcatgtgatgcgtgaatatgcggaagtggcgctgaaggagatggctgaggcgttgcgcctggtgctggactacttcaccgactccaagcaggcgtttatcaagcggcattttaatgggcgggaggacgtgctcaagctggcgaccagcgaggagtcatggaaatcgattatcgagtcgctgagcactactcagaaactgatagtcgccgacgatgacgacataaatcggctggtgctggctgggccgggctccggcaagacacgtgtgatcgtgcatcgcatcgcttacctgctgcgggtgcggcgagtaccagcgaccagcatcgtggcgttgaccttcaaccgccacgcggcgaacgagatccgcaagcggctgttggccttggtcggggccgatgcctacggtgtcagcgtcctgacctatcacagcatggccatgcgcttgaccggcacccgtttcgagcgaggcgcgacggtcgacgagcgagccctcaaacaagtattgagcgatgccgtcgagttgctggagggtaagcgcaatattgagggcgaggacgacctgcgcgagcagctactgcgcggctaccgttacatcttggttgatgaataccaggacatcgacgacctgcaataccgtctggtcagtgctctggctgggcggcacgcggaggaagatggtcggttgtgcatcatggcggtaggcgacgatgaccagaacatctatgcctggcgcgataccaataatcgttatatcgagcgcttccgcgaggactatgaggcctcgaccagcttcctggtcgataactatcgttcttccctgcgcatcattgaggcggccaaccaactcattggccagaatttggctcgactgaaagaggccaatcccatccggatcgacagggctcggcaggagctgcccgctggcgggctatgggaagagcgggacgagcagcggaaaggtcaggtaatgcgactgctgatcgacccgagcgaccgtgagcagggcaacctgcaggcacaggcggccatggtggagttgggacggttactcgcgctagaacaggggagctggaacggctgtgcggttctggctcggacgcaccgctatctgtggccgatccaggcttggtgcgagcagcacgatattccttatttcctggcagcagacaaggaaacggcgttacccattactcggcagcgcagttttgtggctgcaatcgactatatgcgagaaatcaaaggtgctttgtgcgcggctgacgcatggcagcgtttgtcgggtagcaatcaactggtggaagccgagtggaagagttttttccagacggcctttgagcaaatgcgaggagaattgggcgactgccaacttggcagtggtgccttgatcgactggctgtacgactacgcccgtgaattgcgtcaacagtccaaggacggcctctatcttggtaccgtgcattcggccaaaggtctggagttccgccatgtcgttctgctggatggtggctggagcacgcaggtcgataccctggctgatgagcgacgtttgtactacgtgggggtgacgcgagccgaacagaccctgacgttgtgcgaattcgctgacggcaatccattcagtcgcagcctgatgagagatgttcagcagcatgagtttcagggacaacctcttcctgggttggaggtgcgctttcagcaactcacgctgaaggagatcgatattggttttgccggtcgtcaatcaccacatgcccagatacacaaggccattgaggcgcttcgcgagggcgatccgctgacgttgaaggaagaggctggtcggtatcaactgctcgacaggcaaggcaacgtggttgggcgaaccgctaagtcattccagccacagatcggcttcgatcaatgcgaagtcgcagccgtcatggtgcggtttactgaggatagtgaggagcagtatagggatttgaataagtgtgagcgctgggaggtggttgtgccgagggggagagggtag

SEQ ID NO: 325196 - DNA, 2499 bp, Pseudomonas aeruginosa
atggcaaggaagcgcagaggtagagggaagcccaatttgtctggcggattgatcctcgcggctatcgtgctgggccttctcgcttctattcctacgcaggcctggatggttttgatcggcgtagcgattatcggctttggcgtatggctgatagtgaggttctccgataaaccgtcggtcgtagctttccctcctagcaagcgcccctcttcttcgaaggcaacacggtcagacaatgcagctctgtcccatgatctgacattttctctagatgaagtcgctcccttacaggcaaatacgctcactcgtactcagaaaaaggtttcggctcaggctccagcgtcatcgtcatcgtctgagaggagagatagcgccgggctgtttaccgtgacgcttgaggtatcggagcggccgtcccatcgaatcccaagtgcgcctgctaatttggccgtttctaaagcgcgttggttacctcaggacgaattcatcgagattgccggagagaagatttcaggcgggatgatttatgtcggcgaggatcggaacagccgttatggttcctcggagcccagcctgatcaaccccaagcttaaggtcgcgcgaggtattgtagatatcgccgagcgccttacttcctactggtcgagttacgacagcatctcccctgaagcacgacgtgcttatctacaatggctatccagcggtcggaaagccccgcatgccaacatcggctacgtcttcctgttcttctatggtctggaacgcagggtgtttgtcgatgcgaagacggatcgagcagcggccgccgagactcccagcatcattgccgaagtcgagaggttgctctcaatttatggtgagaaccattccttcaataactatgcaagccgcttcgtggacttccttcgtcagggcgcggtgcttactcgactctatttggaaacaccaccaacaccgttgccttacggctacgaaatgcctatcgagttgcgtatcggcttggggcagttggccgtcgataagcatccgctaccagccaactgggcattggcctgggtgctatccgatcacagcatcggaaaacggacacccgtaactcgctgtgaggatgcatttgcccgcttgtttcatatgcgctacgaagagcggtatggcgcagggatagtcctcccacagaacaaaactcggttgaaatttcagtacaacaccgcctctgcggggctaccttcccaggaattggatggcctatccgaaattcccgacgtaactgccacctctgcagcgcggaagaagctgcagcaactggtcgacgaatgtacggtgcaattggagccatacagccgttatctcggccgtaatcctggcgcaccagatgcattggaagggctcctacaattacctgttagcctctggcctgcgggcgctcgggcagagcttgatgagttgaagcaacgcatcggcgacggcatggtggtcatgagcttcggtgagctggcggggcggctgcagagtgcaggagccttgtcgcgagacaaagtcctcacactggcccgagctttggaatcattgcacattggtatcgagccagatgtactggcaggcagcagaacgcccaagcctgaggatcgcgtggcgctcttcgcgacccaggctgaagatggtgatctacgtgcttcaccggcatacagcgtcgcttctgtcactttggatctcgcctgcgctgtggcggctgccgatggcgacacctcgccgaaggaaatcatgctgctatcccagcatgtcgactcttggagccatttgagtggcgcgcatcggaagcgtctgaaggcccatttgcgtctgcagctcaaccagccgccaactttccagagtttgaagaagaagctggagcccttggccgactcggcgaggagggcagtggcggcattccttgcccacctggcgcaagtagatggtgaggtcagcccagcagaggtgaagctgcttgagcgtgtctacaagaccctacaattagattcgcaatcgttgtacagcgaccttcatgtcgtagccagtggcaatcctgctggttcattgcaggccacgcctgctgctcctggggcaactcagtccaagaccattggcggctttgctttggatcacgatcgcattgctcaactgcagcgtgagaccgaacaagtgtcagcgctgttggctcaggtctttgtcggcgagcagcctgttgagccggaggaggtttccattgaagaggccggtgaggatacctctggcgtctgcggattggatgccgatctctccgcctttctacgtgtgcttgtatcccgtaatgagtggacgcgagacgagttggaggcggtagcaagcgatatggaactcatgctcgatggggcattggagcagatcaatgatatggccttcgagcatttcgatatgcccgtcactgagggtgaagatcccttcgaaatcaatccagacgtcatggaaaatctaccgctatga

SEQ ID NO: 325197 - DNA, 1296 bp, Pseudomonas aeruginosa
atgagcagcatcagagccaaggatcgcgatgcggtcattcaatccctgcgagccggtgttgttccgcgggcaggccaacacctgatccaggtcggacgtgccggtgaactcgaagctctcattcgtgacgttgagcgtttggccgagagcggctccgcattccgggtagtgattggtgaatatggtgcgggtaagacattcttcctcaatctggtgcgttccattgcaatggaacgcaagctcgtcaccatgcatgcggacttgaacccggatcgccgcctacacgctactggtgggcaagcacgttcgctgtatgccgagctagcgaagaacatggctacccgtactaagccagatggcggtgctttgcagggagttgtcgagaggtttatctctcaggctaagaccgaggccaaggcatccggcaaagacagcgaggtagttattcgtgagcatctcgcccaattgaccgagatggttaatggctacgattttgccgaggtgatcgctgcttactgcaaaggttttgaagaaggcaacgagcagctaaaggctgaagcgattcgttggttgcgtggtgagttcaccacaagaaccgatgcgcgatccgctctgggggtgcgaaccattgtcgacgatgcgtccgtctacgatcagctcaagctgcttgctcggtttgtccggctggcaggcttcagtggtctgatggtgtgccttgatgagctggtcaacttgtacaagctctccaatacacaggctcgtaacgctaactacgagcagatcctgcgtatcctgaacgactctctgcaggggacagcagaggggcttggttttgtgctgggggggacacccgagttcctgatggatactcgccgtggcctttacagctatccggccctgcagtcgcgtctagcggaaaatagtttcgccaagtccgggctggtggatctctccggacctgttatccggctcgtcagcctgacacctgaggatttctacgtgctgctccagaaactacgccatgtctatgctgcgggtgatagccagcggtacttgctgcctgatgaggcattgccgctgttcatggggcactgcaatcagcggctgggagaggcctacttccgtaccccgaggactaccatcaccgcattcattaaccttctggcggtgttggagcagaaccctggaaccgactggcgaagcctcctgggtgctgtagaaattgcgccggatagaggtggcgaggccgacactcaagtagatgctgacgatgagcttgccaccttccagctctga

SEQ ID NO: 325198 - DNA, 2211 bp, Pseudomonas aeruginosa
atgagcttgccaccttccagctctgagtccactgggttcacattactcgagccaagaattcagcgctggatctgggccgagggctggacgtccctgcgggacgctcaggagcgcgctattccggccctcttgggggcggatcaggatgtgattatcgcggccgcgacagcggcggggaaaactgaagctgctttcctgcccattctcagcaaccttctgcaggatcaggactcgcctggagctgtgctgtatatcagtccgctgaaggcgctgatcaatgatcaatgggatcgcctaaccaggctttgtgatgatttagagctgcctgttatcgcttggcatggagatatttccgcaagccgcaaacatcgtttcctaaagtttccgcaaggcattctgctgattactccagagtcgcttgaggcgctattcgtgaacaggggaacaagcctcgctgggctgtttgtaaatatgcgctacctggtagtggatgagctgcatgccttcatcggcagcgagcggggcaaacaactgcagtcgcttatgcatcgtgtggagttggtcattgatcgacctctacccagagtagggctttccgcgacacttggagatatggcgctggcggcagccttcctgcgtcccaatgctcctgagcatgtatcggtgattgagtcgaagggggctagccaggtactgaaggttcaaatcaggggatatgaggaggctcgacagaacctatcggcgatatctgagggtgaagaggtcttctctgctgaccatgccattgcagaacatctctttcaggtgttgaggggtagcaataacctgatctttcccaacagccgatcccaggtggagtggttcgccgataacctgaggcggcgttgcgagcaggatggcgtgccgaacgagttctggccacatcacgggagtttggcgaaggatattcgagaggaaaccgagaaagctctgaaagctggtgatcgacctgccactgcagtttgcaccacaacactagaactcggggtggacattggcagcatcaagacggtagcgcagatcgggcctccaccgtcagttgctagcctccgtcagcgcttggggcgatccggtcgccgtccaggtgaggcagccattctccgaagctactgtaaggagcggcagttggatgatggctctccattgtcggctcggcttcgccaagacctggtgcagagcatcgctatgatcaggctgctaatgcaaggatggtttgaaccgcctcgtgttcaggggctgcatttgtcgacgttagtacagcagtgcctctcggtgattacccagcgaggcggggcaacggcagcagagctgtggagtactctgattcgaagtggcccgttcgccggagtggagcagggcagtttcctcagcttgcttcgtactcttggcgagcgcgatttgattgctcaggaagcatcgggtctcctactgcccggagtgctgggtgagcgtatgatcaatcattacgacttctacagtgcattcgtcagcaacgaggagttccgcctggtatgcgatggcaaaccacttggagcattaccggtatccaggccactgactatcgaccaacgcattatctttgctggacgacgctggcgagtcacggatgtggataccgaggccaaggttatcgtcgtgagatctgaccctggtggtgctccaccgtccttcgacggacttggggctcgtgtccatgatcgtgtcaggcaagagatgaggacagttttacttgaggcggacacctatccctatcttgacactgcagctcagaagctcttagccgaggctcgtagcaccttctcggatcttgggttggcgcactcaagcatgatcgaaagtggaggtaagacttacctctttacctggcaaggagattgggcgaacgatgctctggccatcttgttaactcatatggggctacccagcgagaatgtcggtctggtcactgaggtagagggggatagggcttcgcttgagagcaaactgcaagagatagctggatggggtggtattgatgagcctaccgttttgggtgacgtacagaacatggttcaagaaaaatgggattgggcgcttccgccgaaattactcatacagtcgtacgccacgatgtatctggacttggagggagcaaaagagttggcaaatattctgttgagttgtcgacactga

SEQ ID NO: 325199 - DNA, 135 bp, Pseudomonas aeruginosa
atgagcaagcaacgacgtacgttttccgccgagttcaaacgagaggccgcggccctggtgttggaccaaggctacagccatatcgacgcctgccgttcgctgggggtggtgattcggccttgcgccgttgggtga

SEQ ID NO: 325200 - DNA, 297 bp, Pseudomonas aeruginosa
gtggtctgttcagctttcgatgtggcgcggtcttgctactacgtccaccgtcttcgacgtcgtcgggtcgatgcgcgccgcgtggcgctacgcagccagctcaaccagttgttctaccagagtcggggctcggctggcagtcgcagcatcctgggcatgctgcgcgaagagggcgtgaccattggccgtttccgagtgcgtcggttgatgcgtgagctgggcttggtcagcaagcaaccgggctcgcacgcctatagacaggccatgttgagcggccggatatcccaaatcggctga

SEQ ID NO: 325201 - DNA, 705 bp, Pseudomonas aeruginosa
atgcgattcaagaaaccgcaggtgcgctacgccgacacgccgcagcctgccacgccgtaccaagctgccggccaggtgtgggacgaccgtatcggctcgccgcgcgtgcaggcgaagaactggcgcttgatggcgttcgggtgcctgacgctcgcgctgctgatggccggcggcctggtgtggcgctcggcgcagtccatcgtgacgccctatgtggtggaggtggacaacgcgggccaggtgcgcgctgtgggcgaagccgccacgccgtaccgccccagcgatgcacagacggcgcaccacattgcgcgcttcgtgacgctggtgcgctcgctgtccatcgaccccatcgtcgtccgccaaaactggctggacgcctacgactacacgaccgacaagggcgcggccgtgctcaacgactacgcgcgggtcaacgacccgttcgcacgcatcggcaaggagtcggtgacggtgcagatcaccagcgtcgtgcgcgccagcgacacgtctttcaacgtgcgctggacggaacggcgctacgtcaacggcgccgcggcgggcctggagcggtggacggcggtggtgtccatcgtgctccagccaccgcgcaccgaagaacgcctgcgcaagaacccgctgggcatctacgtcaacggcctgtcgtggagccgtgaactggattcttccgaaggagcaaagccatga

SEQ ID NO: 325202 - DNA, 990 bp, Pseudomonas aeruginosa
atgaatgatgttttccgcaaatccgccttgccgctgatcctgctggccctcgcgggctgcgccacgcagggcaagccgccgccgaccatctcgctcgatgagccggtgcaggcgcagccgctgccggagccgcccgcgccggtggaggtggtcaaggtgcccgagccgctggcgctgccggcgcagttgaagccattgcccgaagccgaggctgccaagcccgtccctgaacctgccgacgaaaccgtgcgcgtctcgcgtgccaacgccgaggcccgcatcgcgcccacgcgcgagggctacgtcaatgcgattcaggtgtggccctacaccgatggcgcgctgtatcaggtctatgcggccgtgggccgcgtgaccgtgatcacgctccagccgggcgaggaactggtgacggtcgccgctggcgacactgtgcgctggatcgtgggcgacacatccagcggcagcggtgatgcgctgcgcgtgaacgtgatggtgaagcccatccgctcgggcctcaagacgaatctggtcatcaccaccagccggcgcacctacctgctggagctgacctcgacagagaagacgtggatggcgtcagtgtcgtgggagtacccgaaggacaagatgctggccttgcagcgccaggcgcaggcggccagcgccgccacgccggtcgataccggcctgtcgcttgagcgcatccgcttccgctacgcgatcagcggcagcaatccgccgtggaagccgctgcgcgctttcgacgacggcgagaaggtctatatccagttccccgcgggcatcgcccagggagagctgccgccgctgttcgtgatcggagcgcagggcgacgggcaactggtgaactaccgcttccgcccgccgtactacatcgtcgatcggctgttcggtgcggccgaactgcgcttgggcggggacggtggcgacgtggtgcgcatcgagcgcacggatggcacgcggaggaactga

SEQ ID NO: 325203 - DNA, 1092 bp, Pseudomonas aeruginosa
atgagccaggatgacactcccgacgttgtagtgccacaggcgaaggtcgaacccgaggcggtggcgctgcgcgcccagccgcggcccgtcacacgcttgaaccgacgcacgctcgccatcctcgccggcggcctgtcggtcgccgtgctgggcgcgctgatgtggtctctgcaaccgcagcggcgcgcggccaacgagcagaccgagctttacaacgtggatcgcgtttcacgctccgaaggactcgatcagcttccagccgactattccaagctgccgccgtccttgcctcccgacgtgcccgagttggggccgccgctgccgggcgaccttgggccggccatcgtgaattcgcagcagccggccgtggccgcctacgccgcccccggtcacgacccggccgaggccgaacgcctggcccgcttgaaggaggccgaggaagcggccgcatcgtcggtattcttccgcaccggcacccagccccttccggcttcgccgtatcaggtcatggccgggacggtgatcgccggggcgctggtgacgggtatcaagtcggacttgccgggcgacgtgatcgccacggtgacggagccggtctatgacacagccagcggacgcttcatcctcatcccgcagggttcacgcatcctcggccgctacaacagccaggtgagctatgggcaaagccgggtgcaggtggtgtggaaccgcatcatcctgccggacacgtcctcgctgacgctggacaacctggccggcaccgacccggccggctatgccggcctggaggatggcgtcgattggcattgggatcgcatctttgccggtgcggtgctgaccacgctgctgggcgtcggtgccgagctggccgcgccggagaatcgccagaacggtgatcgcgtcatcatcgccgggcgcgacagcgcccaggacagcatcaatcaggtcggccaggagatgacccggcgcaacctcaacatccagcccaccttgaccgagcggccgggcctgccggttcgcatcatcgtcaaccgggatctggtgctgcggccgtaccagccgctgttcttcaatcgggggacttcacgatga

SEQ ID NO: 325204 - DNA, 243 bp, Pseudomonas aeruginosa
atgacgacgcgcaaactgcggctcgggccgctgcccaagaccgagagcaccaaggtcacattctcatgcccggccagcctgaaagccgacctcgaccgttacgccgcgctgcacgcacagacctacggcgaaaccgtcgatgcgacgacgctgatcccgcacatgctggaggcgttcatggcgggggatcggggattcaggaagggtacggcgacccggggcgcgccaccgaagccgacatga

SEQ ID NO: 325205 - DNA, 960 bp, Pseudomonas aeruginosa
gtggaccctctttctgacgtactctcgctgctcaagcctcgcagccagttctatgcggggttcgatgccaagggagactggtctttccacttccctccccatgagggaatcaagttcaccgccgtgacgcagggcacttgctgggtgattacggacgacctggagcaccccatccgcttcgatgagggggactgcttcttgttgaatagcggatgccgcatcgtcttgtcctctgatcccaagctgccgccacaagacggcggtcatatcctggaggctgccgcgcgcgatggtgttgccgttcacgacggcggtggggagacttttctcatcagcggaggctttgcgttctcgggccaccatgccaccatcctgttcgaggcactgccgcccatcatcagtattcccaaggcgtcgagccaggcagaggtgctgcgctggtccattgatcaactggttcgcgaattgcgcgggccgcaacccggcggcgcgctgatgtccatccacctggcgcacctgatgctggtgcaggtgctgcggctgttcctgaagacttcaagcgagctgccgcgaggctggtttctcgcgctgaccgaccggcaaatcagccctgcgattggtgccatgcatgccgatcccgcccactcttggacactggaagagttagcccgcatcgctggtatttcgcgcacggtgttcgcgcagcggttcaagtcgctggtgggcagcacagccatggactacctcgcgcgatggcgcatgttgctggccgccgaccgtctgcgcagcggcaatgagaacgtcgcggccatcgcgttctcgctcgggtacgagtcggaaagctcgttcagcaccgcgttcaagcgggtcatggcgtgctcaccatcgcagtatcgacgtcggatatccgtggctacggattcggacaacggccgtcgcgaccgccttcaaagcgcatag

SEQ ID NO: 325206 - DNA, 915 bp, Pseudomonas aeruginosa
atgaccgaatccatcaccttcaaaagctacgtctgggacgtggcaggcaccctgcacctgcccgccgatttcgacccgaagcgccagtacggcgccatcgtctgcgtccatccctccggcggcgtcaaggagcagaccgctggcttgtatgccgagcggctggccgcgcagggcttcgtcacgctggcctacgacgccaccttccagggcgagagtaccggtgagccgcgccacctggagaacccctatctgcgcgtggaggacgtgagcgccgccatcgactatctgaccacgctgccctacgtagacaacgcgtgcatcggcgtgctgggcatctgcgcgggcggtggctatgccacccacgccgccgtgatcgacacgcgcatcaaggccctgggcacggtgagcgccgcgaactacggtcaggtctaccgcgacggctgggacaggacggccaacccgaaggactgcctggccttgcgcgacacggcgatggcggcccgcactgccgaagccagtggcgcgcccatccaatacctgcccacggtgcccgacacgcgcgaggatgccgagaagctgcatctcgatttcgtcgaagcctacgagtactaccgcaccgaccgcgcccagcactgcaacgcgcccagcaagatgcccgcgcgcagcctggcgcagctggtgacctacgacgcctttagcaacgtcgagctgttcctgacgcaacccatgcagatcgtcgcgggcagcatcgcgggcacgcgctggatgagcgaagacctgttccgccgcgccgccagcaaggacaagaacctgctgatcgtcgaaggcggcacccacatggcgatgtacgaccagcccgccatggtggacgctgccatggacaagctcgcgccgttctacaagaagcatctgtaa

SEQ ID NO: 325207 - DNA, 942 bp, Pseudomonas aeruginosa
atgagccagatccgatccgtcaccttcaagaaccgcacctgggacgtggccgccacgctgcgcctgcccgagggcttcgatcccgcaaagaaatacgcggccatcatctgtgcccaccccatcagcagttgcaaggagcagaccgcgggcagcatctatggcgaggcactgaccaaggaaggcttcatcaccctggccttcgatgcgtccacccagggcgccagcggtggcgagccgaagttcagcgaagaccccggcacacgcgtggaagacttccgctgcgccgtggatcatctggtcacgctgccctacgtcgatgaagacaggatcggcgtgctgggcgtgtgcggcggcggcgcctatgcggccaatgtggccatgaccgagaagcgcatcaaggccgtgggtacggtggtggccaccaactacggccgaatgatgcgcgacggcgacaactcgcccgatgccgcactcaagaccctggaagctatcggcaagcagcgcaccgccgaggcgcgcggcgcagagccgctgatcgtgggctacattccctttgccagccaggccgagcgtgagaaggccggcgtccatgacgtggacatggtgcaggccatcgactactacctgacgccgcgcggccagcagcccggctcgcccaacaagctgcgcctgaccagcaccggcgcggcgctgggctgggatgccttccacctggccgagaagctgctgacgcagccgctgcatgtggtcttcggcggcgtgccgggcgccttcggatcatattcggacgggcaggagctgtaccgccgcgcccgctcggccgaaaagacgatgcagatcgtgcctggcgccagccactatgacctgtacgaccagcccgaggccaccggccaggccctggcccagttggtgccgttctacaggaagcacctgggcgcttaa

SEQ ID NO: 325208 - DNA, 1089 bp, Pseudomonas aeruginosa
atgtccctgccgtctccctggcgcgccgactttccggccttttccgccttcgccgcggaaggcctgacctacctcgacagcgccgccaccgcccagaagccacaggccgtactcgacgccctgaacggctactacctcggcggcgccgccaacgtccaccgcgcccaacatgtccccggcgagcgcgccacccgggccttcgaggccgcgcgcagccgcgtcgcccactggctgcacgccggcaacccggccgaggtgctgttcacccgcggcaccacagaggcgatcaacctggtggcctatggcctggagcggcatttccggcctggcgacgaactgctggtcagtgccctggaacaccatgccaacctgcttccctggcagcagttggccctgcgccgcggcctggtcctgcgcgtattgccgctggacgagcgcggggtgatcgacctggagcaggctcgccatatcatcggcgagcgtacccgcctgctggcgatcagccagttgtccaacgttctcggcacctggcaaccagtggtggagttgatccagctggcccgcgagcgcggtgcctggaccctggtggacggcgcccagggcagcgtccacggacgccacgacctgccgggcctgggctgcgacttctacgcattctccggccacaagctctacggccccgacggcatcggcgtgctctggggtcgcccacaggccctggagcaactggcgcactggcagttcggcggcgagatggtacgccacaccggcttccacgaagccagcttccatgccgctccgctcggcttcgaggcgggcaccccggcggtttccgcggcgatcggcctgggcgcgaccatcgactggctggccaccctggacgaagccgaagtcgccgcccacgaaggcgccctccacgccggcgaacagggcatcgcggtgcgcgccggccaccattgcgcgatgccgctgctgcaacgcctcgaggtacccggcgccctgcgtgtctcgctgggcttgtacaacgatgccgacgacctggagcgcttcttcctggctctcgaccgctcactggagttgctgcgatga

SEQ ID NO: 325209 - DNA, 1194 bp, Pseudomonas aeruginosa
gtgctggcagtgcaactactgctcaaggaaagcggcgtcgactggccgatgcgcgtggtgccgctgttcgagaccctcgacgacctggacaacgccggcccctgcatggagcgcctgctgacgctgccgggctaccgttcgcggctctccggggtgcaggaagtgatgatcggctactccgattcggccagggacgccggtactctcacggcggcctgggcgcagtaccgggcgcaggagaaactggtggagatctgccgccagcaagaggtcgagctgctgctcttccatggccgcggcggcaccgtcggccgcggcggcgggccggcccacgcggcgatcctgtcgcagccaccgggttcggtggccgggcgcttccgggtcaccgaacagggcgagatgatccgcttcaagttcggcttgccggacatcgccgaacagaacctcaatctctacctcgccgcagtgctggaggcgaccctgatgccgccgccggctcccgagccggcctggcgcgcgcagatggaccgcctggcgaaggacgcgctgctggcctaccgcagggtggtgcgcgacgatccgcagttcgtcgagtatttccgcctggccacgcccgagcaggaactgggccgtctgccgctgggcagccgcccggccaagcgccgcgaaggcggggtggagagcctgcgggcgattccctggatcttcgcctggacccagacgcgcctgatgctgccggcatggcttggctgggagaccgccttgctgaacgccatcgagcgtggcgagggcgcgctgctcgggcagatgcgcgagcaatggccgttcttcaccacccgcatcgacatgctggaaatggtcctggccaaggccgacgcggatatcgcgcggctctacgacgaacgtctagtgccgctcgagctgcgtccgctggggcgtcgtttacgcgacctattgtcgcaggcggtgcgcgtggtgctgggactgaccgggcagtcgctgctgctcgcccacgccagcgagacccgcgagtcgatcagcgtgcgcaacagctatctagacccgctgcacctgctccaggctgagcttctggcccgttcgcggcgctgccagggcgacgcctgcggcggcctggagcaggcgctgctggtgacggtcgcgggggtcgccgccggactgcgcaacaccggatga

SEQ ID NO: 325210 - DNA, 1005 bp, Pseudomonas aeruginosa
atggacagctcggcggccagtcggtcgatatcgcgcaggtacaggtcggcggccatccagcgcgccagcagcaggacctcgcgggtcacgctggcggtaacgttgggattgccgtcgcggtcgccccccatccaggacgcgaagcgcagcggcgcggcggtcagcggcaggcgttcgccggtgctgcgcaggagtacctcgtcgacgtgccgaaggacgttcggcaaggcctgccagagagaatgctcgatcaccgcgaagccccatttcgcctcgtccaccggggtcggccggaccttgcggatctcgtcggtatgccaggcctcggccaccagccgctgcaggcgctgctggatgcgactgcgctcctccggcagcaggtcggcatggtccttggccgccagctgcgcggtgatcgcatcgtatttctggatcagcgtgcgccgcgccacctcggtgggatgggcggtcagcaccagttcgatctccagcccggcgagctggcgagccagttgcccgggggcatgcccggcgtccttgagacgccccagcagctcttccagcaccaggttctcgaagggttccggctcgttcggccggcgccggcggatacggtggtattgctcggcgatattggccaggttgaggaactggttgaaggcccgcgccaccggcagcagttcgtcttcctcgagcccgtcgagggtagcggtgagctgctgggcgccctccgcggaaccgcggcgggcagccttggcgcccttgcggatcagctcgatcttgtcgaggaaccgcgggccgtactgctcgcggatggtgtcgccgagcaattcgcccagttggtggacgtcctcgcgcaggcgcgcatcgatttccggcatgacctgtctccactgcgggtgggaaaccagcttggctcaggcgcccccgcgcttacaagcccgcagggtgccagtacggcgccgccgggccggaagcgaggctgccggcgccgatcgggtctag

SEQ ID NO: 325211 - DNA, 903 bp, Pseudomonas aeruginosa
gtggtggaaaccctggacgacctgaccagcggcctggccgattcccgcgacctgctggacatggcggtcgaggaagacgacgagggcgccgtcgacgacgttgccaacgaagtcgagcgtctgcgcgagatcctcgagaagctggagttccgccgcatgttcagcggcgagatggacccgaacaacgcctacctggacatccaggccggctccggcggcaccgaggcccaggactgggccaacatgctgctgcgcatgtacctgcgctgggccgacaagcacggcttcgacgccactatcatcgagctgtccgagggcgaggtcgccggcatcaagggcgccaccgtgcacatcaagggcgagtacgcgttcggctggctgcgcaccgagatcggcgtgcaccgcctggtgcgcaagagtccgttcgactccggcaaccgtcgccacacctcgttcaccgcggtgttcgtatcgccggaaatcgacgacaacatcgagatcgagatcaacccggccgacctgcgcatcgatacctaccgctcctccggcgcgggcggtcagcacgtgaacaccaccgattcggcggtgcggatcacccacgtgccgaccaataccgtggtggcgtgccagaacgaacgctcccagcacgccaacaaggacaccgcgatgaagatgctgcgggccaagttgtacgagctggaaatgcagaagcgtaccgctgcgtcccaggccctggaggactccaagtccgacatcggctggggccaccagatccgctcctacgtgctcgaccagtcgcggatcaaggacctgcgtaccggtatcgaacgcagcgactgcgacaaggtgctcgacggcgatctagacgagtacctcgaagccagcctcaaacaggggctgtaa

SEQ ID NO: 325212 - DNA, 825 bp, Pseudomonas aeruginosa
atgtcactgcacggcaagaccctgttcatcaccggcgccagccgcggcatcggccgggagatagccctgcgcgccgcgcgcgatggcgccaacctggtgatcgcggcgaagagcgccgagccgcatccgaagctggaaggcaccatcttcagcgtcgccgccgaggtcgaggccgccggcggccaggccctgccgctgcaactcgacgtgcgcgacgagcaggccgtggcggcggccatggcccgcgccgccgaacgcttcggcgggatcgacgcgctggtcaacaatgccggggcgatccgcctggtcggggtggaaaagctggagcccaagcgcttcgacctgatgtaccagatcaacacccgcgcagtgctggtctgcagccaggccgccctgccctacctgcgcaggagcgccaacggccacatcctcagcctgtcgccgccgatcaacctggccggcaggtggttcgcccagcacggcccctacacggtcaccaagtacggcatgagcatgcttaccctggggatgcacgaggagttcgggaaatacgccatcagcgtcaacgcgctgtggccgaagaccatgatcgccaccgccgccatcgagttcgagctgggcagccgtgacgccttccgcctcgtagcggtactgctcgaaatcgctctggccgcgcacgccattctcaccagcgaggggcgcagcctcagcgggcgcctgctggtcgacgaggaattgctgcgcgagcgcggccagagcgatttcgagcagtaccgctacgacccggagggtggcgcgctggtgcccgacctgttcctcgactga

SEQ ID NO: 325213 - DNA, 1986 bp, Pseudomonas aeruginosa
atgcccagcttcaacaagatcctcgtcgccaaccgcggtgaaatcgcctgccgggtgctgcgcaccgcccatgaactgggctaccgcagcgtcgccgtgtacagcgaggcggacgccgacgcccgccatgtgcaactggccgacgaggccgtgtgcatcggcccggcagcggtggcgcagtcctacctgaacctcgaggcgatcctcgacgccgcccgtcgcagcggcgccgaggcgatccaccccggctacggcttcctctccgagaacgccgagttcgcccgtgcctgcgaagccgccgggatcgtcttcatcggcccggatgcggaagccatccacctgatgggcagcaagcgcctgtcgaagatcgccatgctcgccgccggggtgccgtgcatccccggctacgaaggcgccgaacaggacgacgcgaccctgcggcgcgaggccgaacgcatcggctacccgctgatgatcaaggccagcgccggcggcggcggccgcggcatgcgcctggtggaggaacccggccaactgctggaacagttgcgcactgcgcgctcggaagcgctgggcgccttcggcagcgccgagctgatcctggagagggccgtgctgcgcccgcgccatgtggagatccaggtgttcggcgaccgccacggcaacctgctctacctcggcgaacgcgactgctcggtgcagcgccgccaccagaaggtcatcgaggaagccccctgcccggtgctcgatgccgacctgcgtcgcgccatgggcgaggcggcggtgaaggccgcggcctcggtcaactacgtgggcgccggcaccgtcgagtttcttctcggcgaggatggtcgcttctacttcctggagatgaatacccgcctgcaggtcgaacacccggtcaccgaactggtcaccggccaggacctggtggcctggcagatccgcatcgccgagggccatccgctgccgctgcggcaggagcaggtggaactgcgcgggcatgccatcgaggtccgcctctacgccgaggacgccggtcgcggcttcctgccgcagaccggcacggtgctgcgctgggacccggaactgctgcccggcgtacgcatcgaccatggcctggtcgaggggcaggcggtgacgcccttctacgacccgatgctggccaagctgatcgcctacggggcgacccgcgacgaagcccggcgcaagctgatccgcgcgctggagcgctgcgtgctgctgggggtcgacggcaaccagcggttcctcgccaacctcctggcgcatccggacttcgccgccggcgaggcgaccaccgccttcatcggcgaacgcttcgccgaagaccccagcctgcaaccgcgccagccgggcgccgaggaactggccctggccgccgccctgctctaccaggccggcgccgaggccagtgcgcaccagcccggcctggccggctggcgcagcgccgccggggcgccgtggaagatcgtcctgaagcacgccgaacagcgcctggagatcggcctggaggtcctcgaaagcggccgtcggccgcgactgctggcgcgcctggagcgacgcgagatcgccgtgcgcctgctcgactgcgacggacgctgggccagcgtcgaactcgacggcattcgccgccgccacgcctaccacctggacggcgggcgcctctggctgtacggccacggcggcaacctcgaactgctcgacgtcacccacgccggcgccagcgcccaggtcggcgccagctccggcacgctcaaggcgccgatggacggcgccatcgtcgaggtgctggtcggcgagggcgaacgggtcggcaagggccaactgctgctggtgctggaggcaatgaagatggaacacccgctgaaggccggagtcgacggcgtggtccgccgcgtccaggtcggccgtggcgagcaggtacgcaaccggcaggtgctggtcgaggtggaagccgacgcctga

SEQ ID NO: 325214 - DNA, 171 bp, Pseudomonas aeruginosa
atgcagccgaccatctcgccggcgatggccgggcggaggaactcctcgcgcaactcgtcggaaccgaagcgggccagggccggggtgcacatgtcggtctgcacgccgatggccatcgggatgccgccgcaggtgatgctgccgaattcctcggcggcgacgatcgagtag

SEQ ID NO: 325215 - DNA, 507 bp, Pseudomonas aeruginosa
atgagtcgctatcgtccaccgcgcaccgccggcaccccgctgatcactccggagggcgccgcgcggttacgcgcagagctgcatgaactctggcacgtgcgccgtccccaggtgacccaggcggtcagcgaagccgccgccctcggcgatcgctcggaaaacgccgaatacatctacggcaagaagatgctgcgcgagatcgacagccgcgtgcgcttcctgcgcaagcgcctggagaacctgaaagtggtcggcgagcggccggcggatccgaaccgggtgtacttcggcgcctgggtgaccctggaagacgaagacggcgagcaggcccgctatcgcatcgtcggccccgacgaactggacctgcgcaacaaccagatcagcatcgactcgccgctcgcccgcgcactggtcggcaaggagctggacgccgaggtgctggtgcgcaccccggccggggaaaagctctggttcgtcgtcgagatcgagtatccaccggcgccctga

SEQ ID NO: 325216 - DNA, 285 bp, Pseudomonas aeruginosa
atgactgacgaacccctgagcctgtgggtggaaatcctcgtctcggcgttcctcctgctgggcagcgccttcgtcctgatcggcgcgatcggcctgtaccgcctgccggacttcttcatgatctatttctccaaccgccaggcgggcatcagcctgcatgagctgctgatcagcctgttcctcttcatcagcgctccggtcagcgcctacatgctggccaaggccgcggtgctgcagcagttgccgctggagaagaagactcgcggcaagccctgggagcagtga

SEQ ID NO: 325217 - DNA, 786 bp, Pseudomonas aeruginosa
atgttatcggcactgtgggtcagcaagaccggtctgtccgcccaggacatgaacctgaccaccatttccaacaacctggccaacgtatccaccaccggcttcaagcgcgaccgcgcggagttccaggacctgctgtaccagatccggcgccagccgggcggccagtcgacccaggacagcgagctgccttcgggcctgcaactgggtaccggtgtgcgcgtcgtcggcacccagaagatcttcaccccgggcagcctgcagaccaccgagcagccgctggatatggcggtcaacgggcgcggcttcttccaggttctgctgccggacggcaccgtgtcctacacccgcgacggcagcttccacctgaactccgacgggcagatcgtcacctccaacggcttcgccctggagccggcgatcgtggtgcccaacgagacccagaccttcaccgtcggccaggacggcaccgtctcggtgaccaccaccggcaacgcccagccgcaggtgatcggcaacatccagaccgccgacttcatcaacccggccggcctgcaggccatcggcaacaacctgttcctggaaaccggctccagcggcgcgccgcaggtcggcacgccgggtctcaacggcctcggcacggttgcccagaacaccctggaaaactccaacgtcaacgtggtcgaggaactggtgaacatgatcaccacccagcgcgcctacgagatgaactccaaggtcatctccaccgccgaccagatgttgtccttcgtcacccagaatctttga

SEQ ID NO: 325218 - DNA, 663 bp, Pseudomonas aeruginosa
atgaaccggctgatgatcgtctccctgcttggcatcgccaccgccctgggcggttgcgtcagcccaccgccgaagccgaacgatccgtactacgcgcagaacaacggcgcgatctaccaggccggcttcgagcagaacctctacgacgaccgcaaggccttccgcgtgggcgacatcattaccatcaccctcaacgagaagacccaggcgagcaagaaagccaactccgatatccagaaggacagcaagaccaagatggggctgacctcgctgttcggtagcggcatgaccaccaacaacccgatcggcggcggtgacctcagcctcagcgccgaatacggcggctcgcgcgacgccaagggcgacagccaggcggggcagagcaacagcctgaccggctcgatcaccgtgaccgtggccgaggtgctgcccaacggcatcctctccgtgcgcggcgagaagtggatgaccctgaacaccggcaacgagctggtgcgcatcgccggcctggtccgcgccgacgatatcgccaccgacaacaccgtgtcctcgacccgcgtggccgacgcccggatcacctattccggcaccggcgctttcgccgatgccagtcagccgggctggctggaccgcttcttcctcagcccgctgtggccgttctga

SEQ ID NO: 325219 - DNA, 1110 bp, Pseudomonas aeruginosa
atgaccaagttcaagcacctgctggccctcgccgcgctgctcctggccgccggcgcggcccaggccgagcgattgaaggatatcgccagcatccagggcgtgcggaccaaccagttgatcggctatggcctggtggtcggcctgagcggcagcggcgaccagaccacgcagacgccgttcaccctgcagaccttcaacaacatgctggcgcagttcggcatcaaggtgccggccaacgtcggcaacgtgcagttgaagaacgtcgccgcggtatcggtgcatgccgacctgccgccgttcgccaagccgggccagccgatcgacgtcaccgtgtcgtccatcggcaacgccaagagcctgcgcggcggcagcctgctgatgactccgctgaaaggtatcgacggccaggtctacgcggtcgcccagggcaacctggtggtcggcggcttcgacgccgaaggccgcgacggctcgaagatcaccgtcaacgtaccgtccgccggacgtatcccggccggcgccaccgtcgagcgcgcggtgccgagcggcttcgaccagggcaacagcctgacgctgaacctcaaccgcccggacttcaccactgccaagcgcatcgtcgaccgcatcaacgaactgctcggtccgggcgtcgcccatgcggtggacggcggctcggtgcgggtcagcgcgccgctcgacccgaaccagcgagtcgactacctgtcgatcctggagaacctcgacgtgcagccgggcgaggcggtggccaaggtcatcatcaattcgcgcaccggcaccatcgtcatcggccagaacgtcaaggtatcgccggccgccgtcacccacggcagcctgaccgtgagcatcaccgaagacccgatcgtcagccagcccggtgccttctccaacggccagaccgcggtggtgccgcgctcgcgggtgaacgccgaggaggagaccaagccgatgttcaagttcggtcccggcaccaccctggacgacatcgtccgcgcggtgaaccaggtcggcgccgcgccgagcgacctgatggcgatcctcgaagccctgaagcaggccggcgcgttgcaggccgacctgatcgtgatctga

SEQ ID NO: 325220 - DNA, 1320 bp, Pseudomonas aeruginosa
atgcgcatttcaacgatccaggctttcaacaactcggtcagtggcatctcccgcaactatgccgacctgacgcgcacccaggccgaaatcagtgccggcaagcgcctgctgaccccggccgacgacccggtcggcgccgtccggctgcttcagctgaaccaggagcaggcgctcaacagtcagtacaaatcgggcatcacggcagcgaagaacagcctgcagcaggaggagaccatcctcaattcggtcggcacggtcatccatcgtatccgcgagatcgccgtgcaggccggcaacggcggcctcgacgcctcggacaagaacgcgctggccaccgaactggcgcagcgcgaggacgaactgctgaacctgctcaacagccgcgacgccagcggcaagtacctgttctccggcagccagggcgatacccagccgttcgttcgcaacccggacggtacctactcctacaacggcgacgaaggccagcgtgaggtacagatcgccagcagcaccttcattgccatcagcgacaacggcaagatccttttcgaaagcggcagcaacgccaaccgggtctccaccggcaaggacgccgcaggcctggacgccagcggcaaccccagcgacagcagcatctccctgggcctggtgacggacaaggaagcctacgacacggtgttcccgtcgagcacgccaccgctggccagcgatggcgtcggtatccacttcaccgacgccaagaactacgtggtctacgacctcaagacgatcccgccgggctacgactggagcaccagcgaccccaacccgccgagcttcgccacgctcgccagcggcaagatcgacgacaacgcccagaccagcgacttcatcaccttcggcggcgtcaaggtacagatcgacggcgagccgcagggcggcgacaccttcagtatcaagcgccagccggaccaggaaaagcgcagcttgctcaataccgtgtcggacttgcgcaaggccctgctcagtgccgaggacactccggctggaaacctggctatccgcgacgcggtgggggtggcgatctccaacctggactcgtcgaactcgcagatcctcacgggccagggacgcatcggcgcgcggatgaacgtcgccgaatcgacggaaaccttcatcgacgacgtgaccctggtgaataccgccgtgatctcgcagatccaggatctggactaccctgaagcgctgtcacggctgaccctgcaatccaccatcatggatgcggcgcagcagagtttcgtcaagattcgcggcttgagcctgttcaactacctgagttaa

SEQ ID NO: 325221 - DNA, 762 bp, Pseudomonas aeruginosa
atgaccgacaaacaacggataaagggcaggcctgtcgctatcgactacgaaagcacgctggctttcttcgaaggtcgggccgcccgcgaatatcgcaatgccctgagttcgacgatgtatcaggaccagcagccggagctggtcgaggagcgcgatcggcgcgagaaactgcgcgtcgctccgggactcgccctcggtatggcccggcgggtcctcgacatcggctgcggtatcgggcgctggggctggctgctggccgaggaagcgccgcaggccgattacctgggcatcgacttctccgccgcgctggtggagaaagcccgcgacgaggcacggcagcgcggctacgagcggctgcttttccagcggatgtcggcgaccgacatccgtcccgccgagctggcgctcagtcctccctacgacctgctgctggtctcgggactactcatctatctcaacgacagcgactgccaggaactgttgcgccaggcgctgcagctgtgcgcaccgggcgggcggatctacctgcgcgaaccggtagccgtggaacagcgcctgaccctggatcgcttcttttcgaaggaactggaacacgagtattcggcggtctatcgcacggtcgccgaactcaaggacatgctcgtacaggccggcggaggggaagggcctgcgattctcgaagaggacggcctgttcgccgaagcgctggaaaagcgtgcggagacccgccagtacttcatgatcctgcagcgacggggatga

SEQ ID NO: 325222 - DNA, 603 bp, Pseudomonas aeruginosa
gtgcgcactgcctactgcttcgacctggatggaaccctgacccgtcaggaactgttgccgctgatcgcgtcgtccgtcggtctcgaagacgagatcgaggtgctgacccaggccaccatcgacggtttcctgccgttcgacaaatccttcaagctgcgtgtccgcttgctgcgcgacgcgaacctggagtggatccacagcgccctgcgtcagcaggtggagctggacccgcatatccaggcgttcatttccgcgcgccctcggcaatgcttcgtcgtgaccggcaacctggacctctgggtcgagccggtgctcgaacgcctcggagtgcgcagcttcacctcgcgggcgcggatgcgcgacggacgtctggagggagtcgaggagatcctccacaagggcgatgcggtgacctccctgcgcggcgagttcgagcgcatcgtcgccgtcggcgaagggatgaacgacgtgccgatgttcgaggccgccgatctgcgcgtggcctacggcggagtgcatgtgccgaaccgggtgctgaccggcctgagcgatttcgtggtccatgaaggagaagccctgtgtcgcctattgaacatgctgtga

SEQ ID NO: 325223 - DNA, 663 bp, Pseudomonas aeruginosa
gtgtcgcctattgaacatgctgtgatcagcgcggcgggcatcggctctcgtctgggactgaacaaacccaagtgcctggtcgaggttggtggcaagacgctgctggcccagcacctcgagcgcctggcggagatcccgaacgtctgggtcgtggtggggttccaggaggaactggtcatcgagcaggtgcgcaacctgcgcagggacgcgatcatcgtgcgcaaccccgatttcgaccgaaccaataccttgcagagcatccaccgggtttcgcgttatctcgaccggcgcttcctcgccgtggatggcgacaccttcatcgagaatcgctcgttcgaacgctttctccgcgccgccgccgggcaggcgggcctgatcggcgtctcgcgctacaccaccagcgatggcgtgcgtgttctgctggatgcgggtggcgaggcggtcacagctttcacccgcgagccgcagcacgcctacgaatggacgggtatcgcgattctccggccggacatggtggtggaccggccgatatacgtgtaccaggcgctcgaaccgtacctgccgctgcccgcgcaggaactcgacgccttcgacatcgataccgccagcgacctggatatggcgcggcgcgtgcacctgaataactggaacctgaatgattga

SEQ ID NO: 325224 - DNA, 5085 bp, Pseudomonas aeruginosa
atgattgaggacagcgtgagcgaacccggccggcgcgacggcggggatgccgggaagcgattggcctggctgcagcggcaggtcttgccggtgctggaggagggggacgcggtctgggtttccgggctggacggcgcgccgttcgccgggggcgcacacaaggtcgtcgaggcttccgccgctggcgagctgcctggcaacgagcgtttccgcctggcttgcctgggcggggcggtgggaggcgtggcggacgactggcaggccatgcgcctgctcctgcgcgcggtggagagcctggaggatcgcggctggctgctgctggaggaggctctctcggtatccgccgcaggcgcttgccggagtccccaggcgcaggcccgcctggcgctttccctgggcttgcggcaggtcgcggaactgcgcttgggcgcgccggacgacggcggacgccagcgggtgctgcaactgttccggcaggacctggcggttgcgcgcatgcagcgctactcgggcctgagggtcgcctgttacggcaacatgcctttccactaccgctcgttgcgtcctttggccgagtgtttcgaggacagcctcctgagcctcgacatcgatgaagtcatggcctggaaaccggacgtgatagcggtggccgacggctggtcggtggagttttggcgcgactactgcgatgcgcacaacgtattgctggtcggcatgcgccatggctcggtcacccgctacggattcgccgagggcacctaccgctacgccgactatctgtgcggcagcgcctgggacatcgacgacaccctggcttcctcggtgatgccgcgcaacggtttcctgctgaccggcaacgcctggtgcgacgaggtgttccggctgcccgcgagaaccccggcggagaacgcgccgaccatcctcttcgcccccacctacaaccccgagatcagcgccgccgtccacctcggcgagcgtgtggtggcgttgatccgcaaggtctatcccgcgtcgcggatcatcatcaagccgcatcccgccatcgtccagcacgaacatgcgttcgtcagcgacaaggatctgttccgcgacctcatgaagctctggcgcgaacagtcacgcacggacccgctggtcactctggtggacgaccccgaggcgagcatcgcggccagcttcgccgaagccgacattctgctggcggaccgttcttcgctgatcttcgagttcatgacgctcgaccgaccgatcctgctgttctcccgcgaacagcggatcgcccgctgggcctacaacccggaggcaccagggaacgcctggcgcgatatcggactggagttcgccgacgacgagcaactgctcgacctgctggccaatgcctttacccggcacgcggagagtcgcgatacccaggagaaccgcacgcagcagctgtacggccggtttcgcgacggacgcagcgtccagagggtcgccgcagcgatcgccgaggcgccgcgcttgcagatcgtgctcgacgcgcgggccgctgcggatggcgggcagcgactggccgaacattatgcggcctgcttcgcccatcgccgtatcgacctgatcgctccgtccggcgcggcattgccggccgacgtgcggcgcttcgattcgtggcgggcctggtgcgacgcggaggctgccacgctcgaacgcagggcttcggcggtgcttctggtggaagacgacggccagttgctgccgggcagcgcgcatcaggtaagcgcgctcctgccggccatcgccatgggccagttgcggcatgcccggctggcgttggaagagcgcgaggccgggcccgctggcgaaaccgactggagcgctcgccgcctgcacaggttgctcgcccgcctgcagccgaagccggcctggcgtctgctggcgcccgcgctgttgcgcgaggaactggccgacctgccggacgaagcggagcagccgttgtggctgcgcgccgtggcggcagccgaggcgccggtcgaatggcccgtcgggcagttgaacctgttcgccgaagagggactgttgcgccagggcgacgtgcatatgctctgcgcgcgcgctcggctgcgcgcggttccttgcgtgtcgggcctgccgctgcgccagcgccaggtcgtcctgcaggtcacgcccttcgccagccagctttacgaccgcttcccgttccagttgcgcgtgtgcctcaacggccagctcttcagccgcgtgagcgtcgaggacgcgcgagcgaagtcgctggtcctgccgttccggggtgacgaacgcggtggcatgacgatcgaactggagtgcgacggcagctatccggctttcgaaggcgtttccacgccggtctccctgctgctccagaccgcgttccagccggcgccgggagactattgcgcggccctcgcggccggcgcagcgagcccggaggcgggggaggacctccgcagcgaatacgagacctggctgcacgggcgcgaagtggagccggcccgctaccgtcccttcatcgacgctttgcgacgcgactcgcggatcgaagtcctggtgcttgccgaggaggccgaggacgcagacctgcagcgcagcctggcgagcatcgacggccaggccttgccggcctggcgcacgcggatactgggcagagccccggcgttcgcgcgcaagggcctggcgtggctggccgagggtggttccgccgccgagcggatcaacctggcggcggccgccagcgacgccgactggctgatcgtcatccatgccggagacgaactggcgcgttccgcgttgctcctgctggcagaaaagatccgtacggaaaccgcgctgctgtgctgctacagcgatgaagaccatgtgtgcgacggacgctacgaggcaccgttgctgaagcccgacttcaacctcgaccttctgcgcagctacccctactgcggtcgttccctggccttccagcgtgccgccttgctggcgcagggcggcttgcaggaaggcttcggcgatctggcgttgcaggacttcatgttccgcctggcggagcgggagggcctggatcgtatcggccatctcgccgaggtcctctaccacagcgctcgcgccttcggagaatggctggcgagcgccgccgtgcgcccgttcatcgcgagcgtggttgacgagcacctgaaccgcctcggggttccgcatcgaatcgagccgggccggctggcggtgatcaaccgcatcgcctacgactatccggggacgccggcagtgtccctgctgcttcccgtgggagacagcctgagcgctctccagcgcagcgtggaaagcttcctggagaacaccgactacccgtcctacgaattactgctggtcgcctccggcccgctggcgcccgacatggccgcctggctggaggcggtccagggactggggagcgagcagatccgggtgctcagcccgcaggcttcgagccttgccgggtgcctcaacctctgcgtggccgaggcccgaggcgaattcctcctgtcgttgggggcgggggtcgtggcccttcgtccggactggttgcgcgagttgctcaaccacggccaccgcccggaggtcggggcggtcggcggcaagctcctgggcctggacggaacgattcgcgaggcgggcctggtgcttggcctgggcggcacggcgggccgcgcgttcgccggcgaggcgggagacagcgccggctacatgcatcgcctgctggtcgtccagaatcacacggctctgtcggcttcctgcctgttgttcaagcgctcgctgcacgacgaactcggcggcttcgacgagaacgacttcgctcatggccacgccgacgtcgatttcagcctgcgtgcccgccagctcggctacctgtcggtgtggacgccctatgcaatcctggcccagaacggaaacgtcgagctgccttccgtggaggccgatgagtcgctctaccggcgctggctaccggcattggcgcgggatcccgcgtacaaccgcaatctcagcctggagggggccgggttcgccctggagcgccccgaggtaccggcctggcaaccgctgttcggacggtcgccgctgccgcgggtcctggcgcatcctgccgatccctacggttgtggccactatcgcgtgcgtcagccgttccgcgcgctgcacgacgccggcctgctggacggcatgctcagcgagtcgctcctgcagccggtggcgttggagcgcctggaggtcgacagcgtgattctccagcggcagatcagcgaagagcagttgcgggccatttcccggatgcagtcgttcaaccgcgccttccgggtctacgaactggacgactatctgcccgagctgccgctgaagagcctgcatcgggccgagatgcccggcgacattcgccagatcctcggtcgtgccctgggcctggcggaccgtttcgtggtctcgaccgaaccgttggcggaggcattccggcgcatgcacggggacatccgggtcgtgccgaaccgccttccgttgccctggtggcgcgacctttccagtcggcgccgggacgcagagcggccacgggtcggatgggccggcgggatcggccatggcggcgatctcgaggtgatcgccgaggtcgtgcgcgagctggcggacgaggtggactgggtgttcttcggattctgcccggatgccttgcgtccctatgtgcgcgaataccatccgggggtggagatcgaacgctatcccgcctacctggccagcctcgacctcgatctcgccctggcgccgctggagcagaaccgcttcaacgagtgcaagagcaacctgcgcctcctggagtacggcgtgctcggcttcccggtgatctgcagcgacgtgctctgctatcgcgacagtctcccggtcacgcgggtgaagaaccgttccagggactggctggaggcgatccgcgcgcacctggccgatgcggacgccaacgccgcagccggcgcgcagttgcgcgaggcggtgcgccgcgactggatgctcgaaggcgcgcatctcgaggcatgggcggcagcctggctgccggactga

SEQ ID NO: 325225 - DNA, 1467 bp, Pseudomonas aeruginosa
atggcccttacagtcaacacgaacattgcttccctgaacactcagcgcaacctgaatgcttcttccaacgacctcaacacctcgttgcagcgtctgaccaccggctaccgcatcaacagcgccaaggacgatgctgccggcctgcagatctccaaccgcctgtccaaccagatcagcggtctgaacgttgccacccgcaacgccaacgacggcatctccctggcgcagaccgctgaaggtgccctgcagcagtccaccaatatcctgcagcgtatccgcgacctggccctgcaatccgccaacggctccaacagcgacgccgaccgtgccgccctgcagaaagaagttgctgcgcaacaggccgaactgacccgtatctccgataccaccaccttcggtggccgcaagctgctcgacggctccttcggcaccaccagcttccaggtcggttccaacgcctacgagaccattgacatcagcctgcagaatgcctctgccagcgccatcggttcttaccaggtcggcagcaacggcgcgggtaccgtcgccagcgtagcgggcaccgcgaccgcttcgggcatcgcctcgggcaccgtcaacctggtcggtggcggtcaggtgaagaacatcgccatcgccgccggcgatagcgccaaggccatcgccgagaagatggacggtgccatcccgaacctgtcggctcgtgcccgtaccgtgttcaccgctgatgtcagcggcgtgaccggtggttcgctgaacttcgacgtaaccgttggcagcaacaccgtgagcctggcaggcgtgacctccactcaggatctggccgaccaactgaactccaactcgtcgaagctgggcatcaccgccagcatcaacgacaagggtgtactgaccatcacctccgctaccggcgagaacgtcaagttcggtgcgcagaccggtaccgctactgccggtcaggtcgcagtgaaggtccagggttccgatggcaagttcgaagcggccgccaagaacgtggtagctgccggtactgccgctaccaccaccgtcgtgaccggctacgtgcaactgaactcgccgaccgcctactcggtcagcggtaccggcacccaggcttcgcaggtcttcggcaacgccagcgccgcgcagaagagcagcgttgccagcgtcgacatctccactgccgacggcgcccagaacgccatcgcggtagtcgataacgccctggctgcgatcgacgcccagcgtgccgacctcggtgctgttcagaaccgcttcaagaacaccatcgacaacctgaccaacatctcggaaaacgctaccaacgctcgtagccgcatcaaggacaccgacttcgctgccgaaaccgcggcgctgtcgaagaaccaggtgctgcaacaggccggtaccgcgatcctggcccaggccaaccagctgccgcaggcggtcctgagcctgctgcgctaa

SEQ ID NO: 325226 - DNA, 372 bp, Pseudomonas aeruginosa
atggacgtcggaaatatcacttccctttctacgttcaagaccggcagggccccggaggccagcggcgatatctttgcgccgcgcagcgcagcggatggcagcggcaaaccgttgccggaagtgacggcttcccgggaggccagcgaatctcgcgatgacctggggctcgccgtcagcgacatccagtctttcgtgcagagcgtcaagcgcaacttgaacttcagcatcgacgactcctctggccaggtcgtggtcaaggtgatcgacggtgactcgggcgaagtcgtgcggcaaatcccttccgaagaagtactaaaacttgccgcccggctcgacgacgtacgcagtgtcctgttcgaaacccgcgcctga

SEQ ID NO: 325227 - DNA, 1425 bp, Pseudomonas aeruginosa
atggccggtatctcgataggagtaggctcgaccgattacaccgatctggtgaacaagatggtgaacctggagggcgcggctaagaccaaccagctcgccaccctggagaagaccaccactactcgtctcactgccctgggccagttcaagagtgcgatcagcgcgttccagacggcgctcacggcgctgaacagcaatgctgtgttcatggcgcgcaccgccaagtcttccaacgaagacattctcaaggcgagcgccacccagagcgcggtggctggcacctaccagatccaggtcaacagccttgccaccagcagcaagattgccctgcaggccatcgccgatccggccaatgccaagttcaacagcggtacgctgaacatctccgtcggcgacaccaagctgccggcgatcaccgtcgactccagcaacaacacgctggccggcatgcgcgatgccatcaatcaggccggcaaggaagcgggcgtcagcgccaccatcattaccgacaactccggctcgcgtctggtgctgagcagcaccaagaccggcgacggcaaggacatcaaggtcgaggtcagcgatgacggcagcggcggcaatacgtcgctcagccaactggctttcgatcccgcgacggctcccaagctcagcgacggcgccgctgccggctacgtgaccaaggcggcaaacggtgaaatcaccgtcgacggcctcaagcgcagcatcgcctccaacagcgtgagcgacgtcattgacggcgtcagcttcgacgtgaaagccgtcaccgaagccggcaagccgatcaccctgactgtttcccgggacgatgccggggtgaaggagaacgtcaagaagttcgtcgaggcctacaacaccctcaccaagttcatcaacgaacagaccgtggtgaccaaggttggcgaagacaagactccggtcaccggagctctgctcggcgatgcctccgtccgtgcgctggtcaacaccatgcgcagcgaactgatcgcctccaacgaaaacggcagcgtgcgcaaccttgccgccctcggaatcaccacgaccaaggacggcacgctggagatcgacgagaagaagctcgacaaggcgatcagcgccgacttcgaaggcgttgccagctacttcaccggcgataccggcctggccaagcgcctgggcgataagatgaagccctacaccgacgcccagggtattctcgaccagcgcaccacgaccttgcagaagaccctcagcaacgtcgacacgcagaaggctgatctggccaagcggctggcggcgctgcaggagaaactgaccacccagttcaacctgctttccgcgatgcaggatgaaatgaccaagcgtcagaagagcatcacggacaacctcgccagcctgccttacggcagcggcaagaagacctga

SEQ ID NO: 325228 - DNA, 381 bp, Pseudomonas aeruginosa
atgtacgcgatgaaagcgatgaagcaataccagcaggtcagcatcgaggctcaggtttccgatgccaacccgcaccgtctgatccaactgctcatgcagggtggtctggagcgtctggcccaggcgcgtggtgcgatggagcgggagcagatcccggaaaaggggatcctgatcggcaaggccatcggcatcatcggcggccttcgcgaagcgctggacagcgagcgtggtggcgagctggccggcaatctggatcgtctctacgagtacatgatcgctcgtctggtcgaggccaataccagcaacgataccagcctgctagacgaggtcagcgccctgttgttggaagtgaagtccggttgggacggtatttcgcactga

SEQ ID NO: 325229 - DNA, 297 bp, Pseudomonas aeruginosa
atgagccaagccacgcaacaactggatgaaacccgactcgccctggccgatgcgttgcaggccggcaactgggatgccatcggtgagctggatcaggtctgtcaggtcaagatcgaccaggccatgcatgatgacgagcgcgacgagcaggccctgcgcgtgagcctggagcagttgctcagcttgtacaacgatatgctcagcgcttgccggcagcagcgcgaagcaatcggtgcggagctgaccggtctgcagcgtgcgagtaaaggcgccaaggtctaccagatgttcggataa

SEQ ID NO: 325230 - DNA, 1473 bp, Pseudomonas aeruginosa
atgtggcgcgaaaccaaactcttgctgattgacgacaatctcgatcgcagtcgcgacctggcagtcattctcaacttcctcggcgaagatcagctgacctgcaacagcgaggattggcgagaggtagcggcgggcctgagcaacagtcgcgaagccctgtgcgtgctgctcggcagcgtcgagtcgaagggcggggcggtagagctgctgaagcaactggccagttgggacgagtacctgccgatcctgctgatcggcgagccggccccggccgactggccggaggagctgcgccgccgggtgctcgccagcctggagatgccgcccagctacaacaagctgctcgattccctgcatcgcgcccaggtctaccgcgagatgtacgaccaggcccgcgagcgcggccgctcccgcgagccgaacctgttccgcagcctggtcggcaccagccgggcgatccagcaggtgcggcagatgatgcagcaggtcgccgataccgatgccagcgtgctgatcctcggcgagtccggcaccggcaaggaagtggtggcgcgcaacctgcattaccattccaagcgccgcgaggggcccttcgtcccggtgaactgcggggcgatcccggcggaactgctggaaagcgaactgttcggccacgagaagggcgccttcaccggtgccatcaccagtcgtgccggacgcttcgagctggccaacggcggcaccctgttcctcgacgagatcggcgacatgccgctgccgatgcaggtcaagctgctgcgcgtgctgcaggagcgcaccttcgaaagggtcggcagcaacaagacgcagaacgtcgacgtgcggatcatcgccgcgacccacaagaacctcgagaagatgatcgaggacggcactttccgcgaagacctctactaccgcctcaacgtattccccatcgagatggcgccgctgcgcgagcgggtggaagacatcgccctgctgctcaacgaactgatctcgcggatggagcacgagaagcgcgggtcgatccgcttcaactcggcggcgatcatgtcgctctgccgccacgactggccgggcaacgtccgcgaactggcgaacctggtggagcgcctggcgatcatgcatccctacggggtgatcggggtcggcgaactgccgaagaaattccgccatgtcgacgacgaggacgagcaactcgccagcagcctgcgcgaagagctggaagagcgcgcggcgatcaacgctgggctgccgggaatggacgcgccggcgatgctgccggccgaaggcctggacctcaaggactacctggccaacctcgagcagggcctgatccagcaggccctcgacgatgccggcggagtggtcgcgcgggccgccgaacgcctgcgcatccgccgcaccacgctggtggagaagatgcgcaagtacggcatgagccggcgcgacgacgacctgtcggatgattga

SEQ ID NO: 325231 - DNA, 1089 bp, Pseudomonas aeruginosa
atggacttcggccgccgcgcgcaggctgtcgaacagcgccttcggcgccacccggtcggtcagtggcagctcgccgcgggcgaacaccagcatgtcgcgtacctgatgctccagttcgtgcaggcgctccttcaggcgcccggcgaagcgttgctgctggtcggtcggcagcgcctgctcgctgaggtgcccggcatagagcaacgccgccgacaacggcgtgcggatctggtgggccagcgaggcgaccatccgccccagcgccgacaggcgctcgtggcgcgccagttgctcctggagacggcgggtatcggtaaggtcgttgagcaggatcagttgacccggttcgccgttcagcgagcgggtggcgatggacaggcgacgtccgtcgcgcagggaaatctcgtggccgtcatcctcgcgcggagcgaagcagcgggcgatcacctcgcgccagagcatgcccaccaacggctcgccaagcaggcccagggccgccgggttggcctcgcggaccacgccatgggcatcgatgacgatgacgccgccgggaagcaggtcgagcaggctctgcaagcggttggccaggcgctccttttccgccagctcctccatgcgctgcgcgctgaccagggccagttgccctttcagctcggtaacgcgctcctccagcaggctgtaggactcgctgagctggctggacatctggttgaacagcgcgaaggcctgctcgaggccggcgcggctggtggcctcggccgtatcggctggctgctcggggaaggcgttgagggctggttgcattgcgtttctctcggtcggcgcgacgtcatggttctgtcggtcgacggagatatagcaatacccgtgcctaaatttttttcatttgaaaatcaaagcgttgcgaaacgacctgtcaatcatccgacaggtcgtcgtcgcgccggctcatgccgtacttgcgcatcttctccaccagcgtggtgcggcggatgcgcaggcgttcggcggcccgcgcgaccactccgccggcatcgtcgagggcctgctggatcaggccctgctcgaggttggccaggtagtccttga

SEQ ID NO: 325232 - DNA, 1218 bp, Pseudomonas aeruginosa
atggcggacaaagcgttaaagaccagtgtcttcatctgggaaggcactgataagaaaggcagcaaggtcaaaggagagttggccgggcaaaaccctatgctggtgaaggctcaactgcgcaaacagggtatcaacccactaaaggtccgcaagaaaggtatcaccctgtttggggcagggaagaagattaagcccatggacatcgccctgttcactcggcagatgtctaccatgatgggtgccggcgtaccgttactgcaatcttttgacatcatcggcgaaggattcgaaaatccaaacatgcgcaagctagtcgatgagatcaagcaggatgttgccgccggtaacagcttagccagttcacttcgaaagaaacccatttacttcgatgatctctactgcaacctggtcgatgctggcgaacagtccggtgctttggagacattattggatcgggtagcaacttataaagaaaagacagaatccctgaaagccaaaattaaaaaagccatgacttatcccattgcagtaattgtagtggcccttgtggtatcggcgatccttctgataaaagtggtcccacagttccagtccgtatttgcaaattttggtgccgagttgccggcctttactcaaatggtcatcaatctttccgagatgcttcaagagtggtggctcatagtgcttattggtctttttgccgcagcttttgcatttagggaagctcatcggcgctcgcaaaaactgagagattcagtagatcggggcctgctgaaactacctatcatcggcgggatactttacaaatcagctatcgcccgctacgcccgaacgctatccactacctttgcggctggagtgcctctggtagaagctctggactccgtttccggagcaactggcaacgtggtattcaagaatgccgttaccaagatcaaacaagacgtgtccagcggcatgcaattgaacttttccatgcgcaccaccaatgttttccccagtatggctatccagatggctgcaattggcgaggaatcaggttcgctagatgagatgttaggaaaagttgccggtttctatgaggaagaagtcgataacgccgtcgacaacctgacaacgttgatggagccgatgatcatggccgtgctcggcgtactggtcggcggcctgatcatcgctatgtatctaccgatcttccaactgggttccgttgtgtaa

SEQ ID NO: 325233 - DNA, 699 bp, Pseudomonas aeruginosa
gtgcatttcgctggaagtcgttggagagccttttctatccatctactcattagtctggcaatttttatcgtattgctggcaatcatctgtttgtggtggtatcccggtgctttgttcgaaatagcaggaggatggcagggggtgcgcatcgttgccgctgtcgacttggttttggggccattgttgactctggttgtctatgatatgagaaagccagtcatggagttagtgcgtgacttgggtgtcattgctctatttcagttttcctgcctgtcggcgggagtttatgttgtctatcaggcgaggccgcttgctcttgttcatgtgtttgatacgtttcatgtgttgaatagggcgtcttatctgcaggctggcctttcttctgaagagttgatgaggtttaaagtgttttctcctgagtatttttatatcgacttgcctgcggagaaaaccgagttccttgaactgcatgtaaaaggaatgctcgatggacgaccgctacagacccaattggagcgctacaagacattgccggtggtggcagggcaagttgagcggatagtggggaggaatgctcactccgttgggccaggttgtattcgtctggatattgaaagcgcctacgaaacgggaacgatctgtttcgataaagctcgccgttttttctttgacttccgcaagagtgatgctgcgacttga

SEQ ID NO: 325234 - DNA, 2256 bp, Pseudomonas aeruginosa
atgcagaacgatgccaatgtggtgcacctgaccagggtcgcttccgagccgtcgccgaacgccggagcggggcgcctgccggtcatcctcgtgcaggtgcgcgacaaggcggcgctgcagctgaaacaggcgttgcaggcgttgttcgacaacgccgacgacaccctcttcgaaatggccgaccgagccaccagcaacctcgaacagaacgctttcttcgaagccatgcgcgacctgcgcctcaagcgcaagagtatcgagcgggtctacctgcagaaggtcttcgaggagttctcggcgctcaaccaggtacagtccggcaaatccgtgccgaccctggataccgtgtccttcgatagcctcagcctggtacagaacgaggaactggaggagtccgtcgcggtggacgcgatggtggcgcgggtgatgagccgcgatgcctccgcgctggcccacctgagcacccgcctgaacaccctggtcggccggaaggtcgacgagaagagcaatcccctcgctccgcgtccgctgacctcggctttcctcgatgcctgccaggggctcggcgtcgagatcaaggtcaagctgatcattctcaagctgttcgagaagtacgtcctggcccattgcgaccagttgtacgccgaggccaaccagatcctggtcgctgcgggcgtgctgccggaactcaaatccgcgctgccgcggcgtcagcccgctgtccgtcccgaagcggtgcgcgatgccgggaccctgcaggcacaggctgcgctgctcgacggcggtcagcaggaagtcttcggcgcgctgcaggaactgctggcgcaggtccgcgacaatccttccttctaccgtcgcgaaacgcctgagaatgccgcgccgatttccagcaacgacctgatgcgcctgctttcccacctgcaacagcacttgccgggccctggcgccgcggagttcgacgtccgcgacggggtcgaccaactgctccagcgggtcagccacaagagcggccgttctcgggtggtcggccaggtggacgatgacgtcatcaacctggtgtcgatgctgttcgagttcattctcgacgaccgcaccctgcctgattcgctgaaggccctgatcggtcggatgcagatcccgatgctcaaggtggccctgctcgacaagaccttcttcagccgcggtagccatccggcgcgtcgcctgctcaacgagatcgcatccgcgtcgctgggctgggccgaacacaatgatgcccggcgcgacagcctgtaccagaagatcgaacaggtcgtgatgcggctgttgaacgacttcgtcgacgacccggcgatcttcgccgagttgctggaggacttcattgccttcaccggcgacgagcgccgccgcagcgagctcctcgagcaacgcacccgcgacgccgaggaaggccgcgccaaggccgaactggctcgtcaggacgtggagcaggtgctgaaccagcgactgctcggcaaggtcctgccggaggtggtggtgcgcctgctgcgggatgcctggagcaaggtgatgctgctgatctgcctcaagcatggcaaggcttcggccgagtggcgggaggccctggataccatggacgagctgatctggagcgtcggcccgcatgatgatccgctgtcccgccaacagttgctggagcgcgtgccaggcctgctcaaggcgctgcgcgagggattggccagcgcagccttcgatccgttttccaccggagaattcttcagccagctggaaaccctgcatgtccagggcctgcagcgcgacaagcgcggcgaggcggcggtcgcggacagcccgctgctcgacgaagcgaccccgggcacggccgcggaaaagccccgggcgccggtcatgctgcgggtggtcgaggaaattgtcctgacctcgccggacgccgccccggcgcctgtcgagagcgaagtgcgcctgccggacaacgacgaggcactgctgcgggtcgatgcgctgcgtgtcggcagttgggtggaaatccaggaggacgccgagcacaagctgcgctgcaagctggcggcagtgatccggcccaccggtcgctacatcttcgtcaatcgcaccgggatgaaggtcctggaaaagacccgcatgggcctggcggtggagtttcgccggcaggcggtacgcctgctggacgatgccttgctgttcgaccgggccctggagtcggtgatcggcaacctgcggcgcctcaagggcgcctag

SEQ ID NO: 325235 - DNA, 1803 bp, Pseudomonas aeruginosa
gtgtcccccaccccaccacgcgttacgcgcaatcgcatcgactgggccggcctgggctggctgttcctgttcttctggttcttctccggtatcacccaactgctcctgctgacctccggcaacagcggtttctccggtttccgcaacgccatggtgctgagcaccatctggcttgcgccggtgttactgttcccgcgctggaccaagccgctggccgccgtcatcgggctggtgctgtgggccgcctcgctggtcggcctgagctatttcggcatctatcaccaggaattttcgcaaagcgtgatcttcgtgatgttcgagtcgaacaccgccgaggccagcgaatatttcagccagtacttcaacccctggatgaccctcggcctggtgctctacagcctggtcgccatcctcctctggcgccgcctgcgcccggtctacctgccgcgcttcagcgccctgccggtggcggtgctgctgatcgtcgcgaccatcggttatccgttctacaagcaactggtcagccagggccggcccttcgacgaagccctggacaaggtccaggcgcgcatggaaccggcggtgccctggcaattgctgatcggctaccagcaataccgccagcaactgggcagcatgcaggcgctgttgcaaaagaacgcggccctaccgccgctgaagaacctcgtcgatgccaatggcgatacgccgcgcacgctggtcctggtgatcggcgaatccacgtcgcgcaagcacatgagcctctacggctatccacgcgaaacgaccccgcagctggacgcactgaaggccgcgaaccggaacctcacggtattcaacaacgtggtggcgtcgcggccatataccatcgaggtgctgcagcaggtgctaacgttcgctgaccaggagcatcccgaccgcttcctcaccgatccgtcgctgatgaacctgatgaagcaggccggctacaaaaccttctggatcaccaaccagcagactatgaccaagcgcaacaccatgctgacgaccttcgcccagcagaccgatgcgcagttctacctgaacaaccagcgcagccagaacgccagccagctggacggcgcggtgctggcgcccttcgccaaggtgctggacgacccggcgccgaagaagttcatcgtggtccatctgctcggcacccacatgaactacaagtaccgctatcccgccgactacgctcgcttcgtcgaccgccagggcgccccggcggccctcagcgacgaccaggtggaggtctacaacagctacgacaacgccgtgctgtacaacgactacgtggtctccagcctgatcaagggcttcgccaacagcgatccgaacggcttcctggtctacctctcggaccatggcgaggaagtcttcgacgaagccccgcacgaccgcctcggccgcaacgaaggcgacccgacccgcggcatgtacaccgtgcccttcctggtctggacttcgcccagctggcagcagacccacccacgcgacctgcaggccctggtcgaccgacgctacagcagcgaagacctgatccatacctggtccgacctcgccggcctcaactatgacctcttcgatccgaccaagagcctggtgagcaacgacttccagcatgaagtccgctggatcggcaacccctatgcccacaatggcttgcgcgacttcgacaagctgccgctggacaaggccgacgccgggcagcaggtcgcccaggccggacgacccgcgccaacgacgccgcgcgcaccgtcccgccagccgaacgaaggctga

SEQ ID NO: 325236 - DNA, 1452 bp, Pseudomonas aeruginosa
atgagataccaacgagtgaccggcgcgacgctgggactggccttgatggcatcggccgcgccaggctgggcggcggacgagcaggaaaccccgccgaccccggacaatcccagctacgccgcccaggtgcagagcatccccagcgtggagaaaccgatcaagggccaggccggcgccagcgggctgttcgaggggcagagcctgaccctgaccacccgcaacttctactcgcgggaaaacatgaaggacagcttcaccttccgcattcccaaggccggcggcggctcccagcgcatccaccagcgcaacgcctgggtccagggcacggtgctcaagtacagctcgggctacacccagggcagcatcggcttcggcttcgacgtcgcagccttcaacgagatcgccctggagcgcggcaagggccgcatcggcggcggcggcaaccggaccctggcgaacagcgatggcgaggcgatcggcgaatggtccaagctgggcgttgccaatatccgcctgcgcgcctcgaacaccgaattcaaggccggtcgcttcctggtcaacactccggtgttcagctatatcgacaaccgtgccctgccctccagcttcaccggcttcgccgtgaccagcgaggagctggacaacctcagcctgcaggccggcagcttccgcaaggtcagcccgcgaaccggttccggcgacgaggacatgaccaccgagtacggcacccgccaggtcaagggcgaccgcctgaactacctgggcggcaactacaagccgctcgacgggctggagatctccctctatggctcgcatttccaggacgtctggaaccagtactacctgggcgtgacccacgacatcggcgacctcgagaacggcatcgccctgcgcaccgccttcaacggctaccacaccggcgacaccggcgcgcgcgaggccggctacatcgacaacgacacctggagcctggccttcaccctcggccatcgcgcccacgccctgaccctggcctaccagcaggtcgacggcaacgaatacttcgactacgtgcacgaaacctcggcgatcttcctggccaactcgatgctggccgactacaacagccccaacgagaagtccgcgcagatccgctacgagaccgactggagctactacggggtccccggcctgagcaccggcgtgtggtacgtgaagggctgggacatcgacggcacccactacgacggcgatcgcaacggtgcctacggcaactacgccgaggtgcgcgcccaggacggcgagaagcaccacgagctgggcctgatggcggcctacaaggtgcagaacgggccgatcaaggacagcaccttcaagctcacctacatgatgcacaaggccagccagaaccaggtcgacggcagcgtcaacgaactgcgcctggtcagcaccttccccttcaacctgctgtaa

SEQ ID NO: 325237 - DNA, 249 bp, Pseudomonas aeruginosa
atgaaaggcgccgtggacgcgttcaaggagcgcgcccagttgctcaccgaggcgctcggcggcaagggctacaagctggtcagcctgagcgtgaacagcgccggcgcaccgcgcccgtacccggtgatgcggatggcggcgatgaaggccgacgccagcttcggtggcgcccaggcgccggagatcgaggccgggaccagccaggtcacggtcaacgccgacggtgtgatcgaggtgcagatgccctga

SEQ ID NO: 325238 - DNA, 405 bp, Pseudomonas aeruginosa
atgtctgcgatttcccgcctggccgccgccgtcaccctctgcgccgccagcctctcggccgtcgccgaggaagcgccgcgctacaaccaggtctcgctgcacgccgaagtcagccagcaggtggcccacgacctgatgcaggtcaccctctacagcgaaaaccagggcagcgatccggccaagctcgccgccgaaaccaccagcgtcctcaacgccgccgtcgccgacgcgcgcaaggtcaagggcgtgaccatcagcctgggcagtcgcaacagctatccggtctacgacgacaagggccagaagatcactggctggcgcgagcgcgccgagctgcgcctggaaagctccgacttcgccgccctcggccagctttccgccgacctgctgggcaggcgaccatga

SEQ ID NO: 325239 - DNA, 1647 bp, Pseudomonas aeruginosa
atgagcgagaacaacacccccagccctgccaacggaacccctgcgcccgccgctgcgcgcccccgaagcgccctgtggccggctcccgcggacgccgacgcgccgcgagcctaccgtgacctgcgcaagcccgacgcgctgatcgagagcgtgtcgctgagccgcctgccgaaggaaatcctcgaggtgccgttgctgcgcgataccctgaccgaggacttcgttttctattacgagaacaatggcgaccgccttggcctgaccggtacgttgcggcggatcatctacgagcacgacctgaccctgaaggacagcctggtcgaggaactgctcgaccaaccggcccaggtcgccctctggcgcggcgccgacggccgcctgcgcgacttcgtggtggtgctcaagcgtggcggcctggcgcgggtgctcgagccgctggcccatatcgccgccgacgaccagcagttgcgcaaggtcggcgagctggcgggaacctcggtctatcgcctgcgctacggcaacgacaaggcgatgctgttcctgtccaagggcgaccggctgttgttgctgtcgaacccacggatgctcttcgacgatggtggcgaaagcgacgacagcccgctgaacgctccggccagcgaagacctggaggcactgctcgacggcgacgaactgttccccgagcgcttcggcctgccgggccgcggcgagctgcgccagcgcattaccctcaatgccagcgtcctggccatgggctaccagcgcttcatcccgagcttcgccggggtgcgcttcgagaagggcgagcagggctggagcagctacctggcgctgaacgaggtggaacgccagccgccgctggacttcgccccggtctggcaggccatgccgatgggcgccagcgcctgcgtggcgctgccggtcacccctggcctgtacggggtgatgctggagcgtctgggggccgagcagaagatggcccaggccttctccgagcatctcagcggcgctgccggtctctgctggtacgccagttcgcggctgcattcgccgctgctggtgggccagttgagcgcgccgaccagtgccgaactcgacgacgagctgggcaagctgttcggtcgcgtgatcggcgcgaaggaagccaaggtcgagggtggcagcttcccggtggaagaccgggtggatggccagacccgccgctggacccgccaggtcagctcgaacttcggcgcctatccggccagccaggcggacaacccggacagcatcagcggccgcgcgttcttccgcatcggcatggcgcgccatggccagaccctgctgttctccctcgacgaccagttgctcggcaaggccctggacaccctcgacaaacgctatccgccgctcgccgaggtgttgccgaaggatgcgctggtaccggcctacctggcgccgcagccgctctccgaactgctgcaacgggaaaccctcgacagcctgccgcaggacatggagccggtcttccgcaatgccgccgacacctacttgatgccgcgcctgaaaaccctcgccggcaagggcagctacgcccttggcctgcctgccggaagccaggccaacgcaccgtggcaatggctgccgctggaatggcggtcgctgtga

SEQ ID NO: 325240 - DNA, 225 bp, Pseudomonas aeruginosa
atgggcgcgccgctgcacggcacctacctgatctacgtgaactactggggcaacctcaacaaccagggctacaacttccaggccggcagcaacgtacaggacgtgatcaccgcgcaggtcaacctggtgttcaacgaaaacagcgtcgacgagaagcacgagaccttcgtcgtgcccctgcgcaccatcggcgacctggtgctggtcaagacctttacctactga

SEQ ID NO: 325241 - DNA, 516 bp, Pseudomonas aeruginosa
atggatcacctggtcctgaccgtgatcgccaccgaccatcccggcctggtcgagcgcatcgcccaatgcatcgcctcccacggcggcaactggctggaaagccgcatgtcgcggatggccgggcagttcgccgggatactgcgggtggccgtgccggcggaaggctacgacgaactggtggaagggctacagggcctgtccagccacggtatccgcgtgctcctggcggaaagcgggatcgagccggtatgcaactggaagcctatccacctcgacctggtgggcaacgaccgccccggtatcgtgcgtgacatcacccggctgctggccgagcatggggtgaacctggaaagcctgtccaccgaagtgcgcccggcgccgatgagcagcgaaccgctgttccatgccgatgcgctgctggcggtgccgctgaccctgtcgctggacaccctgcgcgagcgactggaagacctggccgacgacctgatggtggaattggtgctggacgcgtcctga

SEQ ID NO: 325242 - DNA, 978 bp, Pseudomonas aeruginosa
atgtcgattaaggtgctcaagcccggccttgccacctcggtgcaggacgccggccgcgaaggccactatcacctgggtatcccgccgtccggcgcgctcgaccagtacgccctgcgcgcggccaacctgctggtgggcaacgcaccgaccgccgccgtgctggagtgcgcgctgctgggtccgcagctggagttccagcgcgacgccctggtggccgtgtgcggggcgcgcatgacgcctcgcctggagggcgcggagatgccgctggatacttccttccgggttcgcgccggccaggtactggggttcgacttcatccgtgccggcgcccgtggctatctcgccatcgacggcggcatcgcggtacccgaggtgctgggcagccgttcgacctacggtctgggggcgatcggtggcttgcagggacggcgactggcggagggcgacctgctgcccctggggcctgcctcgccctctgccgtggagggcttggcgctgccgcgctcgttgcaggtggaggtcggtggcgaggtgagcttgcgggtggttcccgggctctacgtccatcgcctgacccccgacgcggtcgagcgtttcttcgccgagacctggaccgtcggctcggaggcggaccgcaccggctaccgcttcaagggcggcacggcgctccggttcgagccgcgcgaacagccattcggcgcaggctcggacccgtccaacatcgtcgacgcctgctatcccatcggctcgatccaggtaccgggcgggctcgaacccatcgtcctgcatcgtgatgcggtgtccggtgggggatatgccacgctgggcacggtgatcagccccgacctgaaccggctggcgcagatgcaaccgaaccagaaggcgcgtttcgtcgccgtcagcctggaggaaggtctcgaggcgcgtcgccgttacaactggcaagtgcaacgactccagcacttcttcctgcgctga

SEQ ID NO: 325243 - DNA, 1782 bp, Pseudomonas aeruginosa
atggctgattacaaagctccgctgcgcgacatgcgcttcgtcctcaatgaggtgttcgaggtctcccggctctgggcgcaactgccggcgctggccgaagtggtcgacgccgagaccgccgcggcgatcctcgaagaggccggcaaggtcaccgccggtaccatcgccccgctgaaccgtccgggcgacgaggaaggctgccagtggaacgctggcgcggtgagcaccccggccggcttccccgaggcctaccggacctacgccgaaggcggctgggtcggcgtcggcggtgatccggcctacggcggcatgggtatgcccaaggtgatctcggcgcaggtcgaggaactggtcaactcggccaacctgtcgttcggcctgtatccgatgctgaccgccggcgcctgcctggcgctcaatgcccatgccagcgacgaactgaaggacaagtacctgccgaacatgtacgccggtatctgggccggttccatgtgcctgaccgagccgcatgccggcaccgacctgggtatcatccgcaccaaggctgagccgcaggccgacggctcctacaagatcagcgggaccaagatcttcatcaccggcggcgagcatgacctgaccgagaacatcatccacctggtgctggccaagctgcccgacgccccggccggttcgaagggcatctcgctgttcctggtgccgaagttcctggtcggcgacgacggcgcgctcggcgcacgcaacgcggtgcactgcggctccatcgagcacaagatggggatcaaggcctcggccacctgcgtgatgaacttcgacggcgccactggctggctggtcggcgaagtcaacaagggcctggcggcgatgttcaccatgatgaactacgagcgcctgtccatcggcatccagggcatcggctgcgccgagatgtcctaccagagcgccgtcgcctacgcccgcgagcgcctgcaaagccgcgcgccgaccggcccggtggccagggacaaggccgccgacccgatcatcgtgcaccccgacgtgcgccgcatgctgctcaccatgaaggcgctgaccgagggcggccgcgccttttccacctatgtcgggcagcagctcgacctggccaagtacgccgaggaccaggaagaacgcagccaggccgaagccctggtggccctgttgaccccggtggccaaggccttcttcaccgataccggcctggagagctgcgtgctcggccagcaggtgttcggcggccacggctacatccgcgaatggggccaggagcaactggtgcgcgacgtacgcatcgcgcagatctacgaaggcaccaacggcatccaggcgctcgacctgatgggccgcaaggtggtcgccaacggcgggctgttcctctccatcttcagccgcgaggtgcgagccttcgccgccggcgccaacgccgaactggcggagttcgtcaccccgctgctgaccgccctggacctgctggacaacctcacccagggcatcgtcgcccgcgccggcaacgacccgcgcgagatcggcgcagcctcggtggaatacctgcatctgttcggctataccgcctacgcctacctctgggcgcgcatggccgccgccgcgctgcgccagcgcgaggccgacccggcgttccacgacggcaagctggccaccgcgcgcttctacttcgcccgcatcctgccccgcgtgcactccctcgccgccgccgtcgaagccggcagcgaaagcctgtacggcctggaggcggaacagttctga

SEQ ID NO: 325244 - DNA, 867 bp, Pseudomonas aeruginosa
atgcgaaccctcaccaccctcctcggcaacagccagaaactcgacggcggcgccatgttcggcaatgccccgcgcgcgctctggtcacgctggatgcagcccgatgcggagaaccgcatcgacctcggctgccgtgccttgctggtgcgcgacggcgagcgcaacgtactggtggagaccggcatcggcgcgttcttcccgcccgccctgcgccagcgctacggcgtccaggaagagcgccacgtactgctcgacagcctcgccgcggtcggcctggacgacgccgacatcgacgtggtgctgctcacccacctgcacttcgaccacgccggcggcctgctcgccgcctgggaagaaggccagccggcgcgcctgctgttccccaacgcgcatttcgtcagcggccgccgccactggcagcgcgcgcgccagccgcacccgcgcgaccgcgcctcgttcgtgccggaactgctcgacctgctgcaggccagcggacgcctggagctgctcgacgacggcgagcgctcggcgcatctgggcgagggctggcgtttccatttcagcgaaggccataccccgggccagatgctcccggagatcgccatgcccgacggcccggtggtattcagcggcgacctgatccccggcgcaccctgggtacacctgccgctgaccatgggctacgaccgcttcccggaaggcctgatcgaggaaaaggaacgcctgctggacagcctcatcgcccgcaacggccgactggtcttcacccatgatccgtgcgtcgccatgggccgggtgcgacgcgacgaacaggagcgctacagcctctacgacaccctcgagcgggtcgagaacctcgaggcctga

SEQ ID NO: 325245 - DNA, 1041 bp, Pseudomonas aeruginosa
atgggacaggacaagttgaaggtcgccgttctcttcggcggcagcagtgaggaacgggacgtctccatcgccagcggcgcgcaggtgatccaggcgttgcgcagcgccggccaccaggtgctggcggtggataccgccagcggcctgctcggcgcggaggaagagcgccgcctgctggcgagcaaggtcaaggaggtcccgccggactccgactcgctggcgatcatccgcagcggcaagcagagcctgctgagcgccggcgaactggctggggtcgacgtgttcttcctcgccctgcacggcggcaccggcgaggacggcaccctgcaggcgctgctggatgccggcggtttcgcctataccggcagcggccacctggccagcgccatggcgatggacaaggacgtggccaagcgcctgttcctcgccgccggggtggagaccgccagttggctgatggcgccggcctcggaagaggcggtgcgcgagcaactgggcttccccctggtggtcaagccgaacagccagggctccaccgtggggctgtccatcgtgcattcccaggccgaattgcagccggctatcgagctggccgggcgctatggcgacgaggtgatgctggagcgcttcgtcgccggccgcgaggtcaccgtcggggtgctcgacgaccaggcgctgccggtgggcgagattctcctcggcggccaggaggtcttcgactacgagcacaagtaccaggccggcgcggtgcgcgaggtgtttcccgccgacctgccgccggcgatcgccgccgaggcccagcgtctggcgctgaaggtacaccgggcgctgaagctgagcggctacagccgcaccgacttccgcctcgacgaacagggccggctctggtgcctggaggtcaataccctgccgggcatgaccgccaccagcctgctgccgcaggccgcggcggcggccgggatcggtttcgccgaactctgcgagcggatctgccggctcggcatcgagcgctgcaagggcgcgcgcaaggcgcgttcctga

SEQ ID NO: 325246 - DNA, 1056 bp, Pseudomonas aeruginosa
atgactgaccgcttcacgcgcctgctcggcatccagcagccgatcatccaggcacccatgctcggcgtctccacgccggcgctggccgccgccgtatcgaacgccggcgggctcggttcgatcgccatcaccggtagcgccgccgagaaaggccgggcgctgatccgcgaggtgcgcgggctgaccgacaagccattcaacgtcaacctgttctgccaccgcccggggcaggccgacccggcccgcgagcgcgcctggctggactacctgaagccgctgttcgccgagttcggcgccgagccgccggcgcgcctgaacaacatctacctgagcttcctcgaagacccgaccctgctgccgatgctgctggaagagcggccggcggcggtcagcttccatttcggcgcgccgccccgcgaccaggttcgcgcgttgcaggcggcgggcatccgcgtactggtcagtgccaccacgccggaggaagcggctctggtggaggccgccggcgccgatgcggtggtcgcccagggcatcgaggccggtggccatcgcggggtgttcgagccggagcgcggcgacgccgccatcggcaccctggcgctggtccgcctgctggcggcgcgcggttcgctaccggtggtcgctgccggcgggatcatggacggacggggcatccgcgccgccctggagctgggcgcgagcgccgtgcagatgggcaccgccttcgtcctctgtccggagtcctcggccaacgccgcctaccgcgaggcgctgaaggggccgcgcgcggcgcgcaccgcgctgaccgtgaccatgtccgggcgcagcgcccgcggcctgcccaaccggatgttcttcgatgccgccgcgcctggagtgccgcccttgccggactatccgttcgtctacgacgcgaccaaagcgttgcagaccgccgctctgactcgcggcaaccatgatttcgccgcccagtgggccggccagggcgcggcgctggcgcgggagctgccggccgccgaactgctgcgcacgctggtcgaggaactgcgcggctga

SEQ ID NO: 325247 - DNA, 855 bp, Pseudomonas aeruginosa
atggacctttcctccctcgaaatcttccgcgcggtcgcccacgaagccagcgtcacccgcgccgcccagcagttgcagcgagcgcagtcgaacgtcaccacgcggatccgccagctcgaggaggacctgggcgtcgaactgttcctgcgcgacggcaagcgcatgagcctgaccgaacgcggcagcgaattcctcgcctatgccgagcagttgctggctctcgccgacgaggcgcgccagtcgatgcatcccgccgagcccggcgggcgcctgcgcctgggcagcatggaaagcaccgcggccagccgcctgccggcgctgctggcgagctatcacaaggcctgtccgcgggtcgccctggaagtctccaccggcaccagtcgcgcgttgttcgatggggtgcgggcgcggcgcctggattgcgcgctggtggccgccggcccgggctgggccggcgaactcgatggcagcggcctgcgcggcgagccgctgttccgcgaggaactgctgatgatcctgccggccgaacacccgccggtccacgacgtcgccgaggtgcgcctgcgcaccctggccggcttcgcccgtggctgcacctaccggcaactggccgaggacagcctgggcacgccgctgacggtgcaggaagtcggctcctaccatgcgatcctcgcctgcgtcgccgccggcgcctgtgtcggcgtgctgccgcgctcggtgctgcaactgctcggcacaccgccgctgcgcagcctgccccttgccgaagtagacacctggctggtctggcgcgaaggctacgcgaccgccgccttcgaacgctggcgcggcgtgctgggccaggccggcggctga

SEQ ID NO: 325248 - DNA, 885 bp, Pseudomonas aeruginosa
gtggcgcgcgcccaggtgcgcagttggcgcgacaccctggagctgacccgcagcagcctgcaactgggcagcggcctgccggaggacgtggagaacgcccaggccaacctgctgcgcagcgaagcggcgattccgccactgacgaccgcgctggagagcgcccgctatcgcctcgacgtgctgcgcggcgaggcaccgggcagcggcgcgccgatcctcgacggtggcggcgccgcgccattggcgaagaacctgccgctgggcgacgtcgaccgcctgatcctccagcgccccgacgtagttagcgccgagcggcaactggcagcgagcaccgaagacgtcggcgcggccaccgccgaactctatccgcgcctcgacctgggcggcttcatcggtttcttcgccctgcgcagcggcgacctcggcagcgcctcgcgcgccttcgaactggcgcccagcgtcagttggccggcgttccgcctgggcaacgtgcgggcccgcctgcgcgccgtcgaggcgcagtccgacgccgcgctggcgcgctaccagcgctccctgctgctggcccaggaggacgtcggcaacgcgctcaaccaactggccgaacaccagcgtcggctggtcgccctgttccagtccgcgacccatggcgcgaacgccctggagatcgccaacgaacgctaccgcgccggcgccggcagctacctggcggtgctggagaaccagcgcgcgctgtaccagatccgcgaggaactggcgcaggcggagaccgcctcgttcgtcaacgtcatcgccctctacaaggcgctcggctggggcagcggcgacctggcgccgggcgccggccaactggccgccggcgaaaccgccggggccagccgttga

SEQ ID NO: 325249 - DNA, 489 bp, Pseudomonas aeruginosa
atgcctgacacgacaaatccaatcggtttcaccgatgccaacgaacttcgcgaaaagaatcgcgccaccgtcgagaagtacatgaataccaaaggccaggaccgcctgcgccgccatgaacttttcgtcgaggatggctgtggcggtttatggaccaccgataccggctcgcccatcgtcattcgtggcaaggacaagctggccgagcacgcggtgtggtcgctgaaatgcttcccggattgggagtggtacaacatcaaggtcttcgagaccgacgatcccaaccacttctgggtcgagtgcgacggccacggcaagatcctcttccccgggtatcccgagggttactacgagaaccacttcctgcattccttcgagctggacgacggcaagatcaagcgcaaccgcgaattcatgaacgtcttccagcaattgcgcgccctgagcattccggtcccgcagatcaaacgcgaaggcattcccacttga

SEQ ID NO: 325250 - DNA, 633 bp, Pseudomonas aeruginosa
atgctggtctgcgcagcattcagcggaggcgccggcgcgagcgacgccggagcattgctcgaagccgcgcgtcgcggcgataccgcgcaggtcgccagcctgctcgaacgcaaggtcgaggtcgacgcgcccagcgccgacggtagcaccccgctgctgctggccaccgccaacgaccacctggcggtggcgcgccagttgatcgaggccggcgccgacgtcaaccggcagaacagccggctcgacagcccgtatctgctggccggcgccgagggccgcctggaaatcctgcgcctgaccctgctccacggcgccgacctgaagagtaccaaccgctatggcggcaccgcgctgatcccggcctgcgaacgcggccatgtggaagtggtgaagacgctgctgcaagccggggtcgatcccaaccatgtcaacaagctcggctggaccgggctgctcgaggcgatcctgctgagtgacggcggtccgcgccaccaggagatcgtgcgcctgctgatcgacgccggcgccgacgtcaacctggccgatgccgacggcgtcagcccgctggcccacgcccgccagcgcggccagggcgggatcgagcggctgctgctggccgccggcgcccaatga

SEQ ID NO: 325251 - DNA, 657 bp, Pseudomonas aeruginosa
atggagcttcgtcacctgcgctacttccaggcgctggcccggaccctcaacttcacccgcgccgccgagcaactgcacatcgcccagccaccgctgagccggcagatccagcaactcgaggaaatgctcggggtggccctgctggagcgcggccggccgctgcgcctgaccgaagccgggcgcttcttccacgaacagagcgcgacgctcctggaccaactggagagcatctgcgacagcacccggcggatcggccagggccagcgccagtggttcggcatcggcttcgtgccctcggcgctgtatggcgtgctgccggagctgatccgccacctgcgcggcgacccggagctggagctgggcctgctggagatgaccaccctgcaacaggtcgaggcgctgaagagcacccacggcctgagcctgcgcgtgacgcaatgggccaacgagatgcagaccgccatcggcctggtcgccgccggactcggcgcgaccctggtgccggcctcggtgcagttgcagcaccgcgacgacgtcgcctaccaggccctggccgacgcctccctgacctcgccgatcatcgtcagccggcgccagggcgacggctccccgcacctgcggcgctgcctggcgctgatcggccgcgaggacgcctga

SEQ ID NO: 325252 - DNA, 804 bp, Pseudomonas aeruginosa
atgctcgtgcaggtagccgcgccggccgtcccagtcggcgtccgcctcgctgagcaccgggacgaagcggaagccgggaagccgctcggcgtagccggcgatccgctgcaattcgcagagatcggcggcgcggcgtaccccgtagtagagatgcaccggccgctcgcagccgcgctcggccagttcgtcgagcatgccgaggaacgccgacaggccggtgccgccggccaccagcagcaacgggcgctccacctgacgcaggtagaaggtgcccagcggcgcctcgaagcggatctcgtcgccgacccggcacccttggcgcaggtagtcgctcatggcgccgcccgggagcaggcggatgaggaactgcaggtggttctgcggattcggccggttggcgaaggagtaggcgcgccggcagtcgctgccgggtacttgcaggcgcgcgtactggccgggcaggaagtccaactggcggcccgcggcgccggcgtcgaggcggagcagcgctgtgtcctcggagagcaggcgcagttcgcgcaccacgccgctgtgcgcctgggccgcggcggcgtggcagagggtcgaggcgaagtcgaagtagaaggccgcgtcggagcgcacccgggtctggcaggcgagcaccttgcgctgctccaggtcggcggcggagagggtgtcctcgtcggcgtagtccaggctgtagctgcccgcctcgcagcggcccatgcaggtgccgcagaccccttcgcggcagtccagcggcaggttgatgccgtggcgcagggcggcgtcgaggagtag

SEQ ID NO: 325253 - DNA, 1014 bp, Pseudomonas aeruginosa
atgaaccatcggatcgcactcaacttcgaagacggggtgacccgcttcatccatgccgcgcccggcgagaccgtggccgacgcggcctaccgccagggcatcaacatccccctggactgccgcgacggcgcctgcggcacctgcaagtgcctggccgaggccgggcgctatgcgctgggccaggactacatcgacgatgccctcagcgccgaggaagccgcccgcggctacgtgctgacctgccagatgcgcgccgaaagcgactgcgtgctgcgcgtgccggcgtcctcgaccctgtgcaggaccggccaggcgcgctacgaggcgcgcatcagcgaagtccggcaactgtcgccgagcaccatcggcctgtcgctgcgcggcgaggcgctggccagcctggcgttcctgcccgggcagtacgtcaacctccaggtgcccggcagcgagcagcgccgcgcctactccttcagctcgctggcgaaggacggcgaggtcagcttcctgatccgcaacgtccccggcgggctgatgagcggcttcctcagtggcacggccagggccggcgacagcctggcgatggacggcccgctgggcagtttctacctgcgcgagattcaccggccactgctgatgctggccggcggcaccggcctggcgccgttcaccgcgatgctcgaacggatcgccgagcagggcagcgcgcacccgctgcacctggtctacggggtgacccacgacgtcgacctggtcgggctcgagcgcctggaggcgttcgccgaacggattcccggcttcacctggagcgcctgcgtggccagcgccgacagcgactatccgcgcaagggctacgtgaccgagcacatcgccgcgcagcacctgcacgagggcgacgtcgacatctacctgtgcgggccgccgccgatggtcgaggcggtcgagcgctacctgcgcgagcagggcgtgcgcccggcgaatttctactacgaaaagttcgccgccagcgcggcctga

SEQ ID NO: 325254 - DNA, 282 bp, Pseudomonas aeruginosa
atgtcgccgcccttggtggcgcgcgccgagttgatgtcgatggaaaccagggcctcggtcgggtcgatgacgatggagccgccggacggcagcttcacttcgcgctggaaagcggtctcgatctggctctcgatctggaagcgattgaacagcggaacgctgtcctggtacagcttcaccttgctggcgtactgcggcatcacctggcggatgaagttcagggcttcttcctgggcgtcgatgctgtcgatcagcacttcgccgatgtcctggcgcaggtag

SEQ ID NO: 325255 - DNA, 132 bp, Pseudomonas aeruginosa
atgccgcacacccgccatccgcacctgcattccagcgcctcgcgccctggcctgtcgttgcgcgcgcgtgcgccgcaggcaccccgtgccgcgtatttcttcgggtattggtttagccactccggcgcctga

SEQ ID NO: 325256 - DNA, 942 bp, Pseudomonas aeruginosa
atgagcgctaccgtgcattaccccctgtccgccgtggtcgccgccgacgaactgaagctggcgctgtgcctggccgcggtcgatccggcgatcggcggggtactgatcgaggggccgcgcggaatggccaagtcgaccctggcgcggggcgtcgccgaactgctgccggcgggcgagttcgttaccctgccgctgggcgccagcgaggagcgcatcgtcggcagcctcgacctggacgccgccctcggcgaaggtcgcgcgcggttttccccgggcgtgctggccaaggccgacggcggcgtgctctacgtcgacgaggtgaacctgctaccggaccacctggtggatttgttgctcgacgtcgccgccagcggcgtcaacctggtcgagcgcgatggcatttcccaccggcatccggcgcgtttcgtgctgatcggcacgatgaacccggaagagggcgaactgcgcccgcaactgctcgaccgtttcggcctcaacgtgcgcctcgacacccagccgccgccggccgagcgggcagagatcatccgtcgccggctggccttcgatgccgacccgcaggccttcgtcgaacgttgggaaggccagcaggacaacctgcgccgccgttgcgccgaggcacgccgggatggcctgcgcgccgacctggtctggctgcgcgcggcgcgcgcccatgcggcctggcgcggcggcgagcggatcgaggcggaggacatcgatgcggtggaacatttcgccctgctgcatcgccgtcgccagtcgagcccgccgccatcggcggccaatccaccgccaccgcccgcggcccctgccgcgctcccggagcgcgccggcgacggcgaagggcagtggggcgaattgccggctcggccggtggccatggggaccgcccgcgagctgccgcgctggccaaaaaagccctga

SEQ ID NO: 325257 - DNA, 555 bp, Pseudomonas aeruginosa
  misc_feature (433)..(442): n is a, c, g, or t
atgggtgcggatgccaggagcagacccggagccctgcgcggcggtcttggcggcgccctgagccagggtgcggagggcgccatccaatggttgccgaccctgctgcgcggacgtccccgacagcgccgcgacctgcttcgccagccgcgcagccggcgcccgggcgaactctggctggtgatcgtcgatgcctccgccagcacccgccggtacggcgctctggcccaggccaaggggttgttggcgacgctgttcgaggaggcctatcggcagcgcgtccgcctggccgtgctgcacgccaccgggcagcaggcgcaatggctctggcaggggcagaaggcttcgcgggagttgcaggactggctacgccagctgggcgccggcggcggtacgccgctgctcgacgccctgcaccaggctgctggctggctgnnnnnnnnnnggcgcgccgacagcggcagaaacccgccgagcatcagcgtctgctggtgcttaccgacggccgcctgcgcgactggccggcgctgccggaggctgcctgcccgagtctgctga

SEQ ID NO: 325258 - DNA, 1140 bp, Pseudomonas aeruginosa
atgtcgccgatttcagtcgttatcgccggttacgcccgttcgccgttccacttcgccaggaaaggcgcgctggtcgatatccgcccggatgacctggccgccgcggtgctcaagggcctggtggagaaactcgatctcgaccctgttcagctggaggacgtggtcatgggctgcgcctatccggaggcggaacagggcatgaacatcgcgcgcatcgccagtttccgcgccggcttcccgcagagcctcggcggcgcgaccctcaaccgtttctgcggttcgtccatgagcgctgtccactacgccgccgggcaagtcctgctgggtgccggagaagccttcatcgccgccggggtggagtcgatgacccgggtgccgatgggcggcttcaacctgtcgcccaatcccgcgttgctgcaggactatccggcggtatacatgagcatggggcagaccgccgagaatgtcgccgagcgctacgccgtcagccgcgtcgagcaggaagagatggccgtacgctcccacgccaaggcagtcgccgcgcgcgaggccggcttgctgcgcgaggagatcgtcgccatcgacacccctgccggccgggtcgccgaggatggctgcatccgcccgggtaccaacctggagagcctagcccaactgaagccggcgttcggcggcagcgtcaccgccgccacctcgtcgccgctcaccgatggcagcgccgcgctgctggtctgtagcgaggaattcgcgcgccgccacgggctggcgatcctggcgcggatcaaggcggtggcggtggccggttgtgcgccggagatcatgggcatgggtccggtgcaggcgacgcgcaaggttctgcaacgggccgggctgggcatcgccgacatcgacctggtggagatcaacgaggccttcgccagccaatccatcgcctgcatccgtgaactggggctggacatggacaggatcaacctggatggcggcgccctggccatcggccatccgctgggcgccaccggcgcgcggatcaccggcaaggccgccgcgttgctgcggcgcaccggcgggcgctatgccatcgccacccagtgcatcgccggcggccagggcgtggcgaccctgctggaagcggtggagtga

SEQ ID NO: 325259 - DNA, 1419 bp, Pseudomonas aeruginosa
atggatggtcaacatctgcaccagggcgagctgaagcgtggcctgaagaatcgccacatccagttgatcgcgctgggcggggcgatcggcaccgggctgttcctcggctcggcgggcgtcatcaagacggccggcccgtcgatgatcctcggttacgccattggcggcttcatcgccttcctgatcatgcgccagctcggcgagatgatcgtcgaggagccggttgccggctccttcagccacttcgcgcacaagtactggggcggcttcgccggcttcctctccggctggaactgttgggtgctgtacatcctggtcgggatgtcggaactgaccgcggtcggcaagtacatccactactggtggccggaggtgccgacctgggccacggcggcgttgttcttcgtcgtcgtcaacgcgatcaacctggccaacgtcaaggccttcggcgaagccgagttctggttcgcgatcatcaaggtggtggcgatcatcggcatgatcctgctcggctgctacctgctgttcagcggcagcggcggtccgcaggcttcggtgagcaacctctgggcacacggcggtttcttccccaacggagtgagcggcctggtgatggccatggcgatcatcatgttctccttcggtggcctggaaatgctcggcttcaccgcggccgaggcggacaagccgaggacggtgatcccgaaggcgatcaaccaggtgatctatcgcatcctgatcttctacatcggcgccctggtcgtgctgctttcgctgacgccctgggacagcctgctgcagaccctcaacgcttccggcgatgcctacagcggcagcccgttcgtgcagatcttctcgatgatcggcagcggcaccgccgcgcacctgctgaacttcgtggtgctcaccgccgcactgtcggtgtacaacagcggcacctattgcaacggccgcatgcttctcggcctggccgagcagggcgatgccccgcgcgcgctggccagggtcgacaagcgcggcgtaccggtacgcgccctggtggtatcggcgctggtgaccttcctcgcggtggtggtgaactatgtgatcccgcaccaggcgctggagctgctgatgtcgctggtggtggcggcgctggtgatcaactgggcgatgatcagcatggcgcacctgaagttccgcgcgcagatggaccgccagggcacccgcacgcacttccgcgcgttctggtatccgtacggcaactacctgtgcatggccttcgtggtgttcatcctcggcgtcatgttgctgatccccggcatccaggtctcggtctatgccatcccggtctggctgctggtgatgtgggcctgctaccgactcaagggagccccgcggccgatgccgggcctgcgggtgaagccggtcaccgagtga

SEQ ID NO: 325260 - DNA, 384 bp, Pseudomonas aeruginosa; identical to SEQ ID NO: 322487

SEQ ID NO: 325261 - DNA, 414 bp, Pseudomonas aeruginosa
atgctgatcatctccaatgccgtccacctgcccgaccatgagatcgagctgaatgccattcgcgcccagggcgccggcgggcagaacgtcaacaaggtctccagcgcggtgcacctgcgcttcgacatccaggcctcgtcgttgccgccgttctacaaggagcgtctgctggcactgaacgaccagcgcatcagcggcgacggcgtggtggtgatcaaggcccagcagtaccggacccaggagcagaaccgcgaggatgccctggagcgcctggcggagttgatccgcagcgtggccaaggtgcagaaggcgcggcgcccgaccaagcctacgcgcggctcgcagaagcgccggctggacggcaaggccaagcgcggcgcggtgaaggccgggcgcggcaaggtggatttctga

SEQ ID NO: 325262 - DNA, 933 bp, Pseudomonas aeruginosa
gtgagaaaccgtctcctgtcactggtcaccctgttcctgtccctcagcgttgccaccgcggtatccgcctccccgccgcccaaggccgggctgccgctgcaacaggagctggcgtcgggcagcgcgctggttaccgaccagaacaccggcaaggtgctctactcgcgcaaccccgacctggtggtgccgatcgcctcgatcaccaagctgatgaccgccatggtcgtgctcgactcgaaactgccgctggacgaggtactgccgatcgccatcagcgagaccagcgaaatgcgcggggtgttttcccgagtgcgggtcggcagccagatcagccgccgggacatgctcctgctcgccctgatgtcctcggagaaccgcgccgccgccagcctcgcgcagaactatccgggcggcaagaacgccttcgtcaaggcgatgaacgccaaggcccacgccctcggaatgaagaacacccgctacgtcgagccgaccgggctgtcgctgcacaacgtctccaccgctcgcgacctcacccgcctgctggtggccagccggcaatacccgctgctcagccagtggagcaccactccggagaagaccgtggccttccgccaccccaactacaccctgggcttccgcaataccaaccacctgatcaacaacaagacctggaacatccagttgaccaagaccggcttcaccaacgaagcaggtcactgcctggtgatgcgcaccacgatcaaccgcagcccggtcaatctggtggtgctggacgccttcggcaagtacacccacttcgccgacgccacccgcctgcgacgctggctggaaaccggccaggtcactgcgatcccggccgcggccaaggcctatcgcctgcaacgcgaccgcgagcgcggcctcggccagccggtggcccaggccgtacgctga

SEQ ID NO: 325263 - DNA, 885 bp, Pseudomonas aeruginosa
atgcgctgttcgccgcgcgcctggcggaactggcgctcggcgccgcctggccgcggcatctggctgagcgacccgacctggccgatccacgagacgctgttcgccgccgccggcctgaaggtttcccactacccctacgtcagcgccgacaaccgcctggatgtcgaggcgatgcttgctggcctggagcgcattccccagggagacgtggtgctgctgcatgcctgctgccacaacccgaccggtttcgacctgagccacgacgactggcgcagggtgctcgacgtggtgcgtcgtcgcgagctgctgccgctgatcgacttcgcctaccagggcttcggcgacggtctcgaggaagacgcctgggcggtacgcctgttcgccggcgaactgccggaggtgctggtcaccagttcctgctcgaagaacttcggcctgtaccgcgaccgcgtcggcgcgctgatcgtctgcgcgcagaacgccgagaagctcaccgacgtgcgtagccaactggccttcctcgcccgcaacctctggtcgaccccgccggcgcatggcgccgaggtggtcgcggcgatcctcggcgacagcgagttgaagggactctggcaggaagaggtcgaaggcatgcgctcgcgcatcgccagcctgcgcatcggcctggtcgaagccctggcgccgcacggcctggccgagcgcttcgcccatgtcggcgcgcaacgcgggatgttttcctataccggactgagcccgcagcaggtcgctcggctgcgcgacgagcacgccgtttacctggtctccagcggccgggccaacgtcgccggtctcgacgcgcgccgcctcgaccgcctggcgcaagccatcgcccaggtctgcgcggactga

SEQ ID NO: 325264 - DNA, 909 bp, Pseudomonas aeruginosa
atggattcgctgaaaggcatggcgatcttcgccactgtggtggacaagggctcgatggcagccgcggcccagagcctgggcatgaccccttcggcagtcagccagcagatccgcaagctggagagccgcgcccaggtcactttgctgcatcgcaccacccgccggctgaccctgaccgaggccggcgaggcgttctatcgcagttgcgcgcagatgctggcgatcgccgaggaagccgagcggcggcttggcgaatggcgcgatgcgccggtgggcgagttgcgcctggcggcgccggtggggttctccggcacgctgatcacccaggcgctgaaaccgttgctggagaaccaccgccagttgcgcctgcaactgttcttccaggacgagcgcatcgatctggtcgccgagcgcatcgacctggcgatccgcgtcggcaatctcgccgactccagcctggtggcgcgccacctcggcgactggagcagcgtgctctgcgcggcgccggcctatttgcgccaacgggcgcccatcaaccgtccggagcagttgaccgaggtcgactggatttccctgaacacctcgaaccacctcaaccacctgacgctcagcgggccgggcggggaagtctgcaaactgcgcctggagccacgggtggccgccaacgggatgctcgcggtgcgtcagttcaccctcgacggactcggcgtgtcctaccagccgctgccggaggtgcgcgacgcgctgaacgacgggcgcctgcaacagctattgccggagtggaggattcccgggctcggcatctatgcggtgacgccacggcgcgaggcccagccggccaaggtgaaggtcgccatcgaggcgctgcggcgagcgttcgccacggacggggatgagcgctggagctga

SEQ ID NO: 325265 - DNA, 453 bp, Pseudomonas aeruginosa
  misc_feature (439)..(448): n is a, c, g, or t
atgttttcttcgtccaagctggtcaacgcggttgcccagcgcctgctcgacaccatcgagcagggtcgctgggtcgccggccagatgttgcccggccagcgcgagctggctgagcagatggaaatcagccggccgagcctgcgcgaggcgatcatggtcctggagaccctgggcgtggtccgttcgctgccgggcaagggcgtgatggtcctcgaacgcagcgagccgctgcgcgaggtcgcggcgcccggcgaggcgaccatggaagacgtcctgcaactgcgctatgcgctggagccgttcatcgtcggcatcgtcgcgcagagcgccggggcggcggagatcagcgaactgcggctgttgctgctggacctgcgcgaagcggtcgaggatggcgacccgcaggctctggtggaggcctacacggccttccaccggnnnnnnnnnnggtga

SEQ ID NO: 325266 - DNA, 921 bp, Pseudomonas aeruginosa
gtgtcgttcgagaaaaatcatttcagctatctgcatggcgtggtgcagagccgcacgacgatccgcgcggtggcccagatcgatcagttgaccgaacagggagcggccaacgccaccctgatcaagtggaatctctcgtcgccgccgccagcggcgttcaacctggcttggtactgcacgcgcatggcgatccagaaggttccgcgtggtggcggcatcgagctgatctacatggggccggatgggcacatgggctacggcaccgccaacggcgatagcgaggcgccgatctggccggccggtgaagggccggatgtgtacggcgtcctgcgcgacctgcagggcatcggcgatggcgtctatgcggtgggcatgggccgtcaggtctaccgtcgcgacccgtcgggcgcgtggcagcgaaaggatgcggggacgctgcaggaccgcgagctgatggatgtcgtcggcttcaacgctatccatggcctcgacgaagcggacctgtatgccgtgggctacgccggtgaggtgtggcgttgcggcaatggacgctgggagcatttggacagcccaaccaatgtaatcctcaatgcggtgcacatgcttcccgaccgccgcgtggtggtggcgggcaagaacggctttctgatgatcggctcggcgagtgcctggaaggtcgtcgagaccgggctggacgcgcagatatgggacgtccagtacttcaacgacgacatctacctggctaccagcaatgcgctttatcggctcgatgcacaccatgtcccgcagcaggtggacatgcgcctctgcgggccggtgacctgtggccaactgcatgccggcgacggcattctcctgtccaccggtcgcaagcaccagtgttggagcgacgacgggagcgtctggcatgacctcacctga

SEQ ID NO: 325267 - DNA, 1092 bp, Pseudomonas aeruginosa
atggccaacgaggtgtacgccaacaacatggagatctcctgcaaggcggcgagcggcaagtccatcgcggccttcccggatgtctgcttcaccccgccgcaggcgccgccgacgccgttgggggtaccgatcccctaccccaataccggcctgtccaaggacaccaccaaaggcacccggaccattcgcatcacccgcaaggaggtgatgctgaagaacaagagctactacaagaccagctacggcgacgagccggggcgggcgccgaagaagggcatcgtcaccagcaaaatcaagggcaaggtgtacttcacctcctggtcgatgaacgtcaagttcgaaagcaagaacgtggttcgccacctcgacctgaccacccacaaccacgcgtcctttcccggcaatacgccaccctggatctattccgacaaacagaccatggcgctgcacaaggattgcgaggaggacgtgcagaaggagaagacggcttgcgccggcaagaagaccaaggcggagaagtgcgccgacgatggctgcaagaaagccaggaaatgcctgttggtttcctacaaccagggcaagagaaagagcggcatcggctgctgtcccggcgaacagccgcaccacctgatcgaggcgcattgcttctacgaggtgggcaagcgcggcgagggcgacagcatgttcttcaacgcgcctgcgggcaagcagccgtacaaggacaccgagtcgccctgcgtgtgcgccgaagggccccggcatgcgggcgaacacggccagtaccatgccttccagcaggctctggaggccaagcaccacgagaagtccggcggctggacctacgcggatgcgcgcaacgccggggtcaaggcgaacaaggcggtgaacgaacagtgcaacgacaagtgcaccgcggctcagttggacagttatcacaaggaacgctgtggggtgaccgacagcacgccgctcaggaccgacccgcaggcggggacacgctcggtgggtacgctggacgccaagcaaaccgctgccctgcaggcggaaatcggggcgatgagcggcatgtcggcggccggcggttcactgtaa

SEQ ID NO: 325268 - DNA, 1581 bp, Pseudomonas aeruginosa
gtgggatgcggtggcgacctgatcgatctcgcggaactgctgctgcatgccggcgctggtctggctggaaatcgccgccgactggtcggcggtactgcgcgcatcgcgcaccgagaccttcacgtcgcggatgatcggctgcagcttgtcgaggaaacggttgaaccaaccggccagttcgcccagctcgtcgcgcccggtgtgcggcagacgctgggtcaggtcgccttcgccgctggcgatgtcgcgcagcatgtgggcgacgccgaggatcggccgggtcacgccgcgggcgctcagccacagcaccagcaggccgagcaccgcggcgccgaggccgaggcccagttcgacccaggtgccttcgcggcgcatgtcgtccagttgccgctccagcgccagggccgggccgagcagggcgctcttcggcacttcgaggagcacgccccagggcttggcgccgggaatcggctgcaacggttgcagcaccttgaggtcgtcgttctcgttgaacaattggctcttgccggcggccagcagttgcaggagttcgtcggcgtgctgcggatccgccttggccaggttcttgccgagcaggccagcgtcgcggctgttgccggcgaacagcccggccgggctgaggatgccgacctggccaacgccgtcgtagagttcgcggttgccctgttcgctgagcgcctgcagattgctcaggttgatgtccaggcccatcacgccgatcaccttgccatccagttcgagggggaaggcgatgctggtcatcagcagttggcgctcgccgaccttgtcgaagtagggatcgagcacgcagggttgagcgctttccttcgggcaggtgtaccaggcgttgtaggccgcgccgctgggcccgctgctggtgtcggcgagttcggactcgaccatcgactcggactccagctgtcccggcgtggcctgcgcccagtacagggagaagcgtcccttgtcgttgctgcccagggcgggctggtcgacgaacagttcgtccttgccgtccagtgcgttgggttcgaagaccacgtacaggccgagcacctcgggattggcggcgagcgcggtacgcacctggcgggtcaggtcttcgcgcaggtcgtaggcgtcgaggaagcgcttctgcgcctggtcgcggaggaacaggatctgccgggagaaacccttgccgtactggaaggcatccatgaaatagcgctggatgcgcaacgcctgcaattccccgcgggcttccaggcgcaggcgcgccgattcgtcgagcatctgcgtactggcgcttttcaccagtacgctgctgtgctgcatgcggtagaccgaaaggccgaccagcaaggcgaccacgccgagcaggcagaggcctgccagcagggtgatcttccattggatggacaggcggcgaaggaacatgggaggggtccttgtacgaagaaactgcgggggcccaaggcttatcggcagggctcgcccattcttgacgacggtgcgttcgctggcgccggattgccgtcgtgcggcgaatcgcacgcaagaaccgtgcacaacggtttatag

SEQ ID NO: 325269 - DNA, 810 bp, Pseudomonas aeruginosa
atgcccaccttccacgatatcgacgtcctgcgacacaacagcgccagttgggacgcccaggccgcccgtgactgcgaatggtcgcgaccggtcagcgccgaagaggtcgccgccgcacgccgcggcgactgggcggtgaagctaaccccgggcgcgttacccgctcactggctgggcgacgtacgcggccgcgagatcctctgcctggcctcggccggcggccagcaggcgccgatccttgccgccgccggcgcacgggtcacgctgttcgacgcctcggcgggacagctggacaaggaccgccaggtcgccgcccgcgaccgcctcgaactggcctgcgtgcagggcgacatgcgcgacctctcgaccttcgccgatgcctccttcgacctggtcttcaatcccatctccaatctctacgtcgacgatgtcctgccggtctggcgcgaatgcgcgcgggtgctgcggccgggcggcaagctgctggcgagcttctacaacccggcgctgttcatcgaggaccgctcgccggaactggcagagcagggcctgatccggccgcgacatcgcctgccctactccgacctggaaagcctctccgccgaagccctcgcggcgaagcgcgagaaaggcgaagccctggtgttcggccatagcctgacccagcaaatcgccggccagctcgccgccggcctgctgctgcaggatttctacgaagactggcaaccgcacccgcgcttcgtcatcgaccgcttcatgccgaccttcctcgccacctgcgcgctcaagccgaggtccgccgccggttga

SEQ ID NO: 325270 - DNA, 663 bp, Pseudomonas aeruginosa
ttgctgaagctgcccgacacactcgctttcgaggacgcggcggcgctgctgttcaagggcatcaccgcgcactacctgctgcacgccacctaccccgtcgggcccggcacacgcatcctgctgtacggcgcggcgggcgccgtcggccagttgatggcggcctgggcccggcacctgggcgcctgggtgatcggcgtggtgtcgaaggcggaaagcgtcgagcgggccagggctgccggctgcgacgaggtgctggtgttcgacgcggccagtctcgccgcccaggtcgccgagctgaccgccgggcgcaaggtcgatgtggtctacgaccccatcggtcgcgctaccttcgaggcgtccctggacagcttgcgtccgcgcggcctgctggtgtccttcggcgctacctccggcgtgccgccagccgtcgaagtcgccaccctcaacgccaagggttcgctgttcctcacccgtccctcgctcgccgcccacaccgccaacccggaagaataccggctacgcgcgcaggctgtgctgcgcgcccatgcagacggtgtcatccagccccgggtctggcggcgctacccgctggccgaggcggccgtggcgcataccgatctgctggagggacgctcgcaaggcgcgctggtactcttgccctga

SEQ ID NO: 325271 - DNA, 234 bp, Pseudomonas aeruginosa
atggcaattgaaaagggcgaagcgttcgccaggcgcgatatctacatcgactacgacttcgaagacgtcacctaccgctgggaccatcggcagggcacgatccacgtgcgcttctacggcgaagccgaatcccccgagccggttgagcacgacaaccgcctgttcaacgatgcgctgcgtttcggccgggaaatcacccgcgaggagtacgagacgggctttcccaagggctga

SEQ ID NO: 325272 - DNA, 285 bp, Pseudomonas aeruginosa
atgtcccccgtgaactatgtcgaacgcgccctggcgctggtcgccgagcggctggcccggcatccgcaatgcgggatgctgctctccgtggaaaagcagttgctgtacctgaaagccgtgctgctcgaccgcagcctggaccgttccgcgttgcaccggctgagcttcggcggcatcgccgggaaagagttcgaggagaccgacccggaactcgccagggccctcaaggacgcattctacgtcggcatacgcactggccgcggcctgaaggtcgacctaccctga

SEQ ID NO: 325273 - DNA, 789 bp, Pseudomonas aeruginosa
atgaaactgcttaagacctcgacgcttcttctctgcatgaccgcctctggctgcagctatttccagacccaggatgcttcctcgcagccagccaaggctccggccgagcaggcttccagccattcatggtggccgttcggcaaggacgaaggcggtcgggacgtagccgccaaggctgcggagcagaaggccgagatcgccgcggcgaagaaagaagtcgccgccgcagccgagccgaaggccgccaacccctggtggtggccgttcggcgccagctcggcgagcaaggcgtcgggcaagccggcactggtccagcagaaggtcaccaaggagtggctggatactcatgagaaagccctgcgcgaagcgatcgccggtagcgagttcaccctcgaacgccgcgacaacgcattgatcgtcatcgcccccgccgactactcgttcaatcccaagcgccacaccatgctgatgccgatcaccctcaacccgctgggcaaggtcgccaagatggcccaggccgatccgcagagcggtatcctggtgctcggccataccgacagcaccggcagcaaggcggtcaacgacaagctgagcttcgagcgtgcccagtcggtggcggcgatcttccgcctcagcggcctgaaaggcgatcaattgcgcctgaagggggtcggttccgacatgccgcgcgcggacaacgccagcgccgccggccgcgcccagaaccgtcgcgtcgaagtgctctatacccagcgcgccagcctgctgtccctggcccagggcaactga

SEQ ID NO: 325274 - DNA, 2250 bp, Pseudomonas aeruginosa
atgatccgttcgcgttggcatcttcccctgcttctcggcctgctcgcggtggccgcgccgctggcggcgaacgacacccagcaggtgctgttcaacttcgtcaagccgatggccgtggtcggcatcaccctggaggatgccgacctgcccagcgtgacggcggaggccaccccggagggcgacattctccgtcgcgtcaccttcagcccggcgcaacggcccaccttgcgcatgagtccggcgcagggccgttgggactggtccgcagcggactacgtgagcctgcgcatccagaacgccatgagctgggacatgaccctggaggtcgcgatcgagggcgagcagggcgcgccggggttgcaggcatccatagagcttccggcaggcccgccgcagaccctgctggtgccgttgcgggcggtttcgccagaggctctgggcatgcgtgcggggccgccgatgccgcagatggtcgaaggccagcggatgctgctggcgccacgcgtggagggctcgctggaccgcgccagggtcggggcgctgagcctgtccctgcgctcgccgcaagctccccagagcatcctgctcggacgtttcggcatacgcgcagggagggcggtggagcggagcatcctgaccggcctgatcgatcgttatggccagtacagccgcgccgactggccggaaaagattcgttccgacgaacagttgcgcagcgcctatgcggccgaggccgcacagctccgcgacggggaacggcagacaccggcgcgcgaccgtttcggcggcctgctgggtgggccggtgttcgaagccagcggcttcttccgcacggaaaaacgtggcgggcgctggtggctggttactccggaaggacatccgttctggtcgctgggcgttaatgcggtgaccgccgacggcggccggacctacgtcgaaggacgcgagccgatgttcgccgaactgccggcggagggtgagccgctggccgcattcttcggtgagggcgacgaccgccgcggcgtcgccgcgcaggccgggcggcgtttcgggcatggccgctggttcgatttcctcggtgccaatcgccagcgcatcgctccccaggcgagcgccgaccagctcgccggcgaatggcgccagcgcactctggagcgcctctcggcatggggtttcaacagcctcggcaactggagcgatccggcgctcgccgcacaggcgcggatgccctacagcctgccgctgtcgatcgccggcgactacgccacggtcagcagcggtttcgactggtggggagccatgcccgatcccttcgacccgcgcttcgccatggccgccgagcgcgtcatcgccatcgctgctcgcgaccaccgcgacgatccctggctgttcggctactacgccgacaacgaactggcctgggccgggcgcgacggctcggcccaggcgcgctacggcctcgctttcggagccttgaggctgtccatggacagtccggcgaagcgcgccttcgtcaagcaattgaaagccaagtacctgcgccatgaggcattggcccaggcctggggcatcgagctggccgcctgggaggccctggaggcgccgggctacgcggctccgctgccgggcgaggggcatccggccatcgccgaggactacagcgccttcctccggctgtatgccgacgcttacttcaagaccctgcgcgacgccctgcaatggcacgcaccgaaccacctcctgctcggcggccgcttcgccgtcagcactcccgaggcgatcacctcctgcgcccggtattgcgacctgctcagtttcaacctctatacgccgttgcccgggcagggcctggacgactccctgctggcgcggctggacaagccggtgctgatcagcgagttccacttcggctcgcgggatcgcggtccgttctggggtggcgtcagcgaggcggccaatgagcgggcgcgcggcgactcctaccgaacgttcctggaggcggcgctgaagagtccgtatatcgtcggcgcccactggttccagtacctcgaccaaccggccagcgggcgcctgctggacggcgagaacggtcatattggcctggtcgggatcacgggcttgccgttcgccggtttcgtcgacacggtgcgccgaagcaaccttgccgccttgtcgcgactgtcggcgatggccagctccatgcctgccgtcgagcctccgccgccgcgcgaggattcagccggttcatga

SEQ ID NO: 325275 - DNA, 276 bp, Pseudomonas aeruginosa
atggggttcttcgaacggttgttgatgggtgggcgtcatcatggacagggcggtggtcatcacggcggcggtcatcaccgcggtcagggcggctatccgccggcgccagtcgcggtgggaatggcctgtcccgcctgccgcaccgcgaatgcggcgacggcacgattctgccagggctgcggcggcgccctggcgccgctgcgctgtatcgcctgcagcgccgatctcgcggcgggcgcgaagttctgcggcgcctgcggtgcgccgcagcagtag

SEQ ID NO: 325276 - DNA, 2814 bp, Pseudomonas aeruginosa
  misc_feature (2616)..(2625): n is a, c, g, or t
atgcaagacctcgatcccgtcgaaacccaggaatggctggacgccctggagtccgtactcgaccgcgaaggtgaagaccgcgctcattacctgatgacccgcatgggcgagctggccagccgtagcggcacccaactgccctacgcgatcaccacgccctaccgcaacaccattccggtaacccacgaagcacgcatgcccggcgacctgttcatggagcgccggatccgctccctggtgcgctggaacgccctggcgatggtgatgcgggcgaacaagcacgacccggacctgggcggccacatctccaccttcgcctcctcggcgaccctctacgacatcggcttcaactatttcttccaggctcccaccgacgaacatggcggcgacctggtgttcttccagggccacgcgtcccccggcgtctacgcccgcgccttcctcgaaggccgcatcagcgaggaacaactggagaacttccgccaggaagtggacggcaacggcctgtcctcctatccgcacccctggctgatgccggacttctggcagttccccaccgtatccatgggccttggcccgatccaggcgatctaccaggcacgcttcatgaagtacctggaaagccgcggcttcatccccgccggcaagcagaaggtctggtgcttcatgggcgacggcgagtgcgacgagccggaatccctcggcgcgatctccctggccggccgcgagaaactcgacaacctgatcttcgtcatcaactgcaacctgcagcgcctcgacggcccggtccgcggcaacgccaagatcatccaggaactggaaggcgtgttccgcggcgccgagtggaacgtcaacaaggtcatctggggtcgcttctgggacccgctgttcgccaaggacaccgccggcctgctgcagcagcgcatggacgaggtcatcgacggcgaataccagaactacaaggcgaaagacggcgcctacgtccgcgagcacttcttcggcgcgcgtccggaactgctggaaatggtcaaggacctttccgacgaggaaatctggaagctcaaccgcggcggccacgacccctacaaggtctatgcggcctaccaccaggcggtcaaccacaagggccagccgaccgtcatcctggccaagaccatcaagggctacggcaccggcagcggcgaagcgaagaacatcgcgcacaacgtgaagaaggtcgacgtcgacagcctgcgcgcgttccgcgacaagttcgacatcccggtcaaggacgccgacctggagaagctgccgttctacaagcctgaagaaggcagcgccgaggccaagtacctggccgagcgccgcgccgcgctgggcggcttcatgccggtgcgccggcagaagagcatgagcgtgccggttccgccgctggaaaccctgaaggccatgctcgacggctccggcgatcgcgagatctccaccaccatggccttcgtgcggatcatctcgcagctggtcaaggacaaggaactcggcccgcgcatcgtcccgatcgtcccggacgaggcccgtaccttcggcatggaaggcatgttccgccagctcggcatctactcctcggtcggccagctctacgagccggtggacaaggaccaggtgatgttctaccgcgaggacaagaagggccagatcctcgaggaaggcatcaacgaggccggcgccatgtccagctggattgccgccggtacctcctacagcacccacaaccagccgatgctgccgttctacatcttctattcgatgttcggcttccagcgcatcggcgacctggcctgggccgccggcgacagccgcgcgcacggcttcctgatcggcggcaccgccggtcgcaccacgctgaacggcgaaggcctgcagcacgaggacggccacagccacctgctggcctcgaccatcccgaactgccgcacctacgatccgacctacgcctacgaactggcggtgatcatccgcgaaggctcgcggcagatgatcgaagagcagcaggacatcttctactacatcaccgtgatgaacgagaactacgtccagccggccatgccgaagggcgcagaggaaggcatcatcaagggcatgtacctcctcgaggaggacaagaaggaagccgctcaccacgtgcaactgctgggctccggcaccatcctgcgcgaagtcgaggaagcggccaagctgctgcgcaacgacttcggtatcggcgccgacgtctggagcgtgccgagcttcaacgagctgcgtcgcgacggccttgccgtcgagcgctggaaccgcctgcatccgggccagaagccgaagcagagctacgtcgaggagtgcctgggcggccgtcgcggcccggtgatcgcctccaccgactacatgaagctctacgccgagcagatccgccagtgggttccctccaaggagtacaaggtgctcggcaccgacggcttcggccgcagcgacagccgcaagaagctgcgcaacttcttcgaagtggatcgtcactgggtggtgctggccgcgctcgaagcgctggccgatcgcggcgatatcgagccgaaagtggtggccgaggccatcgccaagtacggtatnnnnnnnnnnacggtatcgatccggagaagcgcaacccgctggattgctaattcgctccatactcccctcggcagcgaggggtttcgagcacgccggcgccgccaacgggcggcgccggctcacaacgaaccaaggaccaaaagtctttgttttgcgcgccgcacagcggtggtggcacgtaaaaggagaggaatgtga

SEQ ID NO: 325277 - DNA, 1803 bp, Pseudomonas aeruginosa
atgtccgaaaccctgctcagttcccgcaacctggcgttcgagctgtacgaagtcctcgatgccgaagccctgacccagcgcccgcgcttcgccgaacatagccgcgaaaccttcgatgccgccctcggcaccgcgcggagcctggcggaaaagctgttcgccccgcacaaccgcaagggcgacgaacacgagccgctctatgagaatggctcagccacgctgattccggaagtgaagccggcagtggatgccttcctcgacgccggcttcctcaacgccacccgcagcttcgagcaaggcggcatgcagttgccgaccctgctgtcgcaggcctgcttcgcccacttccaggcagccaacgtcggtagctcggcctatccgttcctgaccatgggcgccgccaacctgatcgagagcttcggcagcgaggagcagaagcagcgcttcctgcaaccgatgatcgagggccgcttcttcggcaccatggccctcaccgaaccgcacgccggctcctccctctccgacatccgcacccgcgccgaaccggctgccgacggcagctatcggatcaagggcaacaagatcttcatctccggcggcgaccacccgctctccgagaacatcgtgcatatggtcctggccaagctgccggatgcaccgccgggggtgaaaggcatctcgctgttcatcgtgccgaagttcctggtcaacgccgacggcagcctagggccgcgcaacgacgtgatcctcgccggcctgttccacaagatgggttatcgcggcaccacctccaccgcgctgaacttcggcgacaacggcgcctgcgtcggctacctggtgggcaagccgcaccacggcctggcctacatgttccagatgatgaacgaggcgcgcatcggcgtcggcatgggcgcggtgatgcttggctatgccggttacctctattcgctggagtacgcccgcgaacgcccgcagggccgcctgccggacggcaaggacccgagcgcgccacaggtggcaatcatccgccacgccgacgtgcggcgcatgctgctgacccagaaggcctatgtcgaaggcgccttcgacctgggcctgtacgccgcgcgcctgttcgacgacagccagaccctggaggacgacgaacagcgccgccaggcccacgaactgctcgacctgctgaccccgatcgtcaagtcctggccctcggagttctgcctgaaggccaacgagctggcgatccagatcctcggcggccacggctacacccgcgaatacccggtggaacagtactaccgcgacaatcgcctgaacccgatccacgaaggcacccacggcatccagtccctcgacctgctgggacgcaaggtcgggcagaacaacggcgccggcctgcgccagctgacccgcctgatccaggacgcctgccggcgcgccgaagcccatccatccctggccgccctgcgccagccgctggaacggctggtggcgcggctgtccgaagtgaccctggcactgctcggcgacctgatgcagggccaggtcaaccagggcctggccaactcggcgctgtacctgaaggtgttcggccatgcggtgatcggctggcgctggctggagcaggcgatccgcgccgaggaagggctggctcgcggcgactgcgccgacgccgacttctatcgcggcaagttgcaggccgctcgctacttcctgacctgggaagtgcctggctgccaccacgaactggcgctgctggaggcccgcgacgacgtgtgttcgagcatgcaggaagaatggttctga

SEQ ID NO: 325278 - DNA, 654 bp, Pseudomonas aeruginosa
  misc_feature (467)..(476): n is a, c, g, or t
ttggaactcaggcacctgcgctatttcatcgccgtcgccgaggagctgcacttcggccgcgccgccgagcgcctggggatctcccagccgccgttgagccagcagatccaggcgctggaggaggaaatcggtgcgcgcctgttcgagcgcaccaaccgccgcgtcgaactcaccgacgccggccggctgttcctcgacgagtcccgccaggtgctggcccaggtagacaaggcggtgctgctggcgcgtcgcgcccacctgggggaactgggcgagctgaagatcggtttcacttcctcggcacccttcacctcgaccatacccagcagcatccatgccttccgcaaggcctatccggacgtacacctcgacctgcaggaaatgagcagccgccaggtactcaaggcgctgctcgaggaaagcctgcaggtgggcgtgatccgcccgctggcgctgccggatgcggnnnnnnnnnngatgcggtgcattgggtggagttgttccgcgaaccgctggtggcggtgctgcgggccgaccatccgctggcggccggcagcgaggatggcctggccatcgccgccctggccgaggagcccttcgtgttcttcccgcgcagctacggcaccgggctctacgaccaggtcatcgccctga

SEQ ID NO: 325279 - DNA, 1074 bp, Pseudomonas aeruginosa
atgagccgccgcacggactccgacgcaccgaccatcaccgccgcctatccgcgcctgctgctcggcctgctggaggaacgcggcctggacggacgcgcgctgctgcgggaaatcggtctgtcgacgctgcgactggaagagccggaagcacgcgtcacatcgcagcagtaccaggcgatcgccgccgcggcgctcgcgctgagcggcgaccccggcctcggcgcacagctcgccttgcgcacgcctcccaccgcccatggcagcctgggctacgcgatgatggcctcggcgacgctcggcgatgccttgtgcctggcgctgcgctacatgccgctgctgcagggcaacgtcgaaatcagcctgctgcgcgaggacgagcaggtgatcctgcgcctgctgccaggccccgcgctcccgccggcgctgcaccggtacttcagcgaagccctgctgatcggcctgtatcgctccggcgcctggctgctcggcgaaccggccctggtcggcaggctcaacttcgactatcccgaacctgccgtgcctgtgccactgccgcagtgccgctacgaccaggcccacgtccagctggtgttccccgccatcctgctcgtccgctcgctaccgatggccgatccggctgcattgcgccgcgcccgcgaacactgcgaacgcgaactggcgctgctcgatgccggccgccgggacatctgcgcccgcgtgcggctggagctggaacggcaggaacagcgtttccccaacctggaggaagtagccacgcgcctgcacctgtccagccgcagcctcaagcggcatctgcatgacgccggcaccagctttcgccagttgctcggccaggctcgccagcgccaggccttgcgattgctgcggcgtcccgaggtgtcgttgcagcgtatcgccctgtacctgggctacagcgatccaaccaacttcacccgcgccttcaagcgctggaccggcgagccgccgagcgacacccgcgcccgcctgctgggcgggcaaccagtttcacgaacaaatgccaagcgctcgacaaatccctcgcgtttcccttga

SEQ ID NO: 325280 - DNA, 831 bp, Pseudomonas aeruginosa
  misc_feature (98)..(107): n is a, c, g, or t
atgaacgccatcgcgaacctcgcggcgacgctgcgcgccgacctcggcgaatgcctggccgacctggcggtgggcgccctcatcgacgaagccgaacnnnnnnnnnnggcggtggacgccctcatcgacgaagccgaactgtcgcccaaaccggccctggtggaccgtcgcggcaatggcgcgcatgccgacctgcacctgggcctgatgcaggcctcggcgctgagcctgtggccgtgtttcaaggaaatggccgacgccgcccagcggcatgggcgcatcgatgcgcgcctgcgcggcgtccttggccaactggggcgcgacggcgaggcggcgatgctgcgtaccaccgaaggcgtgaacacccatcgcggagcgatctgggcgctcggcctgctggtcgcggccgccgctctcgaaccgcgccgcacgcaggccggcgaagtggccgcgcgcgcaggacgcatcgccctgctcgacgatccggcggccgccatcggcgacagccacggcgagcgcgtccgtcggcgctacggcgtcggcggcgcccgcgaggaggcgcgtctcggcttcccccgcgcagtgcgccacggcctgccgcagctatggcgcagccgcgaaggcggcgctggcgagcagaacgccaggctcgatgcgctgctggcgatggagaaggacttcggcgagacccgcatccagggcctgtgcgagctggaccgccgcctgctggcgctgaacgcttcgcccggcggcgccgccgacctgctggccgcctgtcttttcctcgatcgcctgcccgccgtgtccggtgggtgggctgggagtctctga

SEQ ID NO: 325281 - DNA, 840 bp, Pseudomonas aeruginosa
atgaacgcattcaccgcacccgccacgggcaccccgctggtcagcttccgccaggtgcgcaagcacttcgccgtggacggccggcgactggaagcgatccagcagttcgacctggagatcggcgagggcgagttcatcgccatcgtcggcgccagcggctgcggcaagtcgaccctgctgcgcctgctgatcggcctggaccgcgactacgacggcgagatccgcgtcgacggccggccaatcgccggcatcggcggcgaacgcggcatcgtgttccaggagcaccgcctgttcccctggctgacggtgcagcagaacgtcgccctcggcctggtcaacgaagcccttggcgaaaccgacaaggcggcgcggatcgacgaatacatccgcctggtcggcctgcacggcttcgagcgtgcctacccgcaccagttgtcgggcggcatggcccagcgcgtggcgatcgcccgcggcctggtggccagcccgcgcctgctgctgctcgacgagccgttcagcgccctcgacgcactgacccgccagcagttgcaggaagagttgctggcgatccgtcggcgcacccgcatcaccaccctgctggtcacccacgacgtcgaggaggcgctctacctggccgaccgggtggtggtgatggagccgcgcccggggcggatcaggcgggtggtcgaggtggacctggcgcacccgcgcgagcgcggtggcttcgacttcctgcgccagcgcgaagcgctgctgcacgaactgaccgccgacggcgagtacgtcgcgccgccgccgcgacgggtggaaaacctgcccttcgaattcctcgcttgctga

SEQ ID NO: 325282 - DNA, 1593 bp, Pseudomonas aeruginosa
atgagcaaacgccccaacttcctggtgatcgtcgccgacgacctgggcttctccgatatcggcgccttcggcggcgagatcgccacgccgaacctcgacgccctggccatcgccggcctgcgcctgaccgacttccacaccgcctcgacctgctcgccgacccgctcgatgctgctcaccggcaccgaccaccacatcgccgggatcggcaccatggccgaggcgctgaccccggaactggcaggcaagccgggttacgaagggcatctcaacgagcgcgtggtggcgctgccggagctgctccgcgaggccggctaccagaccctcatggccggcaagtggcacctcggtctgaagccggaacagacgccccatgcacgcggtttcgagcgttccttctcgctgctgccgggcgccgccaaccactacgacgaaagcactccgcgcatcctcaagggcacgccggcgctctacgtggaagacgagcgctacctcgacacgctgccggagggtttctattcctccgatgccttcggcgacaagctgctgcactacctcaaggagcgcgaccagagccggccgttcttcgcctacctgccgttctccgcgccgcactggccgctacaggcgccgcaggagatcgtcgagaagtaccgcggccgctatgacgccggcccagaggcgctgcgccaggaacgcctggcccggctcaaggagctgggcctggtggaggcggacgtcgaagcccatccggtgctcgccctgagccgcgagtgggaagccctggacgacgaggaacgggcgaagtcggcgcgggcgatggaggtctacgcggcgatggtcgagcgcatggactggaacatcggcagggtcgtggactacctgcgtcggcagggcgagctggacaacaccttcgtcctgttcatgtccgacaacggcgccgaaggcgccctgctggaggcctttccgaaattcggcccggatttgctgggctttctcgaccggcactacgacaacagcctggagaacatcggccgcgccaattcctacgtctggtatggcccgcgctgggcccaggcggccaccgcgccgtcgcgcctgtacaaggcgttcaccacccagggcggcattcgcgtgccagcgctggtgcgctacccgcggctaagccggcagggcgcgatcagccatgccttcgccacggtgatggacgtcaccccgaccctcctcgacctcgccggtgtccgccacccaggcaagcgctggcgcggccgcgagatcgccgaaccgcgcggcaggtcgtggctgggctggctttccggcgagaccgaggcggcccacgacgagaacaccgtgaccggctgggagctgttcggcatgcgtgcgatccgccagggcgactggaaggcggtgtacctgccggccccggtgggcccggccacctggcagctctacgacctggcccgcgacccgggcgagatccacgacctcgctgacagccagccgggcaagctggcggagctgatcgagcattggaagcgctacgtcagcgagaccggtgtcgtagagggggcttcgcctttcctggtgcgataa

SEQ ID NO: 325283 - DNA, 1137 bp, Pseudomonas aeruginosa
atgaacgacacgccgaacgtgcgtgagccggccctgcgccgcgtgctcgggctgggaccgctgctggcggtggccatcggcctggtggtttcccagggcgtgatggtactgatgctgcaaggtgccgggacggccggcctgggcttcatcgtgccgctgggagtggcctacctgctggcgctgagctacgccttttccttttccgaactggccctgatgattccccgcgccggtagccttagcagctacaccgaggtggccatcgggcatttcccggcgatcctggcgaccttttccggctacgtggtggtggcgatgttcgccctctcggcggaactgctgctgctcgacctgatcatcggcaaggtctaccccggcgcgctgccgccgatgctggtggcctacggcgtgctcggcctgttcaccctgctcaacctgctcggcatcgacatcttcgcgcgcctgcagagcgccctggcgctgctgatgatgatcgtcctgctggtgctcggcctgggtgcggtgagcagtgaccacgcttccgcgcagactgccctggcgagcggctggaacccgctcggggtaagcgccctggcgctcaccgcgatggccgtgtggggcttcgtcggcgccgagttcgtctgcccgctggtggaggagacgcggcgtccggagcgcaatatcccgcgttcgatgatcctcggcctgagcatcatcttcctgaccatcgccctctactgcttcggtgcgctgctgtgcatcccgcaggcggaactggccggcgacccgctgccgcacttcctcttcgccaaccgcgtgttcggcgagtacggccagctgttcctggtgatcgccgcgatcaccgccacctgcagcaccctcaactcgtcgctggcggcgatcccgcggatgctctacgggatggcgcagaacggtcaggccttcccgcaattctcctcggccaggacccggactcgatcaacctgctgctgctcgccgccgcgctggcctggctgctggcctacatcatcgcccacgtcgacgtgctggccctgcgccgtcgctatccgcacatcgcccgtccgttccgcacgccgttctacccgctgccgcaactgttcggcatcgccgggatga

SEQ ID NO: 325284 - DNA, 1041 bp, Pseudomonas aeruginosa
  misc_feature (420)..(429): n is a, c, g, or t
atgaaaaccgtggcacaactgttgaacgccaagcagaaccagcaggtgtacaccatcggaccggacgagatggtgctcgacgccctgcgcctgatggcggaaaagaacatcggcgcgctgctggtggtgaaccatggcgaggtggtcggggtggtcagcgagcgcgactacgcgcgcaagatggtcctcaagggccgttcgtccatcggtacgccgatcagcgcgatcatgagcgcgccggtggtcagcgtggactcgaagcagagcgtcgacacctgcatgaacctgatgaccgatcgccacctgcgccacctgccggtcgtggaagacggccagttgctcggcctgctgtccatcggcgacctggtcaaggcggcgatcgccgagcaggccgagcaactggccgtcttccacgaccgnnnnnnnnnngctgtccatcggcgacctggtcaaggcggcgatcgccgagcaggccgagctgatccagcaactggaacagtacatccgcggcgactgaagcgtacatgccggccctgcccttttcccgccggctcacgcgataatccgcggctgttcccgttgcgagccgccgccatgtcctctccgccgaagatccgccgctacattcccgccgaccgcgatgccaccctcgccatctggctggaggcctcgcgcgtcggccacggtttcctcggcgaagccgagttgcagaagcagaaggcactggttcgcgatcattatctggatgcctcggaaacctggctggcgctggacggcgatacgccgctgggcttcatcggcctgctcgatgccttcatcggcggcctgttcgtcgccccgacggcccacgggcgcgggatcggccggcaactggtggagcacgcggcaaccctgaagggcgcgctggaggtcgaggtctacgccgccaaccgcgaggcgctggggttctacgcacgctgcggcttcgtcgagagcggccgacgcccgcgtgacgacgaggggcgcgcgctggagatcgtccagttgcgccgcgaacactag

SEQ ID NO: 325285 - DNA, 558 bp, Pseudomonas aeruginosa
gtgatcttcagtgaacagaaagtggctcacatggcagctttctttttggcgagtgccgaagggccgctgcctcatctcacgctgatcaaactgctgtacctggcagaccgagagtcgatggctcgtttcgacgttcccatgtcggacgatcgagctgtttccatgccccatgggcctgtcctttcctcgacgctagacctcatcaaggggcgtttgcgctctgaggtttggagcgcttggatttctccgttggtggatcacgaggtccgtctggtccatgacgtggagaattgggacgatctggatgagttgagccgatcggatcgcagcattttggaatcggtctggcaagagtttggccacatgaccaagtaccaattgcgggactacacccaccatcacattggtgagtggcacgacccccacggctcttccagggacattgatccaaaggatactttcatggcgcttggtcaaagcgaggagctggcggagatcaaggcgcgcgatcttgctgagcgccgtcggcacggtaggaagctgtctgagttcatttga

SEQ ID NO: 325286 - DNA, 399 bp, Pseudomonas aeruginosa
atgccagggaacgtatttcagaagggaactctgctaatccccaccgggggtgcgaatcacctgcacttcgtgatgaatgaccccgtgtactgcccggttcttgggtatgacgcggtgttgcttgtcaacatctcgactgtctatccagataagtatttcgatcagtcatgcattctaaagaagggttgtcatccctttgttctgcgcgacagctgggtcgtataccgcgaggcaggccctttcaaccttgcacggcttgagcaaggggtagcgcagaagtccatcaagacgcatcagcccatcaacgcaggcgatttcactcggattcgggcaggcttcgacatctcgcccgacgtcaaaatcaaagttgagcggttcatgaggcagcacaagatttag

SEQ ID NO: 325287 - DNA, 2184 bp, Pseudomonas aeruginosa
atgagtaaagacatggacctggtggtctccatcggcggcatcgccgacccctccttgggcaaggcattcgagaccgtcaaggcacggctcgacagtctccaggaacgttcccgccaggcgtccagcctgagagatgtgctgggagacgccatacgcctggagcgagaactcgccgatatgcgcaaggtcggggaccgcggcgttgctgagcatgcccggcagcttggcgaacgccaggagcaactgaagcgactcggcatcgaggccagggccgcgggcgatgcctacgctcgactgggcgagatgcagcgtggcctggatatgcaggtccgcggcctgcaacggctggagcaggccagccaggcaatgccattggctagcgcattttccggactggtcgtggaagccagcaagacggctgccggttatcaagcgcggttgcgcgacctggcgatccgcaacggcctggacgtcggccgggagccagccttggcatccctgatccaggacagcgccagccagagcggcctgggacgcacggcgacgctggacatgctggagcacttgaacgccaccggcatggggttcgccgccgcgcaaatgaatctgggactggcgggccgcttcggctttggccaagggattgcttcagccgaggttgcggggctggttcgagcgttgcaactggcccagggttcggactcgccagagcaattgtccgcctccctcgaccgcctggtcgtcctgggtaaaggcagagtcggcagtgaggccctggcgcgtcgcctgcctgccttgttgtcagcgctgggcaatgcgggagaggccacggccggcgatgtcggtgcactgggggccttgctggagattcaagcaaagaacaccacgccagacaaagcggacgtgcggatgaaggcctggctggagttcgtcggcagcggcagcttgaaacgcgcttatggccaggactacgaccgggacctggaagcgctgcgcaaggacggagcgagtctgctggaggccaacctggagctggctgcgcgctatcgggataagggcggcaagctcagcgccggcgtggcgtcgccggcgcttgaagcctatcgagcgtcgcgcggcgagttccagggcttgctcgaatcccagcagtcttccgctggctcttcggagcgcgatgcgcggcgtcgcgaggggatgtcccaggagctgtggaaggcttccagcgacagttgggagagggcgcagaccgctttgggcagcgccctgaatccatatctggacaacctggccaaggggagcgcggtactcggcgagtcgactgcggagctgctcgaagcctatccgcggacgacggccggtcttaccgccgccgcaggtgcggtgttatccgggtatctcgcctacaagggagggcgcggcgctatcgacgtgctgcgtggcggtcggctcggtcggcgagggatcgctgccgtcggcgacctgatcgaacggggtgcaggccgggtatcgggtggtagtgaaatacaacgcgtgttcgttaccaactggccggtgccgggaggcgactctacgctggagtccgcgaggaggccggcacaacgaaagcgcggtcaaacaccacgcaggaagagaggcaagggcggtggggtgaaggcccgctcccttccgcgcctgtcgcgtttgcccatacgcaacgcgccgctgcaagtggcctcgtcgttgatcgatgttgctgaggtctactccagcgacctgtcggagagcgaaaagaccatcgtctatggcgaggccggtggctccctggctggttccctggctggcgccgctctgggagcgagcatcggctcggtggtgccggtggtcggtacgctgatcggtggattggttggcggcgctatcggcgcctggggcggtagcgaactgggggggcgtctgggacgcagtctggctggcgatccgccggcggactcggacaacaagccgacggtgcccgcaccacaggccgagcccgtcgcggctgcgcccaactggaccttcgcgccgcagatcaacctgacggtgcaaggcaacgtacacgagccgcagcgcctggccgacgagttgctgccctacctgcaacgcatgcttgtcgacttcgccgacgagcggcagcggcgcagcctctacgatccggcgatggtctaa

SEQ ID NO: 325288 - DNA, 711 bp, Pseudomonas aeruginosa
atgattgggtttaaggcgagaaatactgaaaaaatattggttatcgatagttcatatcagaatcttcagatggtcgccaaggggacgctgacaacctcaaagctggactcaggcatcggctactacgcggatgtagttgtgccctcgggtcgagccagtgcagtgcttgctataaggtggaatgggaccgctggagagtatccgcagccttccggggtttattggaagaagctggatgcgacaacctttagagtttatgctggctcgccaagtgtgcaggctacgtttgactatttccttttctgtacgcctattcaaaccactgaaggtggtgtgatcggtttgcgaatcagaaattcaagtggtggcggtgttgtgtatgactcaagatataaatatctgcgagttttggattatataaatgaaactctggccgttgatggtgtcttctcaaaagcttacccaggaaaaaaggttgctctgattcaaacgttgcgcgcaaattacaccaggattgattctggtggcacagtcgatcatccgatttttgtcattacgctgaagagcagttgcatggctacaccgacagatgatgcggtgaggatctattatcgttcgactgatctttacacgggctttggctcaataacgccagcgattgcaggggttaactatgccggatatctggtggtagatgtgactggttattaa

SEQ ID NO: 325289 - DNA, 1053 bp, Pseudomonas aeruginosa
atgacttggtattccagtggcaccgtagcggtgaccgcaaatagcccgaccgttaccggtactggcacacagttctcgtccaatgcccgggtcggcgatgcatttcgtggccccgatggttgttggtacgaggtcacaaacgtcgccagttcgacggtcatctcgatcaaacccaactaccagggcagcacggccagcggccagccctatgcagtggcgccgattctgggctacgacaaggacctatcagatcgtttcaaccagattgcgatggactggggggcgacccttgcgggcataaagccgtgggcgatagcgtctaccggttcgcaggcgcaggctgacatggggatcaccgaagttggccgtgctatcaatggagcctctaccgtaggcaatgcattggggtttttgggaggtgtttccaagacccaagcccccatggccctggatatggacacggtgaacgaaagcggatggttctcgataacccccaatacttacaacgtgcctctcggaaacaacaatatcagcggtgtgaacggccatgtcgctctgtcgatggtattcgacgccagtacccgctatcagctgttcttcgtgagaaataccaacctcccagaggtttggtacaggagctgtaccaatggaacctggaaggaatgggtcaggttttatacgacagacaatatcgtggggaccgtaacgaggcgacttgttacgggtaagcccaccggggctgtgatggagagcgggacaacttccaacggctggtacgttcgctttgcggatggtacccagatggcagcggcaagatccgaaccgggcctttcgtttggagctaacgtgatacagctaccagctgccttcgttacgggcttcaataccggggtgacctgcaattggattccctccagcggatggcctgccactgcagggcagggggttcgtggagcctatctcaacggtagcagctctgtttctttcgcgacggcgcaggcactgggggctaacgacaccattacggtgatggctgtggggaggtggtactga

SEQ ID NO: 325290 - DNA, 303 bp, Pseudomonas aeruginosa
atgcgtatcgaactcagtccggttgtagtcctgcccgaggactcgactgatatggatgtcatggtttccggagattcgatagccgtctcgggtgtcatgtacgacttctcgcagttaccggaggggggatatctgccagcctctgccatccatgaggggcctttttccgggagggttaccagggcaggcggagagatatgcctgacattggtgtttcccatccgggggagctacagcgaagctgccaaattccctgtccccatccatatcgttgaagacggaaccgtggagttgcccaagtga

SEQ ID NO: 325291 - DNA, 231 bp, Pseudomonas aeruginosa
gtgatcgattggaaaatgatgaaaacaccggatcaggtttccagagagcgggttcagcaagaatatgatgctgtgttggccagacgtgccgaggcctaccgtttggaaagcgatccgatcaaaacggaagtggagttcgattcgatccgtgcaggtgtggagacggattacgccgcctggcttgccaaggtcgaagagatcaaggccagatatccgctcccgcgcatctga

SEQ ID NO: 325292 - DNA, 1110 bp, Pseudomonas aeruginosa
gtgcacatcccgtggtgcgtgcgcaagtgcccgtattgcgacttcaactcccacgccgctggcacggagctgcccgaagaggcctatgtcgacgccctgctcgccgacctggagcaagacctgcgccatgtccacggccggcgcctgggttcgatcttcttcggcggcggcacgcccagcctgttctcggccaaggccctgggccggctactggaaggcgtcgagcgcagggtcggcttcgccgacggcatcgagatcaccctggaagccaatcccggcaccttcgaacaggtcaagttcgccgactaccggcgcctcggcatcaatcgcctgtccatcggcgtgcagagcttccaggccgacaagctgcaggctctggggcgcatccacgacggcgccgaggcagtgcgcgccgccgacatggcgcgccaggccggcttcgacaacttcaacctcgacctgatgcacggcctgcccgggcagagcctcgacgacgccctggccgacctgcgccaggccctcgccctggcccccacgcacctctcctggtaccaactgaccatggagccgaacacggtgttctggagccagccgccggagctgcccgaggacgacatcctctgggacatccaggaagccggccaggccctgctcgacgcgcacggctaccgccagtacgagacctccgcctacgcccgcgacgacctgcgcgcccggcacaacctgaactactggagcttcggcgacttcctcggcatcggcgccggcgcccacgccaagctgagcgcgccggacggacgcatcgtgcggacctggaagacccgcctgccgaaggactacctcaacccgcaaaaggccttccaggccggcgagcgcccgctggaagcggccgacctgccattcgaattcatgatgaacgtgctgcgactggtcgacggcgtccccgccgcgctctacccgcagcgcaccggccaaccgctggcggcgatcgccgatgcctgcgccgccgcgcgcgacgccgggctgctcgccgacgacccgcagcgcctgcgtcccagcgaacgcggccagctgttcctcaacgacctgctgcaacatttcctgccgtga

SEQ ID NO: 325293 - DNA, 1089 bp, Pseudomonas aeruginosa
atggccgcctaccaggcgctgctgacgccgggcacccaggccttgctgcaggccaacccggactaccacctgcgggtcttcccctcccgccgcagcgcatccctgccgcagcgcctgtacgacgctacccgcgccaacgccagccgcgccgagctgatcgccgacggcaacggcgtgcaaggcgctgccgccggtgtgcccttccccctgccgcagagcggccaggaagcgatctggaaccacatcatgcgctaccgcggcgagcaactgcacctgcagaccaaccaggcggcggtgctggccaacggcagctacaacctgctcaagctcgaccgctacctgtacttcgtctatggccgcgaggggatgatcccggagaacctcgacaacacgttgttctactacaagtacaaggtggtcgcgccggcgcgcctggccggttcggcgctggtggtgcaggaaaccctcgaccaggtgctgtcgatccgcaaggcctggcgcttcaaccgtggcgagcggcgcgtgcggcgcttgccgaccctggcctacgacagcctgcagccggataccaacggcatggccacggcggacaccgtggatgtctacaacggcgcaccggaccactacgagtgggcgttgctcggcaagcgcgagatgctggtgccttacaacagctacgcggtgcaccagaagggcctcgcctatggcgacatcctcaagagccgcttcatcaatcccgacctgctgcgctacgagctgcatcgcgtctgggtggtcgaggcgaccctgcgcaagggcttcagccatccctacgccaagcgccgcttctacctcgacgaagacagctggcagatcctcgccgccgacatctacgacaaggatggcgtgctgacccgggcccaggaggtccatccgatcaactactacgatgtgccgctggtctccagcaccctggaagcgatctacgacttcaagggcggccgctacttcgtcgatgggctggacaacaacgagccgatgtacgacttcggcgtacaggtcgggccgcgcgacttcaccccgcaggcgctgcgccgggagggtaactga

SEQ ID NO: 325294 - DNA, 873 bp, Pseudomonas aeruginosa
gtggacagcctgcgccggttgttcggccacccgttcggcagcttcttcacctgcctggtgatgggtatcaccctgagcctgccgatgggcctttcgctgctgctgaacaatgtcgaacggctcggcggctcctggcagcgcgccgcgcagatctccctgttcctcgacctgaagaccagcgaaaaccagggccaggacctgcgcgagcagatcgagcgcctgccggacgtgatcgaggcccaactgatcagccgcgagcaggcgctcagcgaattgcaggaacagtccggcctgggcgaagcgctcaaggagctgccggagaacccactgccgccggtgatctcggtcacgcccaagcagatcgatcgggccggcctggaggcactgcgccagcagctcgcggagctgcctcatgtgcagcaggcgcagctcgacctggtatgggtcgagcgcctgagcgcgatcctaaagctcggcgaacgcttcgtcttcggcctgactatcctgctggtgctgactctcttgctggtggtgggcaacaccatccgcctgcacatcgaaaatcgccgtaacgaaatcgaggtgatcaagctggtcggcgggacggacggttacgtgcgccggccattcctgtacatgggcgcgttgtacggcctgggcgcgggcatcctgtcctgggcgctgctggcctattcgctgaactggctgaacggttcggtggtcaacctttcagggctgtacggcagcgacttcggcctgcagggcgtgccgctggacgacggcctgtcgctcaccgtcggcgcggtgctgcttggctgggtcggcgcctggctggccgtggcccgccacctgcgcgagctggcgccgcgctga

SEQ ID NO: 325295 - DNA, 1266 bp, Pseudomonas aeruginosa
atgtttggttccaacgacgacaagaaggccccgcagggcggggaaaagaaaggtctggtcctggcccgcgaccgcctgccggtggcgcaatccctgacagaacagccaggtcggcagcagccctccgctgccgagccggccgagccgccggcgccggttgccgaagcgccgctcgccggtgacgagccagcgtcggccgaggagcattcgccccgccccgaggcgcccgtcgcacaacccgagcctatcctcgctgccgagcccgagcccgagcccgagcccgagcccgttgcgccgctggccgccgctccggcagtcagcgagccggcgaccaggccgggcttcttcgcccgcctccggcagggactgtccaagaccagcgccagcatcggcgaaggcatggccagcctgttcctcggccgcaaggaaatcgacgacgacctgctcgacgacatcgagacgcgcctgctgaccgccgacgtcggcgtcgaggccaccaccctgatcgtgcagaacctgaccaagcgcgtggcgcgcaaggagctggccgacagcggcgcgctgtacaaggcgctgcaggaagagctggccagcctgctgcgcccggtggagcagccgttgcaggtcgacgtcgcgcgcgagccctatgtgatcctggtggtcggggtgaacggcgtgggcaagaccaccaccatcggcaagctggcgaagaagctgcaactcgagggcaagaaggtcatgctggccgccggcgacaccttccgcgccgccgccgtggagcagttgcaggtctggggcgagcgcaaccgcatcccggtgatcgcccagcacaccggcgccgactccgcctcggtgatcttcgacgcggtgcaggccgccaaggcccgcggcatcgacgtgctgatcgccgataccgccggacgcctgcataccaaggacaacctgatggaggagctgaagaaggtgcgccgggtgatcggcaagctggacgagacggcgccccatgaggtcctgctggtgctcgacgccggcaccgggcagaacgccatcaaccaggccaagcagttcaacctcgcggtggagctgaccggcctggccctgaccaaactggacggcaccgccaagggcggggtgatcttcgccctggccaagcagttcggcctgccgatccgctatatcggtgtcggcgaggggatcgacgatctccgtaccttcgaggccgacgccttcgtccaggcactcttcgcagagcgggagaacgcatga

SEQ ID NO: 325296 - DNA, 1014 bp, Pseudomonas aeruginosa
  misc_feature (255)..(264): n is a, c, g, or t
atgaccgcgtccccgaccttccagcccgcctggtggctgcccaatccgcacctgcagaccctgtggagcccgttcttccgccgcgggccgaccctggaacggcagcgcgaacgcctgtggctggccgatggcgacttcatcgacctcgactgggccggcccgcacgatgccgaaaccccgctggtgctggcactgcacggcctcaccgggtcatcctcgtcacactacatcctcggtctgcagcgcgccctgctnnnnnnnnnnctgctggagcgcggctgggccagcgtggcgctgaactggcgcggttgctcgggggagccgaaccgcctgccgcgcggctaccattccggggtcagcgacgacctcgccgaggtggtcgcgcacctgcgcgccaggcgcccgcaagcgccgctgtacgcggtcggctattcgctgggcggcaacgtgctgctcaagtacctgggcgaaaccgctggggactgcccgctgctcggcggcgtcgcggtgtcggtgccgttccgcctggacgagtgcgccgaccgcatcggcctgggcttttcccgggtctaccaggcgcacttcatgaaggccatgctggcctacgtgcaggacaagcagcggctgttcggcgagcagggccaggcggaaggcctggccgccctgcaacgcctcggtccgctggagggcatgcgcaccttctgggacttcgacggccgggtcaccgcgccgctgcacggcttcgccgacgccagggattactatcggcgcgcgtccagccgctactacctgccggacatccgcacgccgagcctgatcatccattccagcgacgaccccttcgtgttcgcccgcagcctgcccgatcgcagcgaactggcaccctgcaccgagctggaactgcacgcccgcggcggtcacgtcggcttcgtcgacggctctccgcgccagcccacctactacttggaacgacgcatccccgactggctggaggcccgcctgcggcagcactga

SEQ ID NO: 325297 - DNA, 1734 bp, Pseudomonas aeruginosa
atgtccttcctgaacctgcccgtccgtaccctggtcgccgcctgcggcctgtccctgctcagcctcgcggcgcatgccgacagctttcgcggcgacgcccacgcaccgcagcaggccgccgtcgccacgccacatccggccgcgaccgtcgccggcctggaaaccctggccaatggcggcaacgccttcgacgccgcggcggccatcgccgctgccctggcggtagccgagccttacggctcgggactcggcggcggtggattcttccttctgcgccaggccggcgcgcagccgacctatcgcttcctcgacgcccgcgagcgcgcgccgaaggccgcctacgccgacatgtaccggcgcaacggcaaggtcgaccccaggctgtccgtcgacggcccgctggcggcggcgatccccggcctgccggcggcgctggtcgaattgagcggccgctacggacgcaagcccctggccgacaatctggtgccggcgatccgcctggcggtggatggcgtatccgtcgaccgggtctaccgcgaccgcgtcgccatgcgcctggaagcgatgcgcaaggacccggaaaccgcgcggatcttcctcgacaagggcggaatccccgacgaatggaacctgctccgccaaccgcagttggcacgtaccctggaacgcctcgggcgctacgggcggatcggcttctacgaaggcgagacagcggacaagctgctcaccggggtccgcgccggcggcggcatctggagcgcggccgacctgcgcgactaccgggtgatcgaacgccgcccgctggaggtgaagctggccaacggccgcgaactgatcagcgcaccgccgccctcggccggcggcgtggccctggcgcagagcctgcagatgctggaacagctgccgtggcagaaggccgagccggtacagcgcgcccattacgtgctggaggtcctgcgccgtgcctaccgcgatcgaggcctgctcggcgacccggacttcgtcgccaacccgctgcccagcttgctggcgccggactacctgaagcgccttgccgccggcatcgacccgcgccgcgccacgcccagctcggcgctgccggaagcgccggcctggcgcgaaggcgaccacaccacccacttcgcggtgatcgatgcccagggcaacgcggtggccgccaccctctcggtgaacctgccgttcggcgccgccttcaccgttcccggtaccggcgtggtgctgaacaacgagatggacgatttcgccgccgacacccagggcgccaacagctacggcctggccggcagccaggcgaacgcggtggcggccggcaagcgcccgctgtcgagcatgagcccgagcttcctggaaagcccgaccgacttcgccgccttcggcacccctggcggcagccgtatcccgagcatggtgctgatctccatgctgcagtacttcgacggccgcccggtcggccaatgggtcgccgcgccgcgctaccaccaccagtacaagccggacgtcgtcgagtacgaaccgcgcgccttcagcgatgccgaggccgccgaactgcgccggcgcggctatcagctcaaacgcctggagcgcagctacggcaaccagcaggtgctctactgggacaagcgcagcggccgcgtcgacgccgccagcgacccgcgcgggatcggttattcggcgttttccccggagatgcaggcacagccccaggcgcactga

SEQ ID NO: 325298 - DNA, 432 bp, Pseudomonas aeruginosa
atgtcgctgtttcgtcccctcctgatcgcctccaccctcgccctcgccagcggttgcgccagcggcctcaactcgcagcagacggccgaacttgagtattacgaagcccgcaacctggcggtcatcgagaaatcccccggcaccggcgcggccctcggcctgctccccggcggcggctccttctacggccgttcctacggactcggggtggtcaacctgctgttctggccgctgtcgatcctctgggacccggtgagcggctacgacgcatcccagcgcatcaactacaccgcgacccgggtgcacctggagaagctgcgccagcgcgacttcgacgaactgcaacggctggccgacaacggcgcattggacggcgccacgctggcgcggaagcgccaggacgtggaaacgaaataccgctacaccccctga

SEQ ID NO: 325299 - DNA, 345 bp, Pseudomonas aeruginosa
atgaacctgtttcgcaccaccgcgctcgtgctggcgctgaccaccgggctctcgtccatgcccgcgctggcggatgccgtgcaggaaaacgccagcggcgacccgatgtacaccgtcgaagcgccccccgcgtacgccatgatcggcgatctgctcatcgcccgtcccttcctgatcgccgccacggccgtcggggcggtggccttcgtggtcagcctgccgttcaccgcggccagcggcagcgtcggcaaggccggccaggcgctggtggtcgatccgggcaaggaagccttcgtccgttgcctgggctgcaccaccagcggctataaccacgacgaaagctga

SEQ ID NO: 325300 - DNA, 1746 bp, Pseudomonas aeruginosa
atgcccgattaccgctcgaaaacctccacccacggccgcaacatggccggcgcccgcgccctctggcgcgccaccgggatgaaggacgaagacttcaagaagccgatcatcgccatcgccaactccttcacccagttcgtgcccggccacgtgcacctgaaggacctcggccaactggtcgcccgcgagatcgagaaggccggcggcgtggccaaggaattcaacaccatcgccgtcgacgacggcatcgccatgggccacgacggcatgctctattcgctgccgagccgggagatcatcgccgactccgtggaatacatggtcaacgcccactgcgccgacgccatcgtctgcatctccaactgcgacaagatcacccccggcatgctgatggcggcgctgcgcctgaacatcccggtagtgttcgtctccggcgggccgatggaagccggcaagaccaagctggccagccacggcctggacctggtcgatgccatggtggtggccgccgacgactcctgctccgacgagaaggtcgccgagtacgagcgcagcgcctgcccgacctgcggctcctgctccggcatgttcaccgccaactcgatgaactgcctgaccgaggcgctcggcctgtcgctgccgggcaacggctcgaccctggccacccacgccgaccgcgagcaactgttcctgcgcgccgggcgcctggccgtggaactctgccagcgctactacggcgaaggcgacgacagcgtgctgccgcgcaacatcgccaacttcaaggccttcgagaacgccatgaccctggacatcgccatgggcggctcgaccaataccatcctgcacctgctggccgccgcccaggaggccgaggtgccgttcgacctgcgcgacatcgaccgcctgtcacgcaaggtgccacaactgtgcaaggtggcgccgaacatccagaagtaccacatggaagacgtgcatcgcgccggcggcatcttctccatcctcggcgaactggcccgcggtggcctgctgcacaccgacgtccccaccgtgcacagcccgagcatggccgacgccatcgcccagtgggacatcacccagacccgcgacgaagccgtgcacaccttcttcaaggccggtccggcgggcatcccgacccagaccgcgttcagccagaacacccgctggccgagcctggacgacgaccgcgccgagggctgcatccgcagcgtcgagcatgcctattccaaggaaggcgggctggccgtgctctacggcaacatcgctctcgacggctgcgtggtgaagaccgccggggtcgacgagtcgatccacgtgttcgaaggcagcgcgaagatcttcgaaagccaggacgccgcggtgaaaggcatcctcggcgacgaggtgaaggccggcgacatcgtgatcatccgctacgaaggaccgaagggcgggccgggcatgcaggaaatgctctatccgaccagctacctgaagtccaagggcctgggcaagcagtgcgccctgctcaccgacggacgcttctccggcggcacctcgggcctgtccatcggtcacgcctccccggaagccgccgccggcggcgccatcggcctggtgcaggacggcgacaaggtgctgatcgacattcccaatcgctcgatcaacctgctggtcagcgacgaagaactcgccgcccgccgcgccgaacaggacaagaagggctggaagccggccgcgccgcgctga

SEQ ID NO: 325301 - DNA, 1041 bp, Pseudomonas aeruginosa
gtgagccggcgtccgtggggcgtgctgcttggctggtgcctgttggcggccagcgcggtccaggccgaaagcgccatcgaccggcagcagcgcgaactggccctgctgcgcgagggctggtaccggcaggtcccgccggcgccggtgccgctgcccatgcgtacggccgggccggcggattccggccaggatggcgtcggcatactgctgcgcaacgtggacatgtacctgcgcggcaacatcggtttccacgtgcccgaggtgaagggctggctggtgccgaaccgggccggccagccggtggacttcgatcgcccgcaggacattcatttccaggtgatggagggcgaggtgctgctcagcccgcggcaactggccaacctgttcaacgagcacatcctcgcctacgacgggaccatgttgaaggactttcgcatgagcagtgcggcgggacgcctggaggtggagggacgggtgcgtccgctcggcgtagggccctggctgccgctgcggctgggcggcggcgtggaggtggacgcggccagcggcgcgctggtctatcggcccgaccagttgaaggtgatcggtctgccgctgtacggggcgatgagcctggtcggcttgccgatgtcggcgctggtcagcctcgatcggccgggggcgagcctggtcggcagcgccatgcgcctggactaccgcaaggtcttcccgctgctgggcatcgatggccacgtacaggaggcctggctcgacgaccaggggctgcacctgcgtttctcccaggcgcccggccagccgtcgccggtgttcagcccgccggccgcggcgggcccatccttcctctggctacagtccggcgacctgaagatcttcgaaatcctcatcacctacgcccaggtgctgctgaagaccgagaccccggaccaggtgctgaccttcaacctgcaggactaccgcaaggtgctggcgaccggcaccacccaggtcaacgaggatggcaccttcttcatgcaggtgccgccgtatgccaatcccttgtag

SEQ ID NO: 325302 - DNA, 1152 bp, Pseudomonas aeruginosa
atgcaaccagccttcctgcgccgccacctcggcgccgcctgcctgatgctcgccgctggcctggccagcgccgcccacgccgacaccggcaacgtacaacgcgccatcgactgggcccagggccaggcctccgttcgccacccggccggccacgaacgctcgcctctggtcatcgcccaccgtggcgccagcggttacgtaccggaacacaccctgggcgcctacgccctggcggtgatgatgggcgccgactacgtcgagccggacctggtgatgacccgcgacggcaagctggtcgcccgccacgacaacgagctgggcctgaccaccgatgtcgcccagcacccggaattcgccgaccgcaagcgcacgcagaaagtcgacggagtggaactcaccggctggttcagcgaagacttcaccctcgccgaactgaagaccctgcgcgccatcgagcgcatccccacgatccgcccgggcaatgcgcgcctggacggcaccttcgagatccccaccctgcaggagatcatcgacctggtgaaaagcctgcaaatcagccagcaacgcaccatcggcctgtaccccgagatcaagcacggcacccacttccagcgcctcggcctggccatggaacgcccgctggtgaagaccctgcaccgcaacggctacctcggtccgcgcgcgccggtattcatccagtccttcgaggtgaacaacctgaaggaactcaagcgcctcaccggcatccgcctggtccagctctacggcagcggccagccctacgaccagcaggccagcggcggcagcctgacctacgccgagatggccaccgccaagggcctgcgccaggtggcgcgctacgcctacggggtcggtccggacaagagctacgtgattcctcgcgatgccaacggcaacctcggccagccgacccgcttcgtcggcgacgcccacgccgccgggctgaaggtgcatccctacaccttccgcgcggaaaacagcttccttccggcggagttccgcagcgccgacggcaacccgcagtcgcgcggcgacctggccggcgagatcagggcctacctcgacgccggcatcgacggcctgttcagcgaccagccggacgtcgccgtgcgcctgcgcgagcagcgctga

SEQ ID NO: 325303 - DNA, 405 bp, Pseudomonas aeruginosa
gtgcaggccgaggaggctggccagcgcccagaacacgttgaccgggcgctggccgtcgccaagcgcggcgaaggccagtccggcgccgctggccagggccagcaccagcagcagggccagcgccagccgcgaaccctggcgccaggtccgctgggcgtccagcaggccctcgcggcggcccagccagtgggcgcgggtgagaatacggcgcggcaggaaaccgccctgggccagcgcctggcgaagcgcctcgctgtcttccagcggaccggcctgctcctcgcgcaggcgaacggcctcggtcagccagagggcgtcgaggccgggatgcgtcgtgtgactcaagtcacctcctgtgtcgatttccctgccgagcgtgaatcgtgcccggccaacggcgtctga

SEQ ID NO: 325304 - DNA, 393 bp, Pseudomonas aeruginosa
  misc_feature (359)..(368): n is a, c, g, or t
atgacctgcgtcgaggccgggcgaggcgcgccgctgcgtgtggtggtggtcggcaccagcggggccgggaagtcgaccttctccgccgcgctggccgccaggctgggttgtacgcatgtcgaactcgaccgactctactggggccccggctggcaagccgtgccccacgaacgcttcgagcacgcagtggagcgggcgacgacggcgccgcgctgggtcgccgacggcaactacagcgccgtccgcgagttgctctggggccgcgccacccatgtggtatggctgaatttcgggcgctggacggtgttctcccgggtccttcgccgcaccctggcccggggcctgctgcgcacccgccnnnnnnnnnncccgcctgtcccacggcaaccgtga

SEQ ID NO: 325305 - DNA, 381 bp, Pseudomonas aeruginosa
gtgcaattcgtcaacacgaagtcaaagcatcgtcgctcggtcccgatacctccagaactggaacaacgcctgcactcgcacctgcgccgctacggcaagttctccaactgccgcgacagcttcgacttcgccgtgaaaatgtccggtgtcgccctccctcgtgggcagaaatcgcatgtgctccgccacacgttcgcctcgcacttcatgatgaacggcggcaacatcctgacccggcaaaagattctcgggcactcgtcgctgaccttgaccatgcggtatgcgcacctcgccccggacttcctgcaagaggtgatcagactcggcccgctgaaagactttcgtcacctgctcgataccgggaaggatcacgagtgctag

SEQ ID NO: 325306 - DNA, 237 bp, Pseudomonas aeruginosa
atgagcacgatgaacatttccctgccggatacgctcaagaacttcgtcgatgagcaggtcagccagcgtggttacggcaccagcagcgagtacgtgcgcgagctgattcgcaaggatcaggaccgtcagcgtctgcggggcctgctgatcgccggcgcggagtcggtgcctgcgggacctgccgacggtgactacttcgaatcgcttcgcacacgggtccgtaaggctcggggatga

SEQ ID NO: 325307 - DNA, 336 bp, Pseudomonas aeruginosa
atgaaggcgaagcccgtcataccacgcgtactcgccaatcaggacgttgaagcggctgtcgattactacctcagcgaagatgccgaacaggctgctctggggttcatcgatgccctggaaaaggcatacgcccatattgcccgtcaccctgccagcggctcatcccgctacgcccatgagctggatttgccggggctgcattgctggccactcaagcgctatccctacctggttttctacgtcgagcgcgacgaccacatcgatgtgtggcgcgtactccacggcatgaacgatatcccgtcctggatgcaggctggcgagagcgcaccgcactga

SEQ ID NO: 325308 - DNA, 1407 bp, Pseudomonas aeruginosa
atgaacgcaagactgcacgccacgtcccccctcggcgacgccgacctggtccgtgccgaccaggcccactacatgcacggctaccacgtgttcgacgaccaccgcgtcaacggctcgctgaacatcgccgccggcgacggcgcctatatctacgacaccgccggcaaccgctacctcgacgcggtgggcggcatgtggtgcaccaacatcggcctggggcgcgaggaaatggctcgcaccgtggccgagcagacccgcctgctggcctattccaatcccttctgcgacatggccaacccgcgcgccatcgaactctgccgcaagctcgccgagctggcccccggcgacctcgaccacgtgttcctcaccaccggcggttccaccgccgtggacaccgcgatccgcctcatgcactactaccagaactgccgcggcaagcgcgccaagaagcacgtcatcacgcggatcaacgcctaccacggctcgaccttcctcggcatgtcgctgggcggcaagagcgccgaccggccggccgagttcgacttcctcgacgagcgcatccaccacctcgcctgtccctactactaccgcgctccggaaggagtgggcgaggccgagttcctcgatggcctggtggaggagttcgaacgcaagatcctcgaactgggcgccgaccgggtgggggcgttcatctccgaaccggtgttcggctccggcggcgtgatcgtcccgcccgcgggctaccaccggcggatgtggaagctgtgccagcgctacgacgtgctgtacatctccgacgaagtggtgacctccttcggccgcctcggccacttcttcgccagccaggcggtgttcggcgtacagccggacatcatcctcaccgccaagggcctcacctccggctaccagccgctgggcgcgtgcatcttctcccggcgcatctgggaggtgatcgccgagccggacaagggacgctgcttcagccatggtttcacctactccggccacccggtggcctgcgcggcggcgctgaagaacatcgagatcatcgagcgcgagggcctgctcgcccacgccgacgaggtcggccgctacttcgaggagcgcctgcaaagcctccgcgacctgcccatcgtcggcgacgtgcgcgggatgcgcttcatggcctgtgtcgagttcgtcgccgacaaggcgagcaaggcgctgttcccggaaagcctgaacatcggcgagtgggtccacctgcgggcgcagaagcgcggcctgctggttcgtccgatcgtccacctgaacgtgatgtcgccgccgctgatcctcacccgcgaacaggtcgataccgtggtccgggtgctgcgcgagagcatcgaggaaaccgtggaggaccttgtccgcgccggtcaccggtaa

SEQ ID NO: 325309 - DNA, 1425 bp, Pseudomonas aeruginosa
atgcataccctaaaacgctgtatggctgcgatggtggccttgctggccttgagcctggcgatgacggcccgggcagaactgccggacttcacgcctttggtcgaacaggcgtcgccggcggtggtgaatatcagtacgcggcagaagctgccggatcgcgccatggcgcgcgggcagctgtcgatccccgacctcgaagggctgccgccgatgttccgcgacttcctcgagcgcagcatcccgcaggttccgcgcaatccgcgcggccagcagcgcgaggcgcaatcgctgggctccggcttcatcatctccaacgacggctacatcctcaccaacaatcacgtcgtggccgatgccgacgagatcctggtgcgcctgtccgaccgtagcgagcacaaggccaagctggtcggcgcggacccgcgcagcgacgtggcggtgctgaagatcgaggcgaagaacctgccgaccctgaaactgggcgattcgaacaagctgaaagtgggcgaatgggtcctggccatcggttcgccgttcggcttcgatcactcggtcaccgccggtatcgtcagtgccaaggggcgtagcctgccgaacgagagctacgtacccttcatccagaccgacgtggcgatcaacccgggcaactccggcggtccgctgctgaacctggagggcgaagtggtcggcatcaactcgcagatcttcacccgttccggcggcttcatgggcctgtccttcgccatcccgatcgatgtcgcgctgaacgtcgccgaccagttgaagaaagccggcaaggtcagccgcggctggctgggtgtggtgatccaggaagtgaacaaggatctcgccgagtccttcggcctcgacaagccgtccggcgcgctggtggcgcagctggtggaagacggtccggcggccaagggcggcctgcaggtgggcgatgtgatcctcagcctgaacggccagtcgatcaacgagtccgccgacctgccgcacctggtgggcaacatgaagccgggcgacaagatcaacctggacgtgattcgcaacggccagcgcaagtccttgagcatggcggtaggcaaccttccggacgacgacgaggaaatcgcctcgatgggcgctccgggcgccgagcgcagcagcaaccgcctgggcgtgaccgtcgccgacctgaccgccgagcagcgcaagagcctggatatccagggcggcgtggtgatcaaggaagtccaggacggtccggccgcggtcatcggcctgcgtccgggcgatgtcatcacccacctggacaacaaggcggtgacctcgaccaagatcttcgccgacgtggccaaggccctgccgaagaaccgttcggtttcgatgcgggtactgcgccaggggcgcgccagcttcatcaccttcaagctggccgaataa

SEQ ID NO: 325310 - DNA, 1284 bp, Pseudomonas aeruginosa
atgtcgacttccctgccgcaggccgcaaggtctgtacgtttgtcccgcagcaccaccctgaccaccaccgccgtcgtgctcgccggcatcgcgcccctgggcaacgccgccggcttcctcgaagacagcaaggccagcctggaaacccgcaacttctacatgaaccgcgacttccgcgacggccccggccagtccaagcgcgaggagtgggcgcaaggcttcatcctcaacctgcagtccggctacacccagggcaccgtcggcttcggcctcgacgccatgggcatgctcggcgtcaagctcgactccggccgcggccgcagcggtaccggactgctgccgaaggattccgacggccgcgcgccggacacctactcgaaactgggcctgaccgccaaggtcaaggtctcgcagagcgagctgaaggtcggcacgctgattccgaagctgccatcggtacaaccgaacaacgggcggatcttcccgcagatattcgaaggtgcactgctcacctcgaaggagatcaaggacctcggcttcaccgccgggcgcctggaaaagaccaagatccgcgactccagcgactccgaggacctcgcgctgaacgacaagaacggccgcttcgccggggtcagcgccgatcacttcgacctcggcggactggactacaagctcaccgaccaactcaccgccagctatcactacagcaacctgcaggacgtctaccgccagcacttcgtcggcctgctgcacagctggccgatcggtcccggcgaactgaccagcgacctgcgcttcgcccgcagcaccgacagcggctcggccaaggccggcggcatcgacaacaagtcgctcaacggcatgttcacctacagccttggcaaccatgccttcggcgcggcctggcagcgaatgaacggcgacgacgccttcccctacctggaaggcagcaacccgtacctggtcaacttcgtccaggtcaacgacttcgccggccccaaggagcgttcctggcaactgcgctacgactacgacttcgtcggcctcggcattcccggcctgaccttcatgacccgctacgtcaagggcgacaatgtcgaactcgccgggcagagcggcgaaggccgcgaatgggaacgcaacaccgaactgcagtacgtgttccagagcggcgcgctgaagaacctcggaatccgctggcgcaacgcgaccttccgttccaatttcacccgcgacatcgatgagaaccgcctgatcgtcagctataccctgccgatctggtaa

SEQ ID NO: 325311 - DNA, 1350 bp, Pseudomonas aeruginosa
gtggaaggccacgccctgttcgcgcaggcgttggccgacggcctggtcgcggcgttcctcgttcaccccgtattcctggttgacgtgtaccgcgccgattcccagctcccggcagagccggccgatgacttccggggcttgccgccagtggccgcagtcgcgcaccagcagcgggatgttcagcgcggcgagctggcgttgcagctcgcccaggttgcgcagccagaagtcgaccttgcagggcgcatcgtcgtgttcccgccactgcgccgggctgagcaggtagagggccacgcaagggcgtccatcggcggcggcgaggagcgcgctgttatcggtggttcgcaggtcgcagcgaaaccagatcaggttcatcggaagtccgttcatgggttcaacaggcctcgttcgccgagcaggcggcgggcttccaggggcttcgcgctggatctccacggccggtccgaccagcaccaccgggcagctaacccctgccagcaggcgcggcaggtgctccgggttgaggcgatgactggcgtacagcaacacgccgcgagcttccaggcgttcgcaggccagggccagttcggccggtggcagcggccagtcgaagacctgcagcggcacctcgccgctgccgagcaaccaactgcacagccagaggttcggttccagcgacagctcggactggttgaccagcagcagcggcgcgccctgttgcagccgctgctggtgataaaggcgggcgcccagcttgctgcgcaaccaggagaagaagaaggcccgctccatgcgcgcgccgaattgtccctgccagcgtcgttcgaggtgctgcagcaagggttgcagaagcttttcgcagagggtcgctaccggatagagcgacgcggcctggttgaacagatcgtcgaggcgtcgctcggccagcgcggcgatggcgtccagcagttgttcgtgcaggcgttcccagggggattcgacatccgccgccggggtttcctccggacgctccagcagcgcgcgcacctggctgatggcgacgccacgctcgagccagacgagtatccggcggatgcgctcgacctgctcttcgctgtagagccggtgacccttgccggtgcgttgcggcaccaccaggccgtagcggcgctcccaggcgcgcagggtgaccggatggacgccggtcagacgagtgacttcgcggatcggcaggccgccgcgttcgaggtggggcgagttcatcgggaaatcctagagcgcgttgcgcaggccgagttcggtcgggtgcggttgcaggtaggtctgctgggcgatgtatgcatgcgggtggcgacggaagtggtgctttag

SEQ ID NO: 325312 - DNA, 2115 bp, Pseudomonas aeruginosa
gtgcctcgcccgtgtcagcggcgctcccgccaccaccgctcgctactgatcggcctggcgctgctctcccctgtccatgcggcggactacctggccggactgccgccgccgcaacccgctccgtccggcggcggcaacgtcctctactacctggaactggtgatcaacggccgcgacagcggccgcgtgcgcctgcctggcaaccccgccggacaggtcgcggtggacgccctgcccgaggtccgggcggactatgacagcgccagccagcaactgcacctgcaagtgccgccggactggctgccggagcagcgcttcgacgatcccggactggtcgcccgcgccccggcgcgcagcagcctcggcgcgctgttcaactacgacctgtactactcggcccccgccgacggcgccacaccctggctttccgcgctgctcgagcaacgtctgttcgacggcttcggggtgatctccaacaccggcgtctacacccgctatttcggcgacgccgacaacctcgacagccgctacctgcgctatgacacctactggctgtacaacgacgaacgcaacatgcacagctaccaactgggcgactacgtcaacggcgcgctgaactggaccaccccggtacgcatgggcggctttcgcttcgcccgcaacttcggcgtacgtccggacctggtcacctatccgctgctgcgcttcgacggccaggccgccgtacccagcaccgtcgacctgttcatcaacggctacaaggccagcagcgccgacctgcagcccggtcccttcgccatcagcaacgtgccgtatatcaacggagccggcgaagccacggtggtgaccaccgacgcccagggccgacaagtggtgaccagcctgccgttctacgtatccaacaccctgctggcgcgcggcctgagcgatttcgacctgtccgtcgggcgtctgcgcgacgactacggcctgcgcaacttctcctatgccgacaatgccgccagcggcatctaccgctacggcgtcagcgaccgcctgaccctctccacccacgccgaggccgccagcgacctgcgcctgctcggcatcggcggcgacatcgccgtggccaccttcggcaccctcagcctggcggccagcggcagcgacggccagggcgacagcggccagcaatacctgctcggctactcctactattcgcgacggctctcttacagccgcccgatcggcagccgtagcagcttctacctggcgctgaacaaggatctcgacggcgacggctacagcgcgctgatgcaactggtgattcccttcgacatcaacggcctgctgaacatcggcgtcacccgcgacagcgaccggcgctacagcgagcgggtgatctggagccgctccacgccgagccagggcggtctcggctggaacctcggctatggcggcggcgccagccgctaccagcaggccgacctgacctggcgcatgcagaacgtgcaactgcagggcggcctctatggcgagaccggcaactacacgcgctgggccgatctcagcggctcgctggtatggatggacaacgccgtgttcgccagcaaccggatcaacgacgccttcgtcctggtcagcaccaagggttatccacaggtgccgatccgctacgagaaccaactgatgggcagcaccgacgacaacggccacctgctggtgccctgggtcgcggcctactacccggcgaagttccagatcgagccgctggaccttccggccaacgtcagcgcgcccgaagtcgagcagcgcgtggcggtacgccagggcagcggcctgctgctggatttcccgatccgtgccgtggtcgccgccagcatcagcctggtggacgagcgcggcgaaccgctgccgctgggtagccgggccgaagaaaccggcagcggccagcgcgccagcgtcggctgggacggccaggtctatttcgaaggattgcaaagcgacaaccagctacgcgtggtccgccccgacggccgggcctgccaggcacgcttccgcctggacacgcgcaaacccaccgtcagccaggtcggcccgctgacctgctcggcccccatcggagatacgccatga

SEQ ID NO: 325313 - DNA, 705 bp, Pseudomonas aeruginosa
atggattggaaagtatttctcctgcgcgtcgcggtcgcgctggtcctgggcgccctgatcggcgccgaacgccaactgcgccaacgcctcaccggcctgcgcaccaacgcgctggtcagcactggcgcctgcctgttcgtgctgatgacccagggcgtgcccggcctggccggcgacgcttcacggatcgccgcctatgtggtctccgggatcggcttcctcggcggcggcgtgatcatgcgcgacggcctcaacgtgcgcggcctgaacaccgcagccaccctctggtgcaccgccgccatcggcgtcctgtgcagcatgggcctgctgctggaggccacgctcggcagcctggtggtgctctgcgccaacatcctgctgcgcgacatcgcccaacgcctgaaccgccaggacgtgttgccggccagcgaggccgagcaacgctacgaagtgcagatcgtctgccgcgccgaggacgagatccaggttcgcagcctgatgctgcacagcctcggcagcagcgacctgcgcctgcaatcgctgcacagcgaggatctggacaacccggccaagctggaagtccgcgccgaactgctcggcactcccgaggctccggcgcagctggaacgcctggtcagccgggtcagcctggagaagggcgtcagctcggtgcgctggcaggtcttcgaactggcggccgactga

SEQ ID NO: 325314 - DNA, 510 bp, Pseudomonas aeruginosa
gtggtgaagagcgacgaactcaacgccaactgcggtcccggcggcaagatcattttctacaccgggctgatcgacaagctgaagctcaccgacgacgagatcgccgcggtgatgggccacgagatcgctcacgccctgcgcgagcatgggcgcgaggccatgtccaaggcctacggcgtgcaggtggccagccagatcggcgccctggccggcctcggccaggaaagcctgcaactggccaataccggcgtcgactacctgatgaccctgcccaacagtcgtgccaacgagaacgaagccgacctgatcggtctcgagctggccgcccgcgccggctacaacccggaagcggcgatcaccctctggcagaagatgggcaaggccagcggcggtgccagccagcccgagttcaccagcacccacccctccgacagttcgcggatggccaatctccaggccgcgattcccaaggtgatgccgctgtaccagcaggccaggcgcggcaagtga

SEQ ID NO: 325315 - DNA, 2664 bp, Pseudomonas aeruginosa
atggtccgtccggatagccagcgcggcaagcgcacctcttcgaaagctggtagggaagggcgtttcgtccttgccgccagcagcaccctcatgttcgccatcgccagcatcaacgcggccatggcggcacctaccggtgcccagttcaaccccaacgagatcaagatcagccagcagggcaagaccacgctgatcgaccagagcacccagcgcgcgatcatcaactggaagggcttcgacgtctccgccgacgaggcggtgcgcttcaaccagcccggtgtgacctcgtcgaccctgaaccgggtcaccgcaggccaggaaagcgtgatcgccgggcgcatctccgcgcccggccaggtgatcatctacaactccaacggcgtggtcttcagcggctcggccaaggtagacgtgggctccctgatcaccaccacggcgaacatcagcgacgaacacttccgccagggcaagctgatcttcgaccagcgcaatgccgcgaccatcgacctctacggcgatggcctggtgtcgatcgccgtgaccgacccggttacccgcaagccgcaggatgcccaggcgctggtcagcaacggcggcgcgatccaggccgacggcggtagcgtgctgatcaccgccgagcaggcttcccgggtggtcgacaacgcggtcaacctgtccggcgtgatccttgcccgcggcaccgaggtgcgcgagggcagcgtggcgctggtaagcaagtccggggacatccagatcgccggcaagatcgacgtcagcggtccgaagaacggtggcgacgtgctggtcagcgggcagcaggtggccctggcgagcaccgccagcatcgacgcccgcggcgccgcgcagggcggcagcgtgcgcatcggcggcgacttccagggccgcggcgagctgccacgagcgaagaacgctacgctggccaagggcgccagcatcgacgtctcggctaccggcaagggcaatggcggcctggcggtggtctggtccgacggcaatacccgcatggacgggcggatcctcgcgcgcggcggcgcccagggcggcaacggcggcctggtggagacctccggcaaggtcaacctgagcatcgccgacagcgcctacgtcagcgtcgccgcaccctacggcaacggtggcacctggctgctcgaccctaccaccctgcgcatcgtcgcctccggcggcacctcaggttcggtggggggcgccaacggcgccagcggcgatgcgacggtgaatgcctcggtggtcaccggggcgctggcaggcggcaaggtgaccctcagcgccagcgaccggctgtcggtggaagcgccgctgatcaccagcaacctgggcggcgccagtcgcggcctggaactgatcgccaccggacctgccggtgcggtggatatctctgcgccgatcctgttccgcaacggcagcctggcaatccgcgccggcggcaacatcaacttcctcagcggcggcacgccgcagaccagcggcatcgtcgacctgggtagcggcaccctgtggatgcagaccagcaccgccggcaagatcagccagcaggccggtaccgcgctgatcgccgccaacctcgccggccgcgccggtagcatcgacctggcttcctgggacaactacgccggcaacctggcgctgcagaccttcaacggtacgctcaagtaccggcagagcaacgccaccggcgtgaccacgagcggcacggtgttcgatccgttcatcaaccagagcatgaccggcacggcgcagaacatcgtctccagcgtcggcacgcggattctcgaggccaacagcgtcggcaccaccggcaactacacgctgaccgccgacggcaacagcgagttcgaccgcctggtgttcaccgcgctgccctatcggcgggtcagcggttccgccagtttcccgaccaacgactcgtcggactacctggtgaccaacctgcgctaccaggtcaacggcagcaacgtcaccgccaccccgaacggcggtgcgcccagcgggttcaccgtcgccgccggcaacggcagcgtcaccacctggaccggaaactggggcaccagttggggcgtcaagggcttcggcggcgtgatcggcgtgaccgacgaactgcagtacgacgtcggcaccggcctgaccgaggaactgatcttcggcctcggcggcaagaccagccgcgtcgatactcgcctggacctgttcatgcgcgagggagcgttcaacagcttcgccgagcgcgcccaggtggagatgttcaagaccaccaccactgccggcgacatcctttcccgccagcagaccgccaccctgaccgccaatgacgctacccgcgtctacggtgatgtgaatccgactctgacggccacgatgtccggcatcaacgccatcgacgcctacgtcaacagccagttcaacgacctctaccaggcgaccgccagcaccacggcgacccaggcgtcgaacgtcgggcagtacgcgatcaccggtaacgccaatggcagcgagtatttcagccagcgttaccaactggtgcgccaggacggcaagctgaccgtcacgccggcgcaattgatcgtcagcgccgacgccaagaccaaggtctatggccgaccctcacctaccaggtcagtggcctga

SEQ ID NO: 325316 - DNA, 1185 bp, Pseudomonas aeruginosa
atgattgcacagctcccctctgagttgctgtccctgcaactgccgttgcggatccgcatcggcgatgctcaggcgttcgatctggggccggatccacaggtaaccatggtcattcgcgatccctcgctgctaaccgagatcacccatcccagcctcgatgcgctgggcaaggcctacgtcgagaagcgtctcgacatcgaaggaccgatcagccaggtcattggtatcggcgatgccctcagcgaagcgctcggcgaacccgatggcggcgcgccgccggttcgcgaaagccacgacaaggacaccgacgccgaagccatccattaccactacgacctgtccaacgatttctaccagctctggctggatccggaaatggtctattcctgcgcttatttcgagaccggcaaggaagacctcgccaccgcgcaactggccaagctccgtcacctgtgccgcaagctgcgtttgcagccgggcgagaagctgctcgatgtcggttgcggctgggggggcctggcgcgcctggccgctcgcgagttcggcgtcgaggtcactggcatcacattgagcaaggagcagctggcgctcgggcggaagcgggtcaaggccgaaggcctggaggaccgggtcaccctcaagctgctggactaccgcgacctgccgcgcgatggtcgcttcgacaaggtggtcagcgtcggcatgttcgagcacgtcgggcacgccaacctggggctgtacttccagcaactgtacgatgcggtgcgtcccggcggcctggtgatgaaccacggcatcacctcgcgctacaccgacggccgcccggtgggcaagggggccggcgacttcatcgatcgctacgtgtttccccacggcgagctgccgcacctgtcgctggcggtggcgcggatgagcgaagccgggctggaagtagtcgacgtggaaagcctgcgtctgcactacgcccggaccctggacttttggagcgccaacctggaagccaggctgaaggaggcggctcgcctggtgcccgaggaaaccctgcggatctggcggctgtacctggccggatgtgcctacggcttcaagcgcggctggatcaacctgcaccagatcctcgccattcgcccccacgaggatggctcccacgagctgccctggtcgcggcgcgacctgtacgcctga

SEQ ID NO: 325317 - DNA, 1221 bp, Pseudomonas aeruginosa
atgcaagccgccaccgaaaccatcgtcgcgatcgctaccgcccagggccgcggcggcgtgggaatcgtccgcatctccggacctctcgccggacagatcgcagtggccgtgagcggacgccagctgaaagcccggcatgcgcattacggaccgttcctcgatgccggtgggcaggtgatcgacgaaggcctgtcactgtatttccccggcccgaactcgttcaccggcgaagacgtactcgaactgcaggggcacggcggccccgtggtactcgacctgctggcattgcgttccctgcagggcgaattctcgcgccgggtacatgcattgaccgagcaactgatttccctgcgcatctatgtcgaagccgccatcgacttccccgaggaagaaatcgacttcctcgccgatggccatgtactggggcttctggaaaaagtacgcacagagttatccacagtgcagcgcgaagcttcccaaggcgccctgctgcgcgacggcatgaccgtggtcatcgccggacgaccgaatgccggcaagtccagcctgctgaatgccctggccggtcgcgaggcggccatcgtcacggacatagccggcaccacccgcgatgtactgcgcgaacatatccacatcgatggcatgcccctgcatgtggtggacaccgcaggcctgcgggataccgaggaccatgtggaaaagatcggcgtggaacgtgcgctgaaagccatcggcgaagccgatcgtgtgctgctggtggtggacgccaccgccccggaagcagcggacccgttttccctatggccggagttcctcgaccagcgaccggaaccgggcaaggtcaccctgatccgcaacaaggcggatttgtccacagagtccattggcctcgaggaaagcgcggacggccacgtcaccatcaccctctcggcgcgcaccggcgccggcctggagctgctgcgcgaacacctgaaggcctgcatgggcttcgaacagaccgcggaaagcggtttcagcgcccgccggcgccacctggaggcgctgcgccaggctggccaggcgctggagcatggccacagccaacttatccacaatggcgcaggcgagctgctggccgaggatctgcgccaggcccagcagcacctgggtgaaatcaccggcgcattcacccccgacgacctgctgggtcgcatcttctcgagtttctgcatcggcaagtaa

SEQ ID NO: 325318 - DNA, 1191 bp, Pseudomonas aeruginosa
atggacagcacctccgaaacccgcagcggcagctggctgagcgtgatcgccctggccctggccgccttcatcttcaacaccacggagttcgtcccggtcggcctgctcagcgacatcggccacagcttcgagatgcccacctcgcaggtcggcctgatgttgaccatctatgcctgggtggtgtcgctggcctcgttgccgatgatgctgctgacccgcaatatcgagcggcgcaagctgctggtcggggtattcctgctgttcatcgccagccacgtgctgtccgggctggcctggagcttccaggtgctgatgctcagccggatcggcattgccttcgcccacgcggtgttctgggccatcaccgcttcgctggcggtgcgcgtggcgccgccgggacagcaggccaaggcgctagggctgctggccaccggcaccaccctggcgatggtcctgggcatcccgctggggcgggtggtcggcgaggccctgggctggcgtaccaccttcatggccatcgccggactctcggtgctgaccttgctctacctggcgcgctccctgccgctgctgccaagccagaattccggttccctgcgcagcctgccgatgctgttccgacgcccggcgctggtttgcctgtacgtgctgaccgtggtggtgatcagcgcccagttcaccgcctacagctacatcgagcccttcgccaagcaggtggcgcagatgagcggcgaggcgaccaccctgctgttgctgttgttcggcggcgccgggatcttcggttcgatcctcttcagccgctacagcgaggctttcccgcgaggcttcctgctggccgcgatcctcgccttgggcagcagcctggcgctgctgttgccgctgtccgcgcagccgacctggctgatggcgctcagcctgctctggggcatgtcgatcatgtgcttcggcctggcccagcagtcccgcgtcctgcgcctcgcctcggacgccaccgacgtggccatggcgctgttctccggcctgtacaacgtcggcatcggcgccggcgcgctgctcggcagcgtggtcagcgaacgcatgggcctggcctcgatcggcaacgtcggcgccgcgctggcgctggccggcctgctgctcgccctgttcgccgcactgcgctacgcggaggcgctgaaaaccacgtcgttgtga

SEQ ID NO: 325319 - DNA, 4254 bp, Pseudomonas aeruginosa
gtgaacgtacaacagagcaagttcaggctgagccgctgggcgggcgcgacactggcgctcggactgttgctgtccgggctgggcgcctgggggctggcgctggtcaacgagcaacaggcgcggatggcgctggaacgcgaggcggaactgctggccgaggcggtgacccgccgcgtggaactctaccagtatggcttgcgtggggtgcgcggtgccttgctgacagcgggcgaggcgcacatcgaccgcgaactgttccgccgctacagcctgacccgcgacatcgaccgcgagtttcccggcgcccgcggcttcggcttcatccgccgggtggcggccgccgacgaggccgggttcctgcgccaggcgcgggccgacggccagccggagttccgcatccagcaactgactccgcacgatggcgagcgctacgtcatccagtacatcgagccggtggcgcgcaacggccaggcgctgggcctggacatcgcctcggaagccaatcgccgggaggccgcccgcgccgccctggagaccgggcaggtgcgcctgacggggccgatcaccctggtccaggccagcggcttgcgccagcaatcgttcctcatcctgatgccgatctaccgcagcggcatcactccaccgccggggccccagcgcgaactcgaaggcttcggctggagctatgcgccgctgctgaccggcgaggtgctggccgggttgcccatcgacaacgcggcgatccacctcgaactcagcgacgtcaccggcgacggcgctgccgtgcccttcttcgtcaacggcgccgcggcgccggctcaacgcctgttcggccacatgctgcggcgggagatctacggtcggcactggcagatggcgttcagcgcactgccgctgttcgtccagcgcctgcaccagccttcgccgcgcatcctgttcctggccggcagcctggtcagcctgttgctggcggcgctggtcaacgccagcgccctcggccgccagcgccggcatcgggaggcggcgacccaggcgcggctggcggcgatcgtcggcaattcggcggacggcatcatcggcgtcggcctcgacggcgtcatcagcgactggaatcgcggggccgaggcgttgttcggctaccgcgaggagcaggcggtcgggcggcgggtggtggacctgctggtgccgccatccaaggagaacgaggaactcgacatcctcgcccgcatcgcccgtaaagaacaggtggtcagcttcgataccgtgcgccggcaccaggatggccacctgctcgatgtggcggtgaccgtctcgccgatcctcggtccggacggcggcgtggtcggcgcctcgaagaccgtacgcgacatctccgcgaagaaggccgccgaggcccgcatccgcgaactcaataccggcctggagcaccagatcgccgagcgtaccgccgaactgcgtcggttgaacgtactgctcggcagcgtgctgcaggcggcgtccgaggtgtcgatcatcaccctcgaccgcgacggcatcatcagcggcttcaatctcggtgccgagcggatgctcggctaccgcgccgacgaggtggtcggcaaggcctcgccgaccctgctgcacagcgagcgggagttgctcgcccgcggccaggagctgggcgaggagggtttccgcgtgctggtggcgcgggccgagcaggagggcgccgagacccgcgaatggacctatctgcgcaaggacggctcgccgctcagcgtgacgctttcggttaccgtcctgcgcgacgaggctggggcgatcaacggctacctgggcatcgccgtcgatgtcaccgaatggcgcaacgccgagcgcgagatggccgcggcgcgcgaccagttgcaaatggccgccgacgtggcgcgcctgggcatctggcgctggaacctggccgacgacagcctgcagtggaacgagcgcatgtgcgagctgtatggccagccgctggcgttgcgcgacggcggcctggtctacgagcattggcgcagccgcctgcatccggaagacctcgagcgcaccgaggccagcctgcgcgcggcggtggaggggcgcggcaactacgatgtgatcttccgcgtggtgctgcccgacggcggcatccgcttcatccaggccggcgcgcaggtcgagcgcgacgccgacggcaacccgctgcaggtcaccgggatcaatatcgatatcaccagcgaccagcaactgcaggcgcgcctgcgcgaggccaaggagcaggcggacgccgccagcgcggcgaagtcgtcgttcctggcgaacatgagccacgagatccgcacgccgatgaatgccgtgctgggcatgctgcaactggcccggcagactgatctcaacgaacgccagcgcgactacctggacaaggccagctcggcggccacctcgttgctcggcctgctcaacgacatcctcgactactcgaagatcgaggccggcaagctggtcctggaaatgctccccttcgagctggagccgctgatgcaggacctggccgtggtgctctccggcaaccagggcgacaaggacgtcgaggtgatcttcgacatcgatcccgagctgcccagcgcggtggtcggcgaccgcctgcgcctgcagcagatcctcatcaacctggccggcaacgcactgaagttcaccgcccgcgggcacgtcctggtgagcttgcggcggctggcgcacgacgcccacctggtgcgcctgcgggtgctggtggcggacaccggcatcggcatcagcgcggaacagcagcagcgcatcttcgaaggtttcacccaggccgaggcgtccacctcgcgacgcttcggcggcaccggcctcggcctgttcatctgcaagcgcctggtcgacctgatgggcggtgaattgcgggtcgagagcgcgccgggcagcggtagccggttctggttcgacctggacctcgacgtcgcccacgaccaaccgctgcgtgcggcctgccccggggccggcgaaccgctgcggctgctggtggcggacgacaacctggtggccggcgagctgctcgaacgcacggtcggcgccctcggctggcgcgccgactgcgtcggcagcggcagcgaggcggtggcacgggtccaggcggcgatggccgaaggccgtcgctacgacgtggtgctgatggattggcgcatgcccgatctcgacggcctcagcgcggcgcaactgatccgccagttgcagggcgacctgccgccgcccatggtgatcatgatcaccgcctatggccgcgaggtgctggccgatgcgcgcgaccacagcgcgccgcccttcgtcgattttctcaccaagccggtcacgcccaagcaactggccgactcggtgctgcatgccctgcacggtgaacagggcgccccggccaacccgccgccgcgcccggtggagcgcacccagcggttgcggggcgtgcgtctgctggtagtggaggacaacgcgctgaaccgccaggtcgccgccgagctgttgagcagcgagggcgcccgggtggccctcgccgacggcgggctggcgggcgttcagcaggtgctggaggcgagcgtgccgttcgacgcggtgctgatggacatgcagatgccggatatcgatggtctcgaggcgacccggcgaatccgcgccgacgggcgcttcgccgggctgccgatcctggccatgaccgccaacgcctcgctggccgaccgcgaagcctgcctggcggcgggcatgaacgaccatgtggcgaagccgatcgacaaggagcgcctggtgctttgtctgctcggtcatctcggcaggagcggcgacaggggggcgccggcaacgacagcggacgcgggcgaactggtcgaggcgcggggcgatatcgtcgggcgtttcggcggcagcctggagctgatcgtccaggtgctgcggcgcttcgttccggatatgcaggacctcttcgcccagctcgaacgccagctcggcgagggcgatgtccagggcagcgccgcgaccctgcataccatcaagggcagcgcgtccaccgttggcgccagcgccctggccggccgtgccagcgagctggagcaggccctgcgccgcgccgatccgcggcgcggcatggaaatcctcgccggcatccgcctcgacgaactgcgcaccctgtgcgatgcctgcctgctccgcctgcaggcgatgttcggcgacgtgcaggcggagtcggcgagctga

SEQ ID NO: 325320 - DNA, 585 bp, Pseudomonas aeruginosa
atgagtgtcatcgtcgaaggacagttcccactgcgcatatacgctggcgcggtcggcgagcatgcaggtctgcgggaaggcggcgagttccgccgccagctcctcggcctcggctcgcgccgaaccgctcggcaccacccggttggccaggccgatctgcaacgcttcgtcggccttcaccggacgcccggtgaggatcaggtcgagcgcccggccctgcccgacgatccgcggcaggcgcacgctgccgccatcgatcagcggcaccccgaaacgccggcagaacactccgcagatggcgacctcgtcgggaatcccgtgcagcaggtcgtagccggcccggcgccgttccggcggctcgacgatggcgacgcgcaactgcggcgcccggcgcttcaggtaataggcggtccagaggccggtgtagccggcgccgacgatggccacgtcgacctcgagggattcttccagggacgggcgcgcttcgagcggatcgtccagttgattcatccacaggctgaggtggcgccaggccgacatagagggctccatcgcgagagggaagggggaatgcggcgagagtag

SEQ ID NO: 325321 - DNA, 897 bp, Pseudomonas aeruginosa
gtgaccgcggcgctgcccggcattcccctggaggcctggcggaggcgcggccgcactctggatttcaagggcttcccgatccgctactgggaagccgggcagggtcggccgttgctgctgatccacggttttcccagcgccgcctgggactggcactacctctgggagccgctggcgcagcgctaccgcgtgctggtctgcgacctgctcggcttcggcgattcggccaagccgcgcgcccatcgctacagcctgctggagcaggccgacctgcaacaggggctgctcggccgcctgggagtcgacgagccgctgcacgtgctggcccacgactacggcgacagcgtcgcccaggaactgctcgcccgccatcacgaaggccggctgcggctcgcctcctgcgtgttcctcaatggtgggctgttcccggaaacgcaccgcccggtgctcagccagaagctgttgctgagcccgttgggcgggctgttcggccggctgttcgaccgccgcgccctggcgcgcaacttcgccaaggtcttcggcccgcgcagccagcccggcgagaccgagctggatgccttctggagcctgatcgaaagcaaccaggggcagcgggtgatgcatcgcctgatccgctacatcgtcgaccgccgcgagcagcgtgagcgctgggtggcggcgttgcagcacggcggggtgccgttgcgggtgatcgacggagccgtcgacccgatctccggggcgcacatggtcgagcgctaccggcaactggtcgccgatgccgactgcgtgctgctcgatggcatcggccattatccgcagatcgaagcgccggcggcggtgctcgaacattacctggcgtttcgcgcccgactggatgattcagagttttcttaa

SEQ ID NO: 325322 - DNA, 1491 bp, Pseudomonas aeruginosa
atgttcgaatccgcggaagttggccacagcatcgacaaggacacctacgagaaggccgtcatcgagttgcgcgaagcgctgctcgaggcgcagttcgagctcaagcagcaggcgcgcttcccggtgatcatcctgatcaacggcatcgagggcgccggcaagggcgagacggtcaagctcctcaacgagtggatggacccgcgcctgatcgaggtgcagagcttcctccgtccctccgacgaggaactggagcggccgccgcagtggcgcttctggcggcgcctgccgcccaaggggcggaccggtatcttcttcggcaactggtacagccagatgctctacgcgcgggtcgaggggcatatcaaggaggccaagctggaccaggccatcgatgccgccgaacgcttcgagcgcatgctctgcgacgaaggcgcgctgctcttcaagttctggttccatctctccaagaaacagttgaaggagcgtctcaaggcgctggagaaggatccgcagcacagctggaagctcagtccgctggactggaagcagagcgaggtctacgaccgcttcgtgcattacggcgagcgcgtgctgcgccgcaccagccgggactacgcgccctggtacgtggtggaaggcgcggacgagcgctaccgcgccctgaccgtcggccgcatcctcctcgaagggttgcaggccgcgctggccaccaaggagcgcgccaagcgccagccgcacgccgcaccgctggtgtcgagcctggacaaccgtggcctgctggactccctggacctgggccagtacctggacaaggacgcctacaaggagcagctcgccgccgagcaggcgcgcctggccgggctgatccgcgacaagcgcttccgccagcattcgctggtcgcggtgttcgagggcaacgacgcggccggcaagggcggcgccatccgccgtgtcaccgacgcgctggacccgcgccagtaccatatcgtgccgatcgccgcgccgaccgaagaggagcgcgcgcagccctatctctggcgtttctggcggcacatcccggcgcgccgccagttcaccatcttcgaccgttcctggtacggccgcgtgctggtggaacgcatcgagggcttctgcgctccggccgactggctgcgcgcctatggcgagatcaacgacttcgaggagcagctcagcgagtacgggatcatcgtggtgaagttctggctggcgatcgacaagcagacccagatggagcgcttcaaggagcgcgagaaaaccccctacaagcgctacaagatcaccgaggaagactggcgcaaccgcgacaagtgggaccagtacgtggacgcggtgggcgacatggtcgaccgtaccagcaccgagatcgcgccctggaccctggtcgaagccaacgacaagcgcttcgcccgggtcaaggtgctgcgcaccatcaacgacgccatcgaggcggcgtacaagaaggacaagtga

SEQ ID NO: 325323 - DNA, 1419 bp, Pseudomonas aeruginosa
atggccggaactggcgccctggagcgaggccctgctgggccagtaccttgccgtgcacccgggcttccagcgcctggcgttcgcgggcggaaggatcggcctgaccctgctgctgggcgatgccctggagtgcctgccgcagctcgacgcgcgggtcgacgcctggttcctcgacggcttcgccccggcgaagaacccggacatgtggtcgcccgcgctgttcgccgaactggcgcgactgtcggcgccgcaggcgaccctgggcaccttcaccagcgccggtttcgtccgccgcgggctgatcgaggccggtttcgccatgcaacgggtaccgggctacgggcagaagcgcgagatgctcggcggcacctaccaggggccgccggcgaacgccggcaagccctggtacgcacgccccgcgccccacgccgggcgccgcgcggcactggtggtcggcggcggcctggccggctgcgccagcgccgccagcctcgccgcgcgcggctggcaggtgaccctgatcgaacgccatcccggcctcgcccgggaagcctcgggcaacccccagggcgtgctctacctgaaactctcggcccacggcacgccgctgtcgcgcctggtgctcagcggcttcggccatacccgccggctgctcgaacgcctgcggcgcggccacgactgggacgcctgcggcgtactgcaactggccttcgacgccaaggaagcgcaacgccaggcgcaactggccgcagccttccccgccgacctgctgcacggcctggaccgcgagcaggccgagcgcctcgccggcgtcgccctgcccgccggcggcctgttctatcccgaagccggctgggtccatccgcccgcgctgtgccaggccctggccgccacccccgggatcaccctgctgagcggccgggcggtacgcttgcgccgcgagggcgacgactggtgcgcctacgccggcgacgaatgcctggcccgcgcgccactcgcgatcctcgccaccgccgccgacatccgcgacttcccgcccgccgccgagctgccgctgaagcgcattcgcgggcaggtcacccgcctgccggccaccccgcaaagccgggcgctgcgcaccgtggtctgcgccgagggctacgtcgcaccgccgcgtggcgacgaacacaccctcggcgccagcttcgacttcaagagcgaagacctggcgccgaccctcgccgaacaccagggcaacctcgaactgctgcgggagatatcccccgacctgttgcagcgcctgggcgccgacgacctgccgctggagcgcctggaaggccgcgcggcgttccgctgcaccagccccgactacctgcccctggtaggcccgctggccgagcgcgcggccttcgacgaggcctacgcggtgctcgcccgtga

SEQ ID NO: 325324 - DNA, 1059 bp, Pseudomonas aeruginosa
ttgctggccctcagcgaaagcgccgacgcggccaagcccgacgaggaactggacggtcgcatcgaccacctggccgccgaactggcgcgcctggcggccggcctcgaagccatccgccaggacgacccgctggttcccgagcaggtggactcgcgtaccgtggccgcggtgatcgccggctggaccggcatcccggtgggcaagatgctcgccgacgaagcccacgccatccgttccctggcgcaacgaatgggccagcgggtgatgggccaggaggccgccctgggcgccatcgcccagcgcatccaggcctatcgcgccggactcagcgacccggccaagccggtcggcgtattcctcctgcccggccccaccggcgtgggcaagaccgagaccgcctacgccctggccgacgccctctacggcggcgaacgcaacctgatcagcatcaacctctccgagtaccaggaggcccacaccgtcagccagctcaagggcgccccgcccggctacgtcggctacggcagtggcggcgtgctcaccgaagcggtgcgccgcaagccctattcggtggtgctgctggacgagatcgagaaagcccatccggacgtgctggaagccttctacaacgtgttcgacaagggtgtgatggaagacggcaccggcctggtggtggacttcaggaacaccgtgatcctcgccaccagcaacgtcggcgccgaactgctgctggacagcccggccgaacaggtcgccaccccggccttcgacgagcgcctgcgcaaagtcttgctgcaaaccttccgcccggcgttcctcgcgcgcatgaccgtggtgccttaccggccgctggaggaagccaccctggaaggcatcgtcgtggccaagctggaaaaactgcgggaacgctacaaggccgctaccggcaaacagttcgacttcgacccggccatcgtcaaggccgtgctcgccaagtgcagcgcggcgggcgcgcgggatatcgagaacgtgctgatggcgcaggtgacggggaagttggcggagtgggtactcgaatga

SEQ ID NO: 325325 - DNA, 1821 bp, Pseudomonas aeruginosa
atgaacatcctcggctgcctcgaccggcccagctccggcagctaccacttcgccggccacgacgtcgccgaactggacagcgacgagcaggcctggctgcgccgcgaggcattcggcttcgtgttccagggctatcacctgatcccctccgcctcggcccaggaaaacgtcgagatgccggcgatctacgccggcatcccggcgagcgagcggcacacccgcgcgcgggccctgctcgaacgcctgggcctggccgagcgcaccgccaaccgtccgcaccagttgtccggcggccagcagcagcgggtgtcgatcgcccgcgcgctgatgaacggcggccatatcatcctcgccgacgaacccaccggcgccctcgacagccacagcggcgcggaagtcatggcgctgctcgacgagctggccagccagggccacgtggtgatcctgatcacccacgaccgcgacgtcgccgcccgcgccaagcgcatcatcgaggtgcgcgacggcgagatcgtcagcgacagcgccaacgacgagcgcccggcgcaaccgagcgccggcgtcgagcgccacctgcaggccgacgatctcagccagcgcctcgccgagggcagcagcgaaccctcgggggcctggcgcgccgaactgctggaggcggtgcgcgccgcctggcgggtgatgtggatcaatcggttccgcaccgcgctgaccctgctcgggatcatcatcggcgtcgcctcggtggtggtcatgctcgccgtcggcgagggcagcaaacgccaggtgatggcgcagatgggcgcgttcggctcgaacatcatctatctcagcggctactcgccgaacccgcgcgcgccgatgggcatcgtcagcagcgacgacgtcgccgccatcgccaccctgccccaggtgaagaaggtcatgccggtgaacggcggcgagctggtggtgcgctacggcaacatcgactaccacgcctacgtcggcggcaacaacaccgacttcccggaaatcctcaactggccggtggccgagggcagctacttcaccgagcgcgacgaagacgccgccaccacggtcgcggtgatcggctacaaggtgcgcaagaagctgttcggcagcgccaacccgatcggccgctacatcctcatcgagaacgtgccgttccaggtcatcggcgtgctcgccgagaaaggctccagctccggcgacaaggatgccgacaaccgcatcgccatcccctactccgctgccagcatccgcctgttcggcacgcgcaaccccgagtacgtgatcatcgccgccgccgacgcccagcgcgtgcaccaggccgaacgcgccatcgaccagttgatgctgcgcctgcaccgcggccagcgcgactacgagctgaccaacaacgcggcgatgatccaggccgaggcgaagacccagaacaccctgtcgctgatgctcggctcgatcgccgcgatctccctgctggtgggcgggatcggcgtgatgaacatcatgctcatgaccgtgcgtgaacgcactcgcgagatcggcatccgcatggccaccggcgcccgccagggcgatatcctccgccagttcctcaccgaagcggcgatgctctcggtggtcggcggcctggccgggatcgccctggccctgtgcatcggcggcgtgctgctgctcggccaggtcgcggtggccttttccctgtcggccatcgtcggcgccttcagttgcgcgctggtcaccggcctggtgttcggcttcatgccggcgcgcaaggccgcccagctggacccggtggccgccctggccagccaatga

SEQ ID NO: 325326 - DNA, 1419 bp, Pseudomonas aeruginosa
atgaagaatctttccctgatttccgcctgcctgctgctcggcgcctgcggcagcacgccggcgcccctcgacagcggcctggccgcgccccctcagtggcgctacctggcggccgggcgcagcgatgccagcgacatccgccagtggtggaaggccttcggcgcgccggaactggacagcctgctgcaacgcgccctgctgaacagccaggacctcggcgcggcggtggcccgcgtgcgccaggcccaggcctcggcggtgatcgccggcgcgccgctgctgccggagctgaatgcgacgctcggcgccagccggcagaaactcctgcgcggctcgggctatagcggtaccgacgcgacctccgacaacgatgccgtcgactccttctccgccggcctcagcgccagctacgaagtggacttctggggcggtcgccgagctgcctaccgcagtgccctggaaagcctcaaggccagcgagtacgaccgcgccacggtagagctgaccctgctctccggcgtcgccaacagctacctgcaggtattggcgctgcgcgaacagcagcgcatcgccaggctcaacctggacaacgccgagcacgtcctgcgcctggtggagacccgccatgccgcgggctcggccaccgccctggaggtcgcccagcagagcagcctggtcgccagccagcgcaagcagctgccgctactcgagcagcaggcccatgaggcgctgattaccctggccaccctgatcggcgagccggtgcaggcgctacaggtggccgagcgacctttcgacagcctgcgctggccggagaccggaacgggcctgccgagcgaactgctcagccgccgtcccgatatcgccaacgccgaagcgcaactggccgcggcccaggccgacgtgcaggtggcgcgcgcggcgctgttccccaagctgaccctgagcgcctcgctgtcgtccggcgccaaccgcgccgccgacactttccgcaacccctattacaacctgggcgccaacctgctcgccccgatcttcaaccacggccgcctgcgcgctgagcgcgaccgcagcctggcgcgccaggaagaactgctggaaacctaccgcaaggcgatcctcaccgcctttgccgacaccgaacgctcgctgaacagcatcgacggcctcgaccgccagctgcactggcagcagcaggagctggagcaggcgcagcgcgccttcgatctctccgacagccgctaccaggccggcgcggaaaccctgctgacggtcctcgaaacgcaacgcacgctgtacgcggcgcaggatgccgccgtgcaactgcgactggcccgcctgcaggcctcggtcggcctgtacaaggccctcggcggcggctggcagagcgaccgccagggtctcgcgcggaaagactga

SEQ ID NO: 325327 - DNA, 135 bp, Pseudomonas aeruginosa
gtggaaaccatgaagctggctttgcgcatcatcttcagcgaagaagatcaactgagcggctggctcaagcgtgcgccgcggcggccctggtacgcgcgcaacctgaagctggcgcgcgaccagctcaggcgctga

SEQ ID NO: 325328 - DNA, 828 bp, Pseudomonas aeruginosa
atgacgaaaaggaaactggcctatatctggtccctgagaaacgccgcggccgacaaggccggccagtacgtgccgtacaagggcgaacagcggtacatgaagtcggtactggagtccttggtggaggcgctgaaccagactgcgctgggcgatgcctacgagctcgtgggcgtgatctacgacgacgacgcggagctgcctcgcgaccagggaaaaatcaaggattacggtttcgcctatcgtcccgggcagcaatggttctatccggcagacctgcaggtgcaaggcaagaccctgaacgacctcttgctcagcgtgccgtccacctaccgccggtacccgcggggtacccccgagcatgtggccggcaagagcgatttcgagcgacgcctgcatgacaccctggtggagctgggcgccgatgtggtggtattggacgggctcctggtcatcctcgatgagctggtacgcccgggcgctccgttcgcacggcggatcatgaatatccatcctggcgtgacgcgcgaggactcgccttacgagcgtcgtggcgcctatgcgaccctggacgcgttgtatggagcgcggggcgagaaggtggtggattgggcgaccatggaaaaggtcgcggtcgagccgctgtactggaccggagcatcgttccactatgtggacaatggcatcgattccggcgaagtgttccatgatgtgctgaaaacggagatttcacccgacgacaccatcctcgagctgcgctggaacaacttcaacaacagcctgttcccggccttgcacgaagggctggcgctgctcgccgagaagctctga

SEQ ID NO: 325329 - DNA, 1290 bp, Pseudomonas aeruginosa
atgcttctcggcctcggcggtgaccttgcctttcagcgcgcggtcctcgaagaccgcctcgatgatcaggtcgcagccttcgaaatcggcttcgctgacgctcggcacgatccgcgcgaggaaggcgtcgcgcttctcggcggacaggtgcccgcgcgcaactttcttgtccagcagcctggccgaataggccttgcccttctccgccgcttccagcgagacgtccttgagcaccacctcgatgccggccgccgccgatacgtaggcgatgcccgcgcccatcatcccggcgccgagcacgccgacctttttcgtcgcccgcaccggatacccctgcggccgcgacttgccggcgttgatctcgttgagctggaaccagaaggtgccgatcatgttcttcgccacctggccggtggtcagctcggtgaaatagcgcgcctcgatcagttgcgcggtgtcgaaatcgacctgggcgccctccaccgccgcgcacatgatcttctcgggcgccgggaagcaacccttggtcttgtcgcgcagcaccgacggtgcgatggccagcatctgcgccacgttgggactggcaggcgtaccgccgggaatcttgtagccggcgctgtcccagggctgcttcgccgccgggttggcgaggatccaggcgcgggccttctccagcatttcctcggggctgtcggccagttcgtggatcagcccggccttgagcgcttccgccggacgcaccttcttgccttcggcgaggtacggcagggctttctccagaccaagcaggcgcaccatacgtaccaccccgccgccgcccggcaacaggccgagagtcacctccggcaggccgagctgcacgccgggattgtccagggcgatgcggtggtggcaggccaggcagatctcccagccgccgcccagcgcagcgccgttgatcgcggcgaccaccggcttgccgagggtctccaggcgccgcagttggcccttgagttcgaggatgccctggtagaaggccggggcgtcggccttggtgaccttgatcagctcgttgagatcgccgccggcgaagaaggtcttcttcgccgaggtcagcaccacgccggcgatcccctctttctccgcctccagccgcgcgatggtcttcgccatcgcctcgcggtagacaccgttcatggtgttggcgctctgcccgggcatgtccatggtcaggacgacgacgttgtcctggcctttttcgtaacggatagcgtcagtcattccggttctcccttcacacgcgctcgatga

SEQ ID NO: 325330 - DNA, 438 bp, Pseudomonas aeruginosa
atggatttaacgagcaaggtcaaccgactgcttgccgagttcgcaggccgtatcggtttgccttccctgtccctcgacgaagagggcatggcgagcctgctgttcgacgaacaggtgggcgtcaccctgttgctgctcgccgagcgcgagcgtctgttgctggaggccgatgtggcgggcatcgatgtgctgggcgaggggatctttcgccagctcgccagcttcaaccgccattggcaccgtttcgatctgcatttcggcttcgacgagctgaccggcaaggtccagttgtatgcgcagattctcgcagcgcaactgaccctcgaatgcttcgaggcgaccctggccaacctgctcgaccacgccgagttctggcaacgcctgctgccgtgcggcagcgatcgcgaggcggtcgctgcggtcggcatgagggtttga

SEQ ID NO: 325331 - DNA, 243 bp, Pseudomonas aeruginosa
atgggcgacatgaacgaatacaccgaagacaccctgcgggcgaccgtccaggccgggcagggcctggggcttgccgcggacgccggcgagctgctgttcctggcgccggagcgagagctggcgcgagccgccgaagaggagctgctggccgaactgcggcgcatgcgcagttcccagccgacgcagggcgagcagggtacccggccgcggcgtccgacgccgatgcgtggcttgttgatctga

SEQ ID NO: 325332 - DNA, 1770 bp, Pseudomonas aeruginosa
ttgccggagctggccaagcaccagatccgcttcatccgccggcgtcactggacgctgaagatcaagacctgggtgcggcgcttcttccgcgacgagatcgcgccgatcatcaccccgatcggcctcgacccgacccacccgttcccgctgctggtgaacaagagcctcaacttcatcgtcgagctggaggggatggatgccttcggccgcgactccggcctggcgatcatcccggcgccgcgcctgctgccacggatcatcaagctgccggaagacgttggcggcgagggcgacaactacgtgttcctgtcgtcgatgatccacgcccacgccgacgacctgttccccggcatgaaggtgaagggctgctaccagttccgcctgacccgcaacgccgacctgtcggtggacaccgaggatgtcgaggacctggcccgcgcgctgcgcggcgagctgttctcgcgtcgctacggggacgcggtacgcctggaggtggtggatacctgcccgcagaacctgaccaactacctgctcaagcaattcggcctgtccgaaagcgagttgtacaaggtcagcggcccggtcaacctgacccgcctgttcagcgtcaccggcctggaaagccatccggagctgcagtacccgcccttcaccccggcgatcccgcgtcttttgcagaagaaggaaaacctcttcaacatcctcagcaagctcgatgtgttgctgatgcacccgttcgaatccttcaccccggtgatcgacctgctgcgccaggccgccaaggatccgaacgtgctggcgatcaagcagaccctgtaccgcagcggtgccaactctgagatcgtcgacgccctggtcgaggcggcacgcaacggcaaggaggtcaccgcggtgatcgagctgcgcgcccgcttcgacgaagagtccaacctgcaactggccagccgcctgcaacaggccggcgcggtagtgatctacggcgtggtcggcttcaagacccacgccaagatgatgctgatcctccgtcgcgaggacggcgaactgcgccgctacgcgcacctgggcaccggcaactaccatgccggcaacgctcgcctgtacaccgactacagcctgctgaccgccgacgtggcgctctgcgaggacctgcacaagctgttcaaccagctgatcgggatgggcaagacgctgcgcatgaagaagctgttgcatgcgccgttcaccctgaagaagaacctgctggaaatgatcaaccgcgaggcggcccaggcggcgctcggccagccggcgcacatcatggccaaggtcaactcgctgaccgatccgaaggtcatccgcgccctgtacaaggccagccaggccggggtcaggatcgacctggtggtgcgtggcatgtgctgcctgcggccaggcatcccgggggtctcgcacaatatccacgtgcgctcgatcatcggacgcttcctcgagcacagccgcatctactacttcctcaacggcggcgacgagaagctctatctctccagcgccgactggatggagcgcaacctcgacatgcgcgtcgagacctgcttcccggtggaaggcaagaagctggtgcagcgggtcaagaaggaactggaaacgtatctgaccgacaacacccaggcctgggtgttgcaggccgacggtagctaccagcggctcagtcccaccggtaaccagaacccccgcaatacccaggcgaccctgctggagaagctggccgcgccggtgcttaccgcacgttga

SEQ ID NO: 325333 - DNA, 1347 bp, Pseudomonas aeruginosa
atgttcggaatctttcgtcccgcgccacaccaggcgccactgcccgatgccgaggtggacagcacctaccggcgcctgcgctggcagatcttcgccggtatcttcatcggctacgcgggttactacctgctgcgcaagaacttctccctggccatgccctacctcatcgaggacggctacagtcgcggccagctgggcgtcgcgatgtcggccatcgccatcgcctacggcctgtcgaaattcatcatgggcctggtctcggaccgttccaacccacgggtcttcctgccgttcggcctgttggtgtcggcggcggtgatgttcattttcggattcgcgcactgggctacctccagcgtcgccatcatgttcgtcctgctcttcattaacggctgggcccagggcatgggctggccgccgagcggacggaccatggtccactggtggtcgcagaaggagcgcggcagcgtggtctcggtgtggaacgtcgcccacaatgtcggcggcggcctgatcggcccgctgttcctgctcggcctggcgctgttcggcgactggcgctcggccttctacgtgccggccatcgtcgccgtgggcgtagccgtgttcgcctatttcgccatgcgcgacaccccgcagtcctgcggcctgccgccgatcgagaagcataaggacgactaccccgaaggctacgacgaacaccacgagcgcgagctgtcgaccaaggagatcttcgtcacctacgtgctgcgcaacaagctgctctggtacatcgccctggccaacgtgttcgtctacctgctgcgctacggtgtgctcgactgggcgccgacctacctcaaggaggccaagcacttcaacgtcgacaagtcgtcctgggcgtacttcttctacgaatgggcggggattcccggcaccctgctctgcggctggctgtcggacaagctgttcaagggcaatcgcggcgccaccggcgtggtgttcatgatcctggtgaccgtcggcaccctgatctactggctgaacccggccggcaacccggcgatcgacatggccgcgctgatcatgatcggcttcctgatctacggcccggtgatgctgatcggcttgcaggccctggagctggcgccgaagaaagcggccggcaccgccgccggcttcaccggtctgttcggctacctcggcggctcggtggcagccaacgccctggtcggctacacggtggaccacttcggctgggacggtggcttcaagctgctgatcggcgcctgcctgctggccatcctgttcctctgcctgaccctgcgcaaacccgcggtccaggccgcgccgcagcaagccggctga

SEQ ID NO: 325334 - DNA, 783 bp, Pseudomonas aeruginosa
atgaaagccgtcctctgcaaagccttcggcccggccagcagcctggtgctggaagaaatcgccagcccgagcccggcgaagaacgaaatcctcctcgatgtgcacgccgccggggtcaacttcccagacaccctgatcatcgagggcaagtaccagttcaaaccgcccttccccttctccccgggcggcgaggcggccggagtggtcgccgcggtcggcgaaaaggtcgcccacgtcaggcccggcgaccgggtcatggccctgaccggctggggcagcttcgccgagcaggtcaaggtgcccggctataacgtgatgccgatacccgaaggcatggacttcgccagcgccgccgccttcggcatgacctacggcacctcgatgcacgccctgaaacagcgcgccaacctgcaacccggcgagaccctgctggtgctcggcgcttccggcggggtcgggctggctgccgtggagatcggcaaggccatgggcgcccgggtgatcgctgccgccagtacccccgacaagctcgccgtggccaaggccgccggcgccgacgaactgatcaactacagcgaaggtagcctgcgcgagcagctcaaggccttgaccggcggccagggcgtcgatgtgatctacgatccggtgggcggcgaactgttcgaggaggccttccgcagcatcgcctggaacggacggatgctggtggtcggcttcgccagcggcagcatcccttcgctgccgggtttatggacaaccatcagttgcggcgatgctgattga

SEQ ID NO: 325335 - DNA, 759 bp, Pseudomonas aeruginosa
atgcagtggaatctggagcagatccgcctgttcgtcagcgtcgccgagcgccagtcgttctctgccgccgcccgcgaactgaagcgggtgcaatcggcggtgagcaacggcatcgcgctgctggaggcggacctcggcgtcaccctgttcgaacgcagcagcggacgccagccgcgcctgaccgacgagggccgggtgctgctggcggaggcgcgcgaggtgctgcgccagtgcgagcgcctgcaggggcgcgcgctgggcctggcgcgcggcgaggagccgcggctgcgcctggcccaggacgaggcgatgccctaccagccggtgctggacagcctggaagcgctggcgcagcgctttcccagtctggaggtgcaggtgtccagcggcggccagggcgacgtgacccgtcgtttgctcgaggaggtcagtcgccgcgagctggcacagcaccggcaacttttgatcgtgccccagcagagcggctatccgggcggcgagcagatcagcccgcaggtgtggcggctggacagcttctattccatggccgagttgctgatgcgcaacctcggctgggcctggctgccgcggcacgtggtgcagtaccccacctacgaccggctgatggtggagctgaccagcgactggacgccgccgtcgctggtggtcgaactggtctggcggcgcaacgaggtgctcggcccggcggcggcctggctcggcgaaaccttcacccgccacctgcgcgccatcggctga

SEQ ID NO: 325336 - DNA, 921 bp, Pseudomonas aeruginosa
atgccccgtatgctcgcccgcaaggatccgtccgccttcaagaccctgccgctgctggtggaggcctccccggacgggctggtctaccaggccctcggcctgccgctgaacttccagcagatgctcgtacgccgccgccgcatggaggtagccgacccgcagcgcttcgtcgccgagctggccaacctgggggtctcggtgcgcttgaccctgaactggcagggccgcgactactgggtgctggtccgtcagcgccggctggaccgcggcgataccgtgctcaagctgatctccggctacgtaccggcccacgaactgaacctgccgctgctcacggcgatccaggaagtcgccgaggaatgcctggtggagaccgccggcggctggctcggcgggcgcttcggcgacacctggctgccgacgccctaccagggttcgctgcgctaccgggagaacagccacttcgtcctcaccccgctgtccggcgccgcccgtccggtgcaagccggcagcctgcgcttgctggagcgcccacgcgcctacgtacacctgcccacggcctcgctgcaactggtctacgacatgcgcctggagctgccgcgcgatgcgcgcgagccgagcctctaccatgtcgacgagcggctcgagagcggtccgctggtggcgcgtctggaccgtcggcgccccgatctctacctgctgccgctggaccaagggcgccccaccggcgacctgttcaccctgcgcaagggccagttgcgccctgcggccacccgcggcctgtggttggccgagagctttgccgtacaggacggctggctggtgcatgaggaacgcatccgtttccgcgactggctggcactgtggccatccagcaacggcgaccaggccggcggtgggcgcgaccgcgccagcgcctga

SEQ ID NO: 325337 - DNA, 1284 bp, Pseudomonas aeruginosa
atgagcaccgatgtacagggccgtgccctggctgtactgaaccgtgtcgcccaggccgactggccggatcgcttcaatcttcgcaaacccttcgagaaactgctctacagcggcagccgtaccggcttccgcctggccagcgagcgttcggcgaagcaggcgaagggaccgcgcaaggccgatccggacgggttgttcgacctgtcgttctccgacgaccagcagatgctggtggacatgctcgaaggcttcgccctggaggtgttgcgtccgctggctcatgacgcggatgccgaggccagcctgccggcggaactgctcaaccaggcgctggagctgggcctgacccactatggggtcggcgaggtgcacggcggcatggccggtgagcgcaccacggtgaccactgcccttatcgccgaggccctggccaagggcgatctgtcgctggcggcggccctgctggtgccgttgtcggcggccaactgcatccgccgctggggcagcccctcgcagcaggcgcagtggctgccggcgttcgtcagcgaagagggggcgccgctcaccgccatcgcggtcaacgagccgagtctgctgttcgacccgcagaaactggcgacccgcgcccggcgcaagggcagtcactacctgctttccggagagaaatgcctggtcctgcgcggcctggaggccagccgcctgatcgtcgcggcgaagaccgacgaggggcctgcgctgttcctggtggaagcctccgccaagggcgtcgagcgacgtgccgagccggcgatgggactgaaggccggcggcaccgcccggttgcgcctgaagagcgtcaaggtgccggcggacaaccgcctggccgccgagcatttcgactaccgggccttcctcgatcacgcggccctggcctggtgtgccctggcgctgggcaccgggcaggcggcgctggactacgtgatcgcctactgcaacgagcgcgaggccttcggcgagccgatcagccatcgccagggggtcgccttcatggtcgccgacatcgccatcgaactggacgccatgcgcctgatggtctggcgcgcctgcgccctggccgagcgcggccagccgttccagcgcgaggcttacctggcgcgtctgctgtgcgccgagaaggcgatgaagatcggcaccgacgccgtgcaactgctcggcggccacggcttcaccaaggagcatccggccgagcgctggtaccgcgacctgcgcgcggtagcgctgatggccggcggcctgcacctgtga

SEQ ID NO: 325338 - DNA, 1200 bp, Pseudomonas aeruginosa
atgttcgcagctacccgactgacccgtcttcgccacgataccagccgcatcctcagccactggatcctgccgctgggctggctggccctgctcaccggaatgttctgggtcggcgaccgctccgactatcaccggcttttctacatcctgcttgcagccccgacgctgcttttcgtgattatccagccgcaactgttacgtccactgacccgctcgccgctgctcatcgccattctggccttcagcgcttacatgatgctcagcctgctctggtcaacgccggaaaactcggcgggttcgctgttcaaacggccgctgtacatcgttctactgctcttctgtgtggggatactggcgctacaggcacccgaacgcctacgcaacattacttggctggcggcactgggagcagttttcgccgccgcggtcacggtggtccactaccacctccagacacatcctgcatggatgcgcttgtccggatacggggctctctacaacccactgctgagtgcccatgtatatggcgcattcactgtggtctggctggtttactggatgcaatcacgccatcttcttgcgccactgccgctgctgtccttggcgatactatgctgcctgttgctgtcgaccggctcacgcaccccattgatcgcaatcaccgcctgcctgggctggctgttgatcgccggcaatcagaaaaagaccctgatcgtcatagggttggcagcgctgggcatgatcgtggcttatatcttcaatccagagctgctcacccagcgtggcgtctccttccgcccggaaatctggagcgaatccctgcgccagatcggcgagcacccctggcttggccatggctacgatcacccgatgcggatcaagctggccaacggcatgctgctggccgatccgcacaacatcgagttgggcgtgctgttcgccggcgggatcgtcggcctgctgctatggtctgcgatctacgccctggccttcatcttcgcctggaagaaccgtcgcgaccccatggtgctgctggcgtctacctggctggtcttcggactggcttccggcctcacggaaggcaacgcgttcatgtcccgccccaaggagcactggtttctgatctggattccattggccctgctgtacgccctgtgggtgcagaaaagcgcccgcgacaaaaacgaaaccgcctcctga

SEQ ID NO: 325339 - DNA, 885 bp, Pseudomonas aeruginosa
atgacgctcgtcgatgatggttcgcagccattggtttccgtgatcatcgcttcctataaccatgaaaagtacatagaagcgagcatcgccagcgtggctgcgcagacgtaccgcaacgtggaactgctggtggtggacgatggttccagcgatggcagcgtcgagcttttgcacgggctccaggcgaagtacggcttcgacctcagggtccagcagaaccagggactgtcgaaaacgctcaacgaggcgatcgccagggcccggggaaatctcatcgtgcccttcgggtcggacgacatcatgttgccgcaacgcctggagaaacaggtggcacacatgtgggacaagcccgaggtaggtatctgcgcgggcaatatcgagatcatcgactccaatggccgggtcatgccgggtaaggagcagcgcaaacgcgacctgcctttccgccgcctcgacttcgatgacctgttcctggaccgcaagccgggcccgatggcgcccaccttgatgttccggcgggaagccctggagaaggtcggcggtttcgatccggacatacgcctggaagatgtctatatcgaactggcggtgaccaaggctggctacgtcatcgacattcttggcgaggtcctcgcccagtaccgcaagcatcccaccaatacgtacaagaacgcccgtttcatggtggacaacgtattcaagacgtacagccagttcagcgatcaccccgattacgagcaggtgatcatgcgcttccgcaattcgatgtttctcaagtgctcgaaccgggacaaggtgctggcccgggagctgctctccggcttgccgctgaagtactggaacgagaagaccttccgcggcattgcgcggttgtttttctcctag

SEQ ID NO: 325340 - DNA, 897 bp, Pseudomonas aeruginosa
atgctgaacaggttgcgcgccttccgcgaacgcggttggcgcgaagtggacgcgccgacctacgcccaggcctggcagcgtttcggcggcagcgtcgcgacccacccgctggtggtcgagcagctcgccgaaatggctggaatcccggtgcgttacctgggttgggagagcgctggcgaactggttgcggcgatcccgacctggggccgccacctggcgttgtccaaggacgtgctcaagcggcgcggcaagaagggcctgtacgacctgggcaacgccgaactgatcctgccggtggccggcgatgcccgcatcgccctccgccatgggggacgctacctgtcggtgctgcatgagcggaacatcgtcacgctgcgcccgcaggccgagcaactggctttcgctcgcgcccccgaggatttctccaagaagttccgctacaaccagcggcgcgaagtgcgcctggtggaggaggccggtggccaggtgcgccaggcagacagcttcgccccggccgagttcgccgccatctatcttgaactgttccagcgtcgctggggtttcccggccaccggcgcggagcgcatggccgaggtcttcgagcggctgcgcgaattgctgcgcggctcggtcctgctgctcaacgaccagcccatcgcggtccaggtactgtatcgcgccgaagcgccgggctggctcagcgtcgagtacatcaacggcggcgtcgatccgcagacccgcgagttcagccctggcagcgtgctcagttacctgaacacccaggccgcctgggaggatgcgcgagcgctgggcaaacccctgcgctattcgttcggtcgcgccgaccgcgaatacaaggatcgctggtgccatccttctccggtcttccaggtctga

SEQ ID NO: 325341 - DNA, 939 bp, Pseudomonas aeruginosa
atgcacgatttcaccctccacgacctccaatgcttcgacgcagtggtcgacgccggcggcttccaggccgccgcacagcgcctgcaccgctcccatccggcggtgttcgccgccgttgccaggctggagcgccagctcggcctggtgctgctggaacgaggcggctaccgggtcggcctgaccgccgccggtcgcgccttccaccagcgtgcccaggccctgctctacgaactggaagggctgcggggccacgccgcgcacctggcccagggcgaggaaagcgagctgcgcgtggtactgggcgacctctgcccgccgcgcccggccctggcgctgctcgcagggttcttcggcagccagccgcagacccgcctgcaattgctgttcgaaaccgtcagcggcccgctggagcgcctgctggacggcgaggccgacctgatcctgcatcgcgtggacaagtccgacccacgcctggaatggctcgacctgtgcagggtcgggctggtcccggtcatcgcaccgggcctgctcggcgatcctccgccgcgaccggtgcgcccggaacaactgcgccccttcgcccagtgcgtgatgcgcgacagcgcccgccattcgccgccgacggactatttcatgctcgccggcgcgcgacagtgcagcgtgccggaccagcgaacgaagaaagagatgatcctccagggcctcggctgggggcacctgccggacttcctggtcgacgaggaactggccgacggccgcctgctcgccctggccgggccgcatctgccaggacgcagcgaagaggtggtggcggcgcgccggcgcgatcgcgcgcagggcccggtagcggaacgcctgtgggcgttcctgcgggacaacgctacgacgttgcgggggaaaagcggcgacagggcggagggcgccaggcgtcctcggtga

SEQ ID NO: 325342 - DNA, 477 bp, Pseudomonas aeruginosa
atgactctcgaaatccgtcccgccgtaccggccgacgccgaacagatccttgccttcatcatcgaactggccgactacgagcgcgcccgccacgaggtggtcaccgatgtcgaaggcatccgccgcagcctgttcgccgaaggctcgccgacccgcgcgctgatgtgcctgagcgaaggccggccgatcggctatgcggtgtatttctacagctactcgacctggctggggcgcaacggcatctacctcgaagacctctacgtcacccctgagtaccgtggcgtcggcgccggtcgccggctgctccgcgagctggcccgcgaggccgtggccaacgactgcggacgcctggagtggagcgtgctggactggaaccagccggccatcgacttctaccgctccatcggcgcgctgccgcaggacgagtgggtgcgctaccggctggatggcgaggcgttgcgcaagatggcggagtag

SEQ ID NO: 325343 - DNA, 1728 bp, Pseudomonas aeruginosa
atgtccagcaccccgaagccgcccgcctcgccccgcgagttttctccctcgctgctcgacctcggcaccctggaaagcctcgacagcctgccgcgcgccggtcagcggagcgcggagttctccgcctcactgctcgacctgggcactccggccagtctcgactgcctgccacgcgccgggctgcgcgcagcggagttctcggcggcgcgcctggacctgggcactcccgccagtctcgattgcctgccccgcgccagccatcacgccggcaccgaactgccgccgctgagcccgcgcctgtacagcgccgatctcgccccgaccaaggccgaagggcgccgctggggacgctacagcctgttcgcgctgtggaccaacgatgtgcacaacatcgccaactactccttcgccatcggcctcttcgccctcggcatgagcggtgcgcagatcctcgccgcgctggccctgggcgcgctgatggtttacgggctgatgaacctgtccggctacatgggccagaagaccgggctgccctacccggtgatgtgccgcatcgccttcggcatccacggcgcgcaactccccgcgctgatccgcgcggtgatcgccatcgcctggttcggcatccagacctatctcgcctccatcgtcctgcgcgtgctgctgacggcgatctggccggggctcgcagcctacgaccaggacgccatcctcgggctgtcgagcctgggctgggcgaccttcgtcgccatctggtgcgtgcaactgctgatcttcgcctacggcatggagatggtgcgtcgctacgaatccttcgccggaccggtgatcctgctcaccgtcgccgccctcgccgcctggatgtacctgcgcgccggcgcctccatcgcctggtcaagcggcgaacccatgagcggttcgcagatgtggttgaagatcttcggcggcgcggcgttctgggtgaccctgtacggcaccatgatcctgaacttctgcgacttcgcccgcggctgcccggaccggcgcaccatcagcgtcggcaacttctgggggctgccggtgaacatcctgctgttcggcctgttcgcggtggtcctcgccggcgcccagttcaggatcgacggccagctcatccagagccccaccgacatcgtcgccgcgatccccgacaccctcttcctggtgctggccagcctggcgctgctgatcgtcaccgtggcggtgaacatcatggccaacttcgtcgccccggcctacgtactcaccaacctggcgccgaacctgctgaacttccgccgcgccgggctgatcagcgcgaccatcgcagtgctgatcctgccctggcacctgtacaacagccccggggtgatcctctacttcctcggcggcctcggcgcgctgctcggcccgctgtacgggatcatcatggtcgactactacctggtgcggaaaggccgggtgaacctgccggagctgtacaccgaaagccgcgccggcgcctatcactacgcgcgaggggtgaacccgcgggccatcgccgcgttcgtcccggcggcgatcatctccaccctgctggcattgttgccggcattcgccgagctatcgccgttctcctggttcttcggcgccggcctggccggcctgatccactatgccctggccaagcgccgcacggcctaccgcgaagtttccggcgaagcgatcgcggtggacagcgtgcagcactga

SEQ ID NO: 325344 - DNA, 792 bp, Pseudomonas aeruginosa
atgggtatttcctatggtttggcgatgttgctggtgttcctcgcgctgctgctgttcagcgcgctgcgcatcctccgcgagtacgagcgtggcgtggtgttccagctcgggcggttctggaaggtcaaggggccggggctggtgctggtgatcccggcgatccagcagatggtgcgcatcgacctgcgcaccatcgtcctcgacgtgccgccgcaggatgtgatttcccgcgacaacgtttcggtgaaggtcaacgcggtggtgtacttccgcgtgctcgatccgcagaaggcgatcatccaggtggagaactacctggccgccaccagccaattggcgcagaccaccctgcgcgcggtgctgggcaagcacgaattggacgagatgctcgccgagcgcgagcgcctgaacctggatatccagcaggtgctcgatgcgcagaccgacgcctggggcatcaaggtggcgaatgtggaaatcaagcacgtcgatctcaacgaatcgatggtccgcgccatcgcccggcaggccgaggcggagcgtgagcgcagggccaaggtgatccatgccgagggcgagctgcaagcctcggagaaactcatgcaggcggcgcagatgctcggccggcagagtggcgccatgcagttgcgctacatgcagaccctcggcgcgatcgccggcgacaagagttcgaccatcgtcttcccgatgccgatcgaactcttcggcggcaagtacgcaggtgccgcgccgcgaaacgaaaaggccgccggagaggacgaggagaggtga

SEQ ID NO: 325345 - DNA, 333 bp, Pseudomonas aeruginosa
ttggtcgcctggccccagtccaccccgctggtgccatcgcgcccgtgcatcagcgcgttggccacgccgacgccgatgatcgagccgatcagggtgtgcgaggacgacgccggcaggcccagccaccaggtcccgaggttccacaggatggcggcgatcagcagggcgaagaccatggcgaagccggccgaggaaccgacctgcaggatcagttccaccggcagcagggcgatgatgccgaaggccaccgcgccgctggagagcaatacgccgagaaagttgaagcaacccgaccagaccaccgcgaagtgcggcggcagcgagtgggtgtag

SEQ ID NO: 325346 - DNA, 216 bp, Pseudomonas aeruginosa
atgatcaggcccatgcctttttgtccgtcgttggagccgtgggcgaaggacactccggtacaggtcaggatcagcaggccgcggatccaccagggcggcggcgccttgcccttcggcgccttgtacagcgcgcggttcttcaccagcaggcgcagcgccaggagcaacagggcggcgcaggcgaagccgatcagcggcgagagcagcagggagtag

SEQ ID NO: 325347 - DNA, 876 bp, Pseudomonas aeruginosa
atgcaggcgaacggcgtctggtcactgcagccgctggccgatatgtcggcagcggagttccgcgactggcaggtcctgttggagaaccgcaccggcgtggtgctcaacgagcagcgccggacgttcctgcaggccagcctgaccgcgcgcatgcgtgaactgggcatcggcgactaccacagctactaccgccaggtgaccgacggtccgcgtggcgcagtggagtgggcgaccctgctggaccgcctgaccgtccaggaaacccgttttttccgtcatcccccgtctttcgagctgctcgagcgctacctgggcgagcgcctgcgccgcgaaggcatgccgcggccctgggccctgtggagcgtcggctgctccagcggcgaggaaccctactcgctggcgatgtgcgccgcacaggcgttgcgcgggcaggaacgggaagattttttcggcgtcaccgggacggatatcagccttcacgccctgcagcgggcgcggcaggcgaactatccggcccgcaagctggagcaactggaggccggactggtcgaacgctattgcgaacgccaggccgacggcagcttcagcgtgaaaacgatactgaccgagcgcgtctgctgcgcccggctgaatgtgctggacctggcgaaggcgccctggtccggcatggacgtgattttttgtcagaacctgctgatctacttccgtcgctggcgacggcgcgagatcctcaaccggttggccgaacggctggcgccgggaggcttgctggtgatcggggtcggcgaagtggtcgactggagccatccggagctcgagccggtcgccgacgagcgggtcctggcctttacccgtaaggggtactcaggcacatga

SEQ ID NO: 325348 - DNA, 1656 bp, Pseudomonas aeruginosa
atgaccagcttgcatgccgatgaggccttcctgggccactaccaattcagtcacgacccgttcgcgccgcgcgttccgggtttcaagttcttcccggcgcagcgcaagccggtgctcggccagttgcaccatctggcccgctacagccagctcctgctgctggtcaccgggcccctgggcagcggcaagaccctgctgcgccaggcgctggtggccagcaccaacaaggatgcggtcctcagcgtggtgatctcggcgcgcaccgccgccgacgagacttcgttgctgcgccaggtggcgcagggcctgagcatcaaccaggcgagcctggaggcgatcctgaccaaggtggcgcagctggcgatcaccgggcaggacgtctacctgatggtggacgatgccgagcagctccaggacagcgcgctggaagtgctgttgctgctggcttccggcaccaacgagggacgcctgcatgtattcctgttcggtgagccgtcgttgctgccgcgcctggaggtgttttccgagggtgaggagcgcttccatgccatcgagttgcagccatacagcgaagaggaaacccgcgactacctggcccagcgtctcgagggcgccgggcagggcatcgagctgatttccaacgacctgctggtggacatccacgagcagtcggaaggctggccgggagcgatcaaccaggtcgcccgcgatgccctgatcgaagcgatgctggccaatcgtggcgcagcgcgcaaggcaaccggagggtctttcaacttgcccaagaagcatctggtgattcttgcggtcgtggccatcggcgtgatcgccgcctggttcatgcaaggcaagagcaagccggaggcgccgcagaccgcctctaccgaattgtccatgaatggcgctacgccggcccaggcccagcagccgggcagcggcccggccgtggagttcaacggctccagccagccgttgccgctaccgttggtcggcgagtcgcagccggtcattcgcgagccgctggcccaggccgccgggcaaggtggcgacgacgaaggcggcctgccgtccgccgcggtgccgcctaccgtttccagctcggctcctccggtgacgccgctggccaacaacggcgtcacgccgatgcatccggtgccgccggcgccgaccgaaccgaccgcgcctgcggcgaccccgactccggcgcagaccccggcaccggccgcgccggtcgccagcgctccggccagcaagccggccccggcccccgctccggccaagccggcggcgagcaagccggccaccaccgccgcggcgaagccggccccggctccggccgccaagccggccagcggtggcggtgcgggaagccagtggtatcgcaaccagtctggtggtaacttcgccctgcagatcctcggtaccggctccgaagccaatgcccaggcgttcattcgccagcagggcggcggcgatttccgctacttcaagaaaaccctgcaaggcaagccgttctacgtcgtcacctatggcagcttcccgaatcgtgccgccgccctggccgcagtgaaaaaactgccgtccaaggtgcaggccggcaagccgtggccgcgtaccttcgccagcatccagcaggagatcggccaggcgcattga

SEQ ID NO: 325349 - DNA, 576 bp, Pseudomonas aeruginosa
atggaaaccgccgtggctggcgcgaaccgcttcgaaggcggcgcgctgctcggggttcagcggcaactccgcctgggccagccagccgccttcgcgcggcggggtgctgtggcgccgcacctccagttcgaccaggcctttttccttgagcaggtcgaggctgtccttgtttatttccaattggttcagcaactcatgggaaaccccgtgcggatgctgcttgagaatcgccagggcctggcgctggcgcggcgcccgggccaggcgcggatcgtcgaggctggattgcgcggcggcatgccagaagcgctgctggcgcgcctcggccggctcgccctggcgcaacaggttgggcagcgcccaggacagggtgtcgccgaggctgtgctggtagtactgggcggtccagcgacagagttcgagcaggtgcgccggcattggcggcttggcgtcgagtaccctgagggcaggcttgagcttgtcttcgggtacttcggaacggtccgtcacctctatcagaacgccaaccagctcccggcgcccgaacggcagcagcaggcgaatccccggctgtag

SEQ ID NO: 325350 - DNA, 696 bp, Pseudomonas aeruginosa
atggcaaagaagaaacccgcccccaagcgcggcgccagccgctaccaggcgcccgccgcgaagaacggcgttcccggctgggtctggctggtcgccggcctggccatcggcggcttcatcatgttcctgatgaagctcgaacccgggcgcaaggacgtccagcgcgaacgcccggacgcccagcgcccggccgccgtgcagggcaagcagccgcagcagaacggccaggcccagcagcccgcgcaaacgcagacgccggcccaggccaagccgaagtacgagttctacaccctgctgccggagtccgaggtcgtggtgccgccggaagcggtaccggagaaggccccgccgtcgcccacccccgccgagctggccaaggccgacgaagcgcgggccaaggccgcactcgccgggcaggtgccaccgccgctgccgaaagcggtggtcgccgctagcacgcagttcttcctgcaggccggctcgttccgcaagcagtccgacgccgaccgcgtgcgcgcgcagatcatcctgctcgggcagtcggtgaacgtcgaggccggcaacgtccgcgacgagacctggtaccgggtgatggtcggcccgttcaacagccgcgaccagttgtcccaggcgcagaagacactgtcctccaacggcttcagcaacctgctgttacagcaacgcaaggcccgctga

SEQ ID NO: 325351 - DNA, 897 bp, Pseudomonas aeruginosa
atggcgagtggaagaccgaggccggcgtgcagcggcaactcgccgaccaggaacgggtcgccgccgactgggcctgggcccacgaccagccggccggcctcggtactggcacgctgcccggaggacgctggtggtggtggcgccgaggagctggaggccgcgcgcctgcacggcgagaccgagcaactgcgcagcgccttgctcgcctcggtgtcccacgacctgcgcacgccgctgacggccatgcgcggttccatcgacagcctgctggcgctgggcgaggcgatcccgccggcggatcgtcgcgaactgctggaaagcacccgcgacgaggccgagcgactggaccgctatatccagaacctgctcgacatgacccgtcttggccacggtggcctgaagctggcgcgcgactgggtggcgccgggcgacatcgtcggcagcgcgctgaaccgcctgcgcgcggtgctggcgccgtaccgggtgcaggcgatcgtggccaacgacctgccgttgctctacgtgcatgcggcgctgatcgaacaggcgctgatcaacgtgctggaaaatgccgcgcgcttctcgccgagccacggccggttgcgcatcgaggtcagccaggatgccgccgagctgcgtttcgcggtgagcgacgaggggccggggattcccgaggccgagcgggagaagatcttcgacatgttctacaccgctgcccgtggcgaccgcggtggccagggcaccggcctgggcctggcgatctgccagggcatgatcggcgcccacggcgggcgcatcagcgtcggcgaaggcctcgacggtcgcggcaccacgctggtcctgcacctgccgctgcatccgcagccggacctcgggcaactggagggcgacgaatga

SEQ ID NO: 325352 - DNA, 1086 bp, Pseudomonas aeruginosa
atgttgcaggagggtccgcgccacctcgccggcgcgcagcacgacgatctcgccgccgagccgctcggccagttgctgcgcaccctgcaggcgcatccgcgcctgctcgccgcgcaagccgccggtatcgacgtgtaccacgctccagggcaggtgccgacgttcggcgacccggcaggcgtggcgcaccaggcgttcggcctgttcgtcaccgtcgatgcccaccagcagccgcccgcgcaacgccggcgcctcctcgccgcgctggcggtagcggtggttgaggtcggcgtcgacccgcgcggcggcggtctgcatcgccagttcacgcagcgcggtgaggttggtctgcgagaagaacgcatcgatcgccgcccgcgcctgttccggcacgtagaccttgccctcgcgcaggcgctccagcagctcgcgcggcggcaggtcgatgaggacgatctcgtaggcctcctgcaacacccagtccggcaccgtctcgcggacctgcacgccggtgatgtcgcggacctggtcgttgaggctctccaggtgctggacgttgaccgttgtgtagacgtcgattcccgccgccagcaactcctggatgtcctgccagcgcttggcgtggcggctgccgggaacgttgctgtgggccagttcgtcgaccagggccagcgccggcgggtcggcgaggagaccgtcgaggtccatttcctgcagtttcatccctcgatactcgaggctgcgcagcggctgctgcggcacgcctgcgaggagggactcggtttccgcccgcgagtgggtctcgaccaccccggcgcgcagtttcacgccctggcgcaactgggcctgggcggcctgcagcatggcgaaggtcttgcccacccccggcgccgcgccgagaaagactttcaggcggccgcgcccgtcagcgggcaggtcggccagcagcgcgtcggcgcgtgcggtgtcggtcatggatcggtcgtactccgttgctctgcgccgcgcggggcggacgatcgccggcgatcatccgccgatgcggcgatattgcaagcccttgcgtgggtctctggggaaacctag

SEQ ID NO: 325353 - DNA, 933 bp, Pseudomonas aeruginosa
atgagccaggaacagagccccttccacgccggcgaactggcgatccaggaacgcgccggcgttcgcgaacaggtcgccggcttcggcagccgcgcgatccgcaccttcatgccggaccagcatcgggagttcttcgccctgctaccgctgttgctggtgggcagcctcgacgccgacggctaccccagcgcctcggtgctctggggcccccccggcttcgcccgttcgccggaaccgacccgcctgcgcatcgacagcctgccgcaagcggacgatccgctggcggccaatctcgaggccggcacccgcctcggcatcctcggcctggaatggccgacccgccgccgcaaccgcatgaatggacgggtcctggcgcgggacggaaagggtttcacggtcggcgtcgagcagtccttcggcaactgtcccaagtacatccaggcgcgcagccatcagcccgtctccaggatcgcaagtcccgcgttgcagggcgaaggactcgatccgcgctggctgtcgctggtctcgcgcagcgatacgctgttcatcgccagccagcatgccgacccgctcaggggcggcgtcgacgtctcccatcggggcgggccgccgggctttctccggctcggcgcggatgaccgcctgtggttgcccgactacgccggcaaccgcctgttcaataccctcggcaacctgctccaggagcctcgctgcggcctcctgttcatcgatttcgacaacggcgacctgctgcacctgcacgccgaggccgagctgttctggccgggttcgcagccatccatcccctggcccgccggcgccgagcgcctgctggcgttgcgccccgcaggctggcgctggcggcgcggccgcctgccgctggcattcggcgagccccagccatccccttttcttcctgccggtgaatcttga

SEQ ID NO: 325354 - DNA, 597 bp, Pseudomonas aeruginosa
atgcccgatagcgccctgcccccctgctccatccttctcctggcgggaggccgcggccagcgcatgggcggtcgcgacaagggcctgatcgagtggcagggcctgcccctgatcgcccacctgcatcgcctggtgcgcccgctcaccgatgacctgatcgtctcctgcaaccgcaaccaggaacgctatgcggcctatgccgaccgcctggtgagcgacgacagccgagacttccccggcccgctcgccggcatccgcgccggcctggcggtggcccggcatccctggctgctggtgctgccctgcgacgcgccgcgcatcgaccgcgccttgctggaaaccctgctgcaggccgccggccgcacaccggcgcgcccctggatgctgcgctgcggcggccagtgggaaccgctgttcagcctgatcccgacgcacctggccgaagagatagaacacgcctggcgccagggcgaccgtagcccacgccacgtcctgttgccgcttggcgcggaggccatcgagctggccgcgggcgatccgcggctggccaaccttaacacccccgagctgttggctaatcaccgcgaactgaagtaa

SEQ ID NO: 325355 - DNA, 681 bp, Pseudomonas aeruginosa
  misc_feature (585)..(594): n is a, c, g, or t
atgcagacccttggctccacctcggttccggccctgctgaagtacctgcgccacgccgaacggctcggcctggacatcgcccctgccctggccgccgccggcctccaggccgaccagctcaacgacaatcgccagcgcctgccgggcgaagcccacgagcgcctgctcggctatttctgcgagcattccggtgatcccctgttcggcctgcattcggcgcgcttcgtccagcccggctcctggagcgtgctcggctacatcgcgatgaactgcgccaccctgggcgaggccatgagccgcatcacgccctacgagaagctggtcggcgacatgggcaccagccgcatcgaggcggccggcgggcaggtccggctgatctggaactgccgccaccagacacccctggtacggcgccacatggtcgagcacgtcctggcttcctgggtcctctacgcgcgctggatcgccgacctggaaggttcgccggacgaggtctggctggaacacgacctgccggacggaacccgcgtggaagactacgagaccttcttcggctgtccggtgcgcttcacccaaccctgttcnnnnnnnnnntggtaccactggactacctggcgctgccgctgcgccaggccgacgcgacgctgctgcgcaccctggaagaacatgccctggcgctga

SEQ ID NO: 325356 - DNA, 1560 bp, Pseudomonas aeruginosa
atgaacgacaagaactatctgctggcgatcgacaatggcacccagagcgtgcgcgccctgctgttcgacttgcagggcaacctgctgggcaagggcaaggtggagctggaggcctactactcgaagcatccgggctgggccgaacaggaccccgagtactactgggcgatgctcggcgaggcctgtcggcggctctgggaccaggtggacatcgatcgcgggctcatccgcggggtgtcgctgaccacccagcgcggtacggtgatccacgtcgatgccgagggcaggccgttgcggccggcgatcctctggctcgaccagcgccgggcggaggtccgcgagcgcatcagggggccgtggggctggctgttcaagctggtcggcgccgagggcgcggtggagcatttccgcgcccaggccgaggtcaactgggtggcccaggagcagccggagatcgccgcgaagaccgacaaggtgttgctgctttccggctttctcagccaccgcctgaccggccgtttcgtcgactcggtggggtgctgcgttgcctacctgccgttcgactacaagcgcctgcgctgggccgcgccgcgcgactggaaatggcaggcgctggcggtacgccgcgagcagttgccggagctgttcaagccgggcgagcggctcggcgagatcagcgccgaggccagccggcacaccggcattccgcaaggcctgccgttgatcgccgcgggggccgacaaggcctgcgaggtgctcggcgcaggtgcgttggagcccaccatcgcctgcctctcctacggcaccacggcgaccatcaacaccactcgcgcccgctacctggaaaccgtgccgctgattccaccctatccggcggcgattcccgatcatttcaataccgaggtgatgatctatcgcggctactggatggtcagctggttcaagcgcgagttcggcttgcgcgagatgcagcaggcgcgcgagcagggggtcgagccggagcaactgttcgacgaactggtcaacggcgtgccgcccggctcgatgggcctgaccctgcaaccctactggtcgccgggaatccgcgaaccgggactggaggccaagggggcgatgatcggtttcggcgacgtgcatacccgggcacacatctaccgggccatcctcgagggcctggcctatgccctgcgccagggcaaggagcgcatcgagaagcgttcgggcacgccgatcgtgcgcctgcgcgtggccggcggcggctcgcagagcgacgcggcgatgcagctcaccgccgacatcttcggcctgccggccgagcgcccgcatgtctacgaggcgtccggcctgggtgcggcgatcgactgcgcggtggggctcggcctctatccggacgtcgccagcgcggtggccgggatgacccgcgtcggccgggttttcctgccccaggcggaagcccggcagatctaccagcggctctatggcgaggtctacctgcgcatgtatcgccagttgcgcccgctctaccgcagcattcgcgagattaccggctaccctgcctga

SEQ ID NO: 325357 - DNA, 243 bp, Pseudomonas aeruginosa
atgatcgactggagcaagttaaagaccgctgaacagcaggcgcaagaacgctggcaggctgagtacgatgccgcaaccgcggcgcgggcgaatgcctaccgcttggaaagtgacccgctcaagaccgaggccgagttcgatgcgatcaaggccggcgtggaaccggactacagcgcctgggtggccaaggtcgaggagatcagggtgcgcttcccgctgccggaggcgaacagaggtgaatga

SEQ ID NO: 325358 - DNA, 303 bp, Pseudomonas aeruginosa
atgctgatcaaattgtcaccgtacgcaccactgccaggcagcgacgagcacctgtcgctggtcaggattggcgatgtgctcactgtgaacggccaggtgttcgacttcacaccgctcccggacggtggtgaagtgccggccgaggctatcgggtcggagtggttcgctggtcctgcactgcgacgtgccggccggctggagctgatcctgcggttcccgctggccgctgatgccagtgccgctgctcgcttccctgaaccgttgctgatcgaggccgacggcccggtggagttaccgcgatga

SEQ ID NO: 325359 - DNA, 1491 bp, Pseudomonas aeruginosa
atgccctttcctaatagcattctcgatgacgcgcccgatgtgtggggatggccctggcatgggctgatcaagcaggcgattggcgctggcggggccgtccttacgctgcctagtggcgcgaccatggatatgccaagtatcgcgctcatgcaggatagctatctatgggatgttgggatgccggagccggctgtgacgaccgacaacccagacgagcagtggctgagcaaagcgatcttgcgcggatctggacagtgctatggcggcatggacgccggatcggctgcttttattcgcggccgaacggtcagcgcgactgtcagtaccagccaaactggcggcctgctttggtttgatgtgtatttcgttgatcatggcggagcggtcccgatcgaacagcaagcgacatccaacattctgggatggcaggatctagggcttgagtcctccccgcacagtttgagcgtgtcgttaatcgatagaggtcatgacggcacgcgcagactgtaccttgtgaactatttcaagagcgcatctgacaccggggcgcgtgccgctttcgttgaactgcacctgcagccgactggtagcgctgggttcttcgcgacactatcggttgtcgctacatatcctcaggtcaattaccagatcacggcaattagccttccggatgttgatctcgatgtgtataccagaatctggcgggcggatagcggaggttacgagcaggggccggaagcgccgccaggtgagactgtcgaatactcggtgcgctctggcaattggcaattaacatgtgctgtggagcgtattttgtggatgtggtacggaacctctggagccctggagccattaacgtacagcgtcctgcagacctgggactggtcgcgcaccggaggagttgttggaggggatcatgtcgaagtcgatgaggtctattcggttcggtacgacctttctctcgctgctggatctgctgggactacgcttcaagtcgcgcaccagtctacatcccattcgaacatggggtcgccagattccactggcaccgacatttcatggcaagactttatcagtggtgccgccgttgcctccggaaacgttacgggccagcctggcggcgagcatgcaatcgcgtttccagatagggcgacctttcaggatgtgagcgactcgacgaacgaaattctgtggttccagtcgtcgctcagctctttcagcgggcagcccaatatcgccgtacagtccttctcgaacaaaattcttgcattgcgtttcttcagggatgaccggcagaacggtgttcagcagcgctatatcagcctcgccccagcagtaacgccgcacggatcgcaaggcgccgaaattttagatttcgacgccggcgcgctgacccaacagcagcgcgagcgctggctgagcggtgcatacaacccgataacgggcgaagttcatcgaaacgacccaagcggctacttcgcctgggtctga

SEQ ID NO: 325360 - DNA, 744 bp, Pseudomonas aeruginosa
atgggccaacgctggatcaataactggcagacagaactctcaggcccgctgtcggcgggtgggctctctctcaccatccccgctcccgcggctgatcttctgcccatctcgggtccttctgatttcgtcctgctcactcttgccgatgagtcaggctctgttcacgaagtggtcaaggcgacggcaaagagcggcgggaatgtcactgttgcgagagcctctgagggtgtggccgttgagtggccttcgggctcgaaggtgtacgcggcggcgacggcgggaactctcgccagcatcgagagacgaatcaccatcctcgagcagtctggtcccgggcctggtggcggcacgttcaaggcgcaggagatcaacgactcgactccggtagtcctcgcttcggatacaacgatcgtacgcgtatccgcatcgtttgatggtaatggtcgcgaattggttatacctctgcctgaagaagccgaggggcgttctctctttgcagtctttgacctggacgtggttgtgcagccagccgccgatggtgttgtcgtactgagtagcgctgccagtggcggggtccagttgtgggggctcgttggttccgagtcttggctctcggtatctgagaacaactctcgcatcgagtttgtatcaacctcagggcagaaggcctgtttcttcaaggcgcttgtgtacaacactggtgctacctacctctacttgcttgcatctggtgatttccaatga

SEQ ID NO: 325361 - DNA, 1704 bp, Pseudomonas aeruginosa
atgctcaaccgtggaccgctcaatagcgctgcgctgaactcggccggtcactccagtgtgcctggtcctgagccgatcatcccaggcttcgctttcacatggcgcgctatcgtgcgggttggcgatgttgacgttacgccactcctgacaggggagattgaggtcgatcgtgaagagggcgctgctggcgtcgcgtccttttcgatctatctcggtgacgaccctgttgttcctgcggactggatcggtcgaaccgtaaccatcgactatgcgacggagaccgccggggaactgagccagggccgaaggtttacgggtagggttacgcaaccagcctggaaccctgtccgccgagtcttgggcgtcagttgcacggaccagttgcagcagcgtgtggaggccatggcaattgcggatgtcgatgccctggtgggtggtaagtggtccgccgatgtgttcgagtccgtcgaaggtcgctcgcgttgggattatgcccaggagcggttgactagcgtagtgggcagcttggattgctcagcctacggcgctcttcgcgtcacgtcatggcattctgtggcgcccaccttcgagtttggacctggatcaacggtatacggatcccttgcggtcgagcttgccgacctgagttctcagacgaacagggtcgagatcgaatgtgactaccgattcagtcggctgtggcaatggaatatcaactatggatggaaggcgccaggtacggacgggcaggatggtgagccaggattttgcaattggcgtccggagtcgcacgaactcccggatacggaaatggttgagtcggcaaccagcagctcagggcaaacgctgatccaatcgtcgactgaatactatccgctgccacccactggcatctactgcacgcctccgcaaagttgggccaacaaatacacggggctgttgctaggcgccgactgggccgcagggcgtcgctgggtgcaagcggttacggagtcataccgaatagcggtagaggtgcaacctagcgtgctggcgaccggaccaatcatcagtcgctcccgggcatcgtttgagattgatagcgatctcgccgagtcctgggagagtgctgctattaccggggggagttctggacacattgatcagcccagcgagacgcgcaggattggcgcgctgacatgtctgcttgagcaggctcgagctactctcgtcggtgctcatagggggacgacagtgagctgggactgccctacatccatggtcatggcggtcgatttgacgcacaccctcaaattcgatgatcagcgaatcaaggctgtaggtaagtgtcgccgtgtgcttgatcgctttgaccttgagagtggttccgcgataaccaccctgagtattgctgtgatgcgcggtggcggaggagattccgacgtcctcactcctcctagtggctctggggctgcccccgaactaccagccttcgatgggcgccttgagtcgcaaatcgctggtcacccggatgacccaccattcgatgaatcgaaagatgggttttccggtaactacgacaactacaacagtccacagcctcgttatccgaggcaactacgcataactgctcccgagatacccgcctcgctccgcgatgaatattcgccggagatcggtgcgtccttccgcgtctcggttcctgatgatttgctggagatgtag

SEQ ID NO: 325362 - DNA, 522 bp, Pseudomonas aeruginosa
atgatcattccgaacgtgatgcttggggggataccgatcgtgatacacggcggcgccccgcagtgtcagtaccaggctgtagatggcggagtcgagcgattgagactcagcggaggtgcggcagtacagatgacgcactggcgcaagacggcaatcaccatcagcggttcaggatggatcgggacggggatgcttggactcgacttcgacaacccgctagagctgcgatgcaatgcgtccctcggcatctcgggtcgtactgccgccgaccgagtattcaccatcccgggcgaggttcggccggacgccgggccatgggggctggcgctggtcggtcgtgagtgggtcagaacgatcgtggcgtccgccggccaggtggtaacggtgtcggagattcctggcgcgcaactttaccgcgtcgagtggtggccgctattccacgtcttcgcgtcgatccctcctgaggcgcttgactcttcgaacaacagtcggacctggcagattgtcgctgaggaaatctga

SEQ ID NO: 325363 - DNA, 303 bp, Pseudomonas aeruginosa
atgtctagctttactgcgagcagggttgtggatatcgatggggttgaaattactgttcgcgaacttagcgttgcggatgttcgaaagctaatgcaagaggtcagtgaccaagacctcgtcagtaatgctctcttcgaagatatcaggctttccgatctgtgcctgatgacgtcggttacggagagccaaattaacgatctccggcctagccagctcgccaagttgcgggatgcatgtaaagaggtgaacccgcattttttcggaatgctgggccgtctctcgaaactccgcgacaagccttga

SEQ ID NO: 325364 - DNA, 195 bp, Pseudomonas aeruginosa
atgaagagcgaaacccaggcgccggctccggtcgacgccgcgccgtcggctgcgctgaataaggccgtcgaggtcaccctggccaaggtgcattggcaccagggcaaggagaaggcggccggcgaaaagatcaacgtcagccctgaccaggttgaatttctgcgccgcgaaggcgtgatcaagaaggaggcctga

SEQ ID NO: 325365 - DNA, 474 bp, Pseudomonas aeruginosa
atgctgaaacccaacgtcttgaccgtggggcgacgagcgttgctggcgcgcctgcaaacgatcacgccggccaacggctaccgcacggatgcaggtacccgtgtgctctccggctggctcaacgaactgatcaaggagtgcaggcaaggcttcccgctgatcgtcgttcagccggccaaggagcagccgcctgagcatctcgacgccggcgttcgcttccatcgcggcttcgacgtggtaggcgcggtgcaaggcgggtatgaccactatgaagaagccctggaggacctgcagctcgacctgctggcgtgcctgatgcctgcccccaaggggcagttcctgcgctggctgccccgagaccgcggcattaccgggctgacactgggcgcgcccgaaccctacccgccgggtgatgcggtggccgctgccgtgattcgaatccctgtctatctgaaaaccatcatcgaggggtaa

SEQ ID NO: 325366 - DNA, 321 bp, Pseudomonas aeruginosa
atgggttgggcgaactggcgggatcgcctacatcagacggtaatgaagactttcgccgatgggcgggcgactcaccagagcgcctcgggcgcgccaccgtcctgcggcttcgaggtcatcattgatcacaacctgatgatgacgggtccggagggcatgtttcagacagacaagatcgggatcagttggcgcaagatcgatctgcccggcgcgagtcggggtgacgtgttcatcgtgggtggtcagcgcttcatggttgaagagatggttgcggacgatgggcacatcctgaccgccgcctgcaggaaggacctatgctga

SEQ ID NO: 325367 - DNA, 363 bp, Pseudomonas aeruginosa
atgaagaccttcatccaacatggcgacatgctcaccgtccccgcccccgctggtggagcagtatcgggcaagctgtacaaggtcggcgccatcctcggcgtcgccgcaaccaccgtcaccgatgggcagcccgtcgagttgaaaacgactggcgtgttcgagctgcagaaggtggccgcccaagcgtgggtcgtgggtgatccactctacctggatgcagccagtggcgatctgaccaatgcgcctagcgcgggcctggtcctggtggggctggctaccgaggcggcagcaaatccctccgcggttggccgctgccggctcaatggcgtttcggctccagcggctgaaggtgcaggaggctag

SEQ ID NO: 325368 - DNA, 1989 bp, Pseudomonas aeruginosa
atgacggcaatgacccagacgcatgagacgccgatgctgagcctgcgcgccgcggtgcggccgggctccgtcgatatcgagaaccgaaccgctgaactgacctggactaccggggcgaaggggcggcgctggtcctgggatatcggcgcgtatatggaagaactggaggtgacgcccgaggcggtccgactggaccggctgaacaacggcgcgccgttcctgaacacccacagcgcctgggagttgggtgacgtggttggcgtcgtcgaacgcgcctggctggaagggggagcggggcacgcactggtccgcttcagcaagcgcgaggatgtcgagtcgatcttccaggacgtgcgcgacgggatcctgcgcaatatcagcgtgggctattccgtccatcgctacgagttgatcgaggcccctgacgataagcttccgacctacagggcagtggactgggagccaatggagctctcccttgtgccgattggattcgacgatggggcgaaggtgcgaaacgccaagactcctgccgactaccagggccaacgtttcaccacccttttcgagacccgggaggccgagacgccgaccgaacaaccggccgccgtggccaacccaagagaggaaaatgcaatgaccgaagaagagaaacgcgcggccgaggagtcgattcgccgtgaagccgccgaggctgagcgcaagcgctgcctgagcatccgccagatggcgcgcaaggtggggctggacgaggacgtggcggaggacttgatctcgcgcggcgtggccctcgagcaggccagcgccgagctgatcgacaagctggccgagcggcagcagtccgagcagccggaaagtcgtagcgcgcacgccggcgtgaccagcgatatcgacctgtcggtcgttgccgccaagcgcgaggcgatgcaaaacgccctgctgcatcgctgcaaccccaaggtgaagctggaggaggccgcccgcgagtttcgcggcatgcgcttgatcgacatggcccgcgagtccgtggaactggttggggggaaggtccgcggactgaccccgcaggaagtggcgcgcgctgccctgggctgtgaccgccaggcgttccgggcagcgggcatgcacaccaccagcgatttcccgctgcttctgggcagcaccgtgaaccgaacgctgcgcgatgcctacgagctggcgccgcagacctggcgcccgctcggccgccagaccaccgtcccggacttccgcgaggtaacccgcgtggcgctgggcgatatcgccgcgctggagaaggtcaacgagcacggggagtacaagtacggctccctgggcgaagaaggcgcgccgatcaaggtggccaagttcggcaagatcatcgcgatcacctgggaggcgatcgtcaatgatgatctctcggcgctgacacgtattccgcaagcgctgggtgcggcggcgggacagaccgaatcgaacctagtgtgggatctgctgctgggtaatccggagttcgtcgatggagaggacctgttctcggatgcgcacggcaacgtcgccgccagcggcggcccgatcaataccgccacactggcggccgctcgtgccgcgatgcgcaagcagaagtccaaggccgggcatttcctcaacctggcgccggagttcctggtggtggggccggacaaggagctggaggccttccagttcaccagttccaactacgtgccggcgaagaacgccgacatcaacgacagccgcaacgcctcgctgacggtgatcgtcgatgcgcgcattacgggcaaccagtggtacctgtacgccgcgccgggcgtcgttgacacctttgagtatgcctacctggaaggcgagcagggcgtcttcaccgagacccgcgaggggttcgaggtggacggcatggagatcaaggcgcggctggtcttcggcgcggcctggatcgactaccgcggggcctacaagaacgccggtaactga

SEQ ID NO: 325369 - DNA, 1527 bp, Pseudomonas aeruginosa
atgagcgtgttcgagacttggtttcccggcctggccgcgagacgcgccgaactgcgcctgaagaaaattcgcgcggagctttcggcgggtctgttggctcgacgcttcgagggagccgcgggcggtcggcgcaatgaaggttggcgctcggcggggaccgatgccaatgccgagaacgccccggcgcttgggagactgcgcaaccgtgcacgggatctgcgccgaaacaacccttatgccgagcgggcggtgacggggattgccgacaacgtggtgggtgcgggggtggtaccccggcccatggcgcgcagtgatcgagccaacaacaagctgggcgcgctctggcgggcctgggccgagacgttggcctgcgacgccgacgggttggagaacttttatggcctgcagcacaaggtcatggaggccattgtcgaggcgggcgaatgcctggtccgacggcggaagcgcttcagtagcgatgggttacccgtaccgatgcaactgcaagtgctggaggcggattttctcgatgaagcgcgcagtggcaagaatggcaagaacgaaatcatccagggggtggagttcgatccggtggggcggcgtgtcgcctattggcttttcgacgagcaccccgggagtgcgctggcaatgcgctcgttggagtcgaggcgcattcccgccgaggacgtgattcacgtttttctgtccaagcgcccggggcaggcgcgcggctacagctggctggcgccggtgatgcagcgcatgcgcagcttcgacgagatggaggacgcgatcatggagcaggcgaagatcgcggcgtgcttcgcggccttcgtcaccaaggatgagtcgatcgcggggctcgaacgaaagaggccgccgctgatcgagcggatggagccagggctgatccaggagttggggactggcgagagcgtgagcttcgcggcaccgccagttttcaacggctactccgcctattcgtggcaggccctgcatgcgatttccgtggggcttggagtgccgtacgaactgctggccggcgacctgaagggcgtcaacttctccagtggccggatgggctggctgcatttcgccaggcgggtggatgtatggcagtggcggatgctgattccgcaactctgcgagccggtctggaagtggttcatggaggcgcaagcgttgctgcctggcggcgtcctagaagacgccttgtctgaatgggtaccgccgcggcgggacatggtggatccgagtgccgaggtcagcgtgatcaaggatcgcctgcgccttggcctgatcacaccagacgatgcgctgcgcgagatgggctacaccgacccggacgatgtgctgacccgttatgccgcccacctgtcgaaggtggatgagctcgggctggtcttcgactacgacgcgcgcaaggtctccaacgggggccaggcgcaagccaaaccgcaggggagcaattcccagcaagcacctgaagagacttcaaaagatgacggcaatgacccagacgcatga

SEQ ID NO: 325370 - DNA, 204 bp, Pseudomonas aeruginosa
atgacctacaccctggaacaataccgagccctgaaaggggctgtggcggagggggcgctttcggttcgctatgcggatcgcagcgtcacctaccggtcggttgaagagatgctgcgtatcctccggttgatggaggatgaactggggctttctgcgaacaacgacggcggacgccgctacacctctttttccaaaggctactga

SEQ ID NO: 325371 - DNA, 1194 bp, Pseudomonas aeruginosa
ttgaagtggggcggcaaggattgcgtctatggcatcaagtgggaccctgaacagccggaagatgcctggtatgtgtgtgaggctaccggctgcctgatccgttactcagaggcgcttgaggcgcagtacaaggcgcgctggatttgcgaaaagactggaatctggacccgggatggtttcgactttttcgatgtggagggggcgccgattcctaccccagagtccatcagctttcacatctggacagcctatagcttctttgtgacctggggtcggattgcacaggacttccttcaggcgaagggtagtcgcagcgacctgaagaccttcgtcaacacaacccttggcgagacatgggaggaagaccagggcgagcgcgtcgagtgggacgtgctgcttgggcgtcgcgaggtctggcaaggcgagatcccggcccaggcggtgatcctcactggcggcggcgatacgcaggatgatcgctatgaggggagagtctgggcatgggggcctaacgaagagtgctggctggtttatcgcttcgtgctgatgggtgatccaggtggtgaagagctgcgccgcaagcgcgatttggaactgcaccgccaattcactcggagcgatggcctcgtgatgaaagtagagcgctggtgttgggatgctggcggccactacatcgatcaagtctgcgacgacagcaagaagaacggcttgctttggatgatcccaatcatcggcgcaccggtttacggcaagccgatcgccagcttccccacgaaacgcaacaagcgaggcgtgtacctgacaaccgtcggtacggataacgccaaagagctgttctacagccgcctacgactgccattggatgtgtcgaagtcccaggcaggcattacccagccccaggtaatccatttgccggcaaacgaccttatttgcgacgagatggaggtcaggcaactgacctccgaaagcaaggtgctcaaggtcgtcaagggtgtacagcagtatcgctgggacaatcaagggcgccgcaacgaagcgctggactgtttcgtgtacgccctggccgcgttgcgaatcagccagcaacgtttcggcctggacttggagaggttggccgctgcgggagttgaggcgctatcgccaactacggatgagcgcccgcgggtgcagtcctcttactggaagaaagcgtga

SEQ ID NO: 325372 - DNA, 753 bp, Pseudomonas aeruginosa
  misc_feature (435)..(444): n is a, c, g, or t
atgacgagtttatcgacagtgcagattgaggcctgccaggctgctatgtcagccggcttactgtctctgcgccgagacgcgcctcagactcctgtggcatgggctgacgataatttttacctgtccagcgaatcttcctaccaagaaggtcgctgggagacgcttccctaccaggttgcgatgctcaacgccatgggcaacgacgagattcgaatcgtcaacgtgatcaagtccgcccgcgtcggctactccaagatgctgctggcggcctcggcttaccagattgagcacaagcgtcggcatatcgcgttctttgtgccagatgatggtagcgccgacctgttcatgaagtccgagatcgaaaccatgatccgggacgttggagccgtccgcgcgctggcgccttggtgcggcaagaagagccgggacaacacnnnnnnnnnnatggcaagcagttgtggtgccgcggcggtaaggcagcgaagaactatcgagctatttctgctgacactgtcatctatgacgaattggcagccttcgatcacgacatcgataaggaggggtctccgctcgtcctgggtgacaagcggattgaaggctcgacttttccgaagtcgatcaggggcagcacgcctaagctgcgaggtccaatcgatcgaggcggttgccagattgagggtgctgtccagaaatcgccacacttgctgcgctatcacattccttgccctcactgtggcgctgagcagtatttga

SEQ ID NO: 325373 - DNA, 528 bp, Pseudomonas aeruginosa
atggcaactcagatcgaagtggcgaagcacctcgatctgagtgatcgccaggtgcgcaatctcatcgcagacggtgtgctgcctggctccaagggcaggggcgggttcgacgtggatgcatgccggctggcctatatccgctatctacgaggacttggaagcgctcaggtcaaaccggaaacggcccctgactccggcgatattgatccgctgatcgaataccgacttactcaggagcgcctgcggcttactgcggctcagtccgaggctcaggagctaaagaacgaagtaaccaagaagcggctgatacccgctgagttcatcaccttcgctttcgcaaaattcattccggccgccggttcgatattcgatacggtggtcatgacactgcgtcgccgtcaccccgatctcactcctgggcaactcgactcgattagccgagagctgacaaaggcgcgcaacactatcgcccaggcggcagatcgcctaccggagtggcatgacgagtttatcgacagtgcagattga

SEQ ID NO: 325374 - DNA, 240 bp, Pseudomonas aeruginosa
atgctcgggttcacgacgaaagccgaagctcgacagatcggcgtctcgcaccatgggagctattacggcattccgatgtggctgggggatgtcgatagctattgcccgctggcgttcgccaagtgggcgccgcttgaacttgtcgtctccctgttctcggtcatcgagggcatcgtcaactcgatgctcgatcaagagccgacgttcaagttcaaggttggtcggaggatcgaccagtga

SEQ ID NO: 325375 - DNA, 336 bp, Pseudomonas aeruginosa
atgaaaatgcccgacaaagaccccatcacgtgggctgcgctgctggcgtggctgtctgcgcactatccgcagctgtacgccgccggcctgtcctttgtggtcgcgctgacccgggtgatctacggcggtggaacgcggcgccaggcgctgctcgaggcaacgctctgcaccttgattaccttgggcctgattccggtccttgagtggttcggcctgccacagaacatggctaccgctgctggggtgttcaccggtttcctaggggtgaagaagatcgccgagttcgctgatcggatcgccgactggaagtttccgcgccggggggctggcgaatga

SEQ ID NO: 325376 - DNA, 390 bp, Pseudomonas aeruginosa
atgagcagaactcgaacctacgtggacaagctgctgggcgataccgagtacctcctcgagcagtgggggtggtggcgaatggatggaatgggggttcccggatatgtgtcgccggccgccgctatcatgagccaagccatgccaatgtcgagccccaaggcctaccatgtcactgacgatatggccttggccgtcgaccgggtcattgctcgactcatcgacagggcgccgcaggccggcgacttcgtgtggctctactacggcgcgaagtggccggccctgcgcatcgcgcgtgaacatcagatcggcgaggccaaggtcagggagacgttgaagctggcggtgggctggatcgatagcgccctggagcggttctgcgagagcgcttga

SEQ ID NO: 325377 - DNA, 279 bp, Pseudomonas aeruginosa
atgagcaacgtacaaccgatggcaccccgcaaggtcatgaccaggctggagcgggagtttctcaaggtggccggccaggagctggcgcaggtcaaggtgggcggtgctgctgccttggctgcgctgctggtcatgatcgccaactggcacggcgaccgcggcactctgggctttcacgactatggccggctctggttgctggacggcaatgcgaagggcgcggcggtggaaacgctgctgcgcgatctgtttggcctgaacggtccgggggcggcatga

SEQ ID NO: 325378 - DNA, 1812 bp, Pseudomonas aeruginosa
atgctgaccccgtcggatatttccaagcgcctcgctgatcgcgctgccgatgttgcacggcacctgctgcctggcggcaagcgggagggcgccgagtggcgtgctggcgatgcatcgggcgagaagggcaagagtctgggggttcacctcgtcggcgagaaggctggcgtgtggtgcgacttcgccaccggtgagtctggcgacctgctggacctctggcggctggcgcgcaactgcgacatggcgacggcgctgagcgaagcgaggggctacctcggcgtgcaggagcccaagctcatccggccggtcgagagccggaagtcataccagcgaccggacaagccaaggtgctcgacgccgaaggtggactcggtggtgatggcgtacctgaagggccgtggactgaccgaggagaccatcaaggcgttcaagatcgccgaggacgggcagaacatcgtgtttccgtacctgcgcaatggctcgctgatccactggaagaaactcggcgtggaacgtcctggcggcaagaagaaaatcaccacgtcgtcggataccgaaccttgcctgttcggctggcaggccatcccggacggtatccgggaggtgacgataaccgagggcgagatcgacgcgatgaccgcctggcagtacgggcgcccggcgctgtcagtgcccttcggtggcggcaaggacggcaagcaacgctggatcgagtacgagttcgacaacctgcagcgcttcgacgtgatctacctgtgccttgacgacgacgaacctggccaccaggcgaccgaggagatcgttcggcgccttgggcgtgatcggtgtcgcctggtgaaactgggttgcaaggacttcaacgaagccctggatgccctgtactacagcgccgacgacattgcggagtgctacgccaaggcgaagaacttcgacccggagcgcctgaagtcggtgagctcctactcggaggaggtcaaggctgagttctacgaccagaacccggaaactatcggcatggagctgccctggagcgcctacgccaacaagatccgcttccggccctcggaggtcacgatctggaccggctggagcggacacgggaagtcgcagttgctgaactacctggccttccacggcatgaaccgcaagggcagccaagaccggttctgcatcgcctcgatggagatgccggcgcggcgaacgcttcagcggatggtccggcaggcctccgggatgtcttgtccttcgaggggctacatcgacgcgattctcgactggctcgacggcaagctatggatctacgaccagttgggcaccgcgaagacgggcgaaatgctcgaggactttcggtatgccgcgcgccggtacggggtgaaccacttcatcgtcgacagcctggcgaagctcggcatggccgaggatgactacaacggccagaagcaggccatggaggcgttggtggggttcgctcacgagatgaacgtccacgtccatctggtcgcccacccgcggaaggctgacgacgagggtaagcccccgggcaagctcgacgttcgcggtggcgccatcctcaccgacctagccgacaacgtgtgcacggtctggcggaacaagcgcaaagagatggccaagggagacgactacaaggaccagagcgatgtgcgcctgatcatcagcaagcagcgcctcaccggagatgaaggcatcttggacctgtggttcgacaaggcatccaaccagtatttcagtgcgagcactcacaaggcccggaactgggtccactacgagggcgcgcgggagcaagcagcatga

SEQ ID NO: 325379 - DNA, 1113 bp, Pseudomonas aeruginosa
atgagttcggtctcgcctgatgcattacaccctctgccggagccgttgaccccaactgactgcgacctctcgacattcgcattcatgccactggacgttcagcgattgcttacttccgagacttgggtgcttggttctggggacgagcgcgccgctgctatgactctctggcttgccagttggcaccaggttccggccgccagcgttcccgacaatgatcggatgctcgcacacctgtcccagtgcgctcgttgggacaaggtgaaggcccatgtacttcgcggctgggtcaagtgcagcgatggtcgtctgtaccatccagttgttgctgagaaggcgctggagtcttgggttgagaagctgctgaatgccatctcgggcgccaccggtaatgctcgtcgctggggtgtggaggtagatatcagcgggcttcaggggcaactggtcgaggcggttgctgctttaaaaagcatcgccccgcaatcgcgcaccttgaagaagaagggtgtaataactcttgccacgggatcgccacccgaatcgggtagtgatcgccccccgatcacaccccaaatcgaccccgaatcgggtagtgatcgcaacagacagggacagggacagggacagggacagggacagggatatttaaaagatcaagagcaggcgccgcaacagcgtcgcccttcccctgaggccggggatgatcaaccgacggaaaagcccaagcgtgcttcccgcttgccggaagactgggccttgccggatgactggctggattgggcgctgactgagcgcccggagttcagcgaggcggacatgcgtaaggttggggagggcttcagggactactggtgctcggctgccggcaagggggccacgaaggtcgattggctggcgacctggcgcaactgggtgcgcaaggagagcgcaccatctgcaactccgcggaagccggcggtgggcagcaagcgctacccgttcatcccgcccaggggctaccagctcgaggatcacgagttctggcacccgcagatgacggacacggtgctgtccactcggacccacgacttcagcacccttgagcgtttgccggacggggagggcgcatgctga

SEQ ID NO: 325380 - DNA, 426 bp, Pseudomonas aeruginosa
atgagtagagatttcggttttgttttcgtcctgcactgcccaatcatgcctggtgtgtacttgcttggttggagccatggttccccgcacaaggttgccgaggaactctctagttcgcccgctgcccctcatgattacgaggtggcctactacgcggaggtagaggaaccagaagtctatctggggcgtattgaagagatgttttccgaaagccggttttcgccggataggagcttcttctgttccaaactgatagacctgatcacagctattgagggagatggcgaggcatggtcgacatgggacagtgatatggccgtggaggcccgaaacccaggacaggttgatcgacgtaacccgctgtggttcgagcagccactgcacagcccgggataccttgagcggctgagaagggggcgcgaatga

SEQ ID NO: 325381 - DNA, 318 bp, Pseudomonas aeruginosa
atgagcaaggtcgcccaccagtccgatcccgtgatgctcaacgagcagtccttcgagcagttcggcagcgaccaggttgcctacaagatctggtgctcaatcgacactgccttcgagctgctgggccagttcgatccccctgtagtagccgaggttgccctaaacatcgccgatatccagttcgagatcatcaaggcgcgcttcgccctgatggtgttggtgaagcggctgtgcggctggcgcccggaagatatcgatgaagtattggctgagcggctcatggagaagttgcttcaagcacgggagttgagcgaatga

SEQ ID NO: 325382 - DNA, 135 bp, Pseudomonas aeruginosa
atgaccaacaccatccagattcaccgccacgccctgcctatcgttgagttccgcagcaggcgcaacctgaccacccacctcaagcgcaagatgcggaccttggtgcagcgcctggagagggagggcttggcatga

SEQ ID NO: 325383 - DNA, 357 bp, Pseudomonas aeruginosa
atgagcaagaaaagcaagcgcaataccaccgagcaggtgactcctgagtttctagccgctggccgcctctacaccagcatgtgcaagtccggcttgtcgcataccccagaagccgcaactgcgtttcagcgcatgtacgacgcagccccggagtcgttccgccaggaaatgcacgacatggctgtgcagatggggctgatgcctgccgttccggatggctataccgacgacggagagcccgtttacgaactggaagggatggccaagcggctgggcattgatcccgaagaggcgaagcgcaaagccgaagagctgggcctcaagccgaacaccctcaaagtccatagggtgaactga

SEQ ID NO: 325384 - DNA, 762 bp, Pseudomonas aeruginosa
atgaacctgaccaccatcggcggccaggccgccaccatgaccagtatcgatctgcgggacatcatcaacgaggcgcgggccgctgcgaatgaaccccgcgtcaggaatgaccagttcatcgcccgggtgcaggatgagctcggcgatgaacttggggtatgcaaaaaaattgcacacccccagagcggcgttttgatggagtgttacgagctcactttggaccaatgcatgctcgtcggcatgcgggagtccaagggggtgcgccgcagtgttctggagaggctgaaggctctgcgtgcgccgatgacccaggctgagcagatgctggctcatgcgcagattcaggtgcaactcgagcgccgacagcagcagatcgagcaacagcaggcccagcaccaggtcgctattgagcgcgtcgagcagcgggtcgaggacctgtccgaatcccgcgtttgggaccactgcccgcagaactgcatgccgatcacccgcatccgtgaggtgatcaatgaccgttatggcctgtcggccaccgtggtggacgcagtggttcggcagatgcctatcagcccgaagccctggggcatggtccgcaacggccacgagaacgcccagggcagccagtacgcggtctgggcgaccagcgatatcactgcggtcttcaagcgcttcgtcagcgagtgcgagcgggttaccgagacccaagctacccatccctatttcccgggccggttccggctggccccgaaggtgaagtcatga

SEQ ID NO: 325385 - DNA, 336 bp, Pseudomonas aeruginosa
atgactgagctcgatatcaagaagtctttgcgctcgaggagagggctggtcccggacactccgtcaaggctgtgcgggacgttcagtagcggcctgcacgtgccaggcccgcagcagattctcgacgatttccttggtcgcgtggagcgcgagcctgatccctgcaagcggttgatgcaggcgcagcgtgcaatcggtgccttgatgggcctgactgccgcccaggttcgaggtgctggtttcgtgttcttccacaaggatgtgtttcgccgtctctccgagttgaccggcgaaacggaaaacgcactggtgcagatggcgggagtagagcgatga

SEQ ID NO: 325386 - DNA, 330 bp, Pseudomonas aeruginosa
gtgaaccctggcagcttcgataccggcgacacgtttcagcgtgcgtcttcaggcgatggaattctgttctggttcatctccacgcctgccattcagaagggcgggattgcgatagcccagatggtcgccccgttctcgaccgaggaagaggcccagcgtggcgccgatctgctgaacgaccgcttccccggcaaccgttgctgggtaggccgtggcgagtacgcgccggaatacgccacccctgatcgtttggatcacgacgccaagcgagcacgcgccgacctcgccgggcttctgtccggcattaccgggaggtgcggccatgactga

SEQ ID NO: 325387 - DNA, 315 bp, Pseudomonas aeruginosa
atgcgctgggaggtgatcatgtctgatctctcgaaggcacaggcctctcgtcctccgcttcctgtcgacggggaggtgatggagcgggtcgagctcagtcgtaatgagttcgatctattcaaccacgctcggagcgatatgacgcaacttcgggctctgctgatggactcggtcgttcctgctctgggtggtcgagggcaccccgttgtgacggagattcatgacctgatcgagcggatcatcttgtgcaccgggaattttctctaccgctacaaccagcagatcggcgccgcctatcgggagcgtgacctgtga

SEQ ID NO: 325388 - DNA, 246 bp, Pseudomonas aeruginosa
atgaacgcgcttctgagagctcgccctattgacccggagaacagcttcttcaaggtcaaccctggactttccaagcgggaagccttggacgagatcagcgcacatcgcaagcaggtcgacagcatcctgttcgagttggtccctgggctccgcgaggatgtcgaaaggactgatcgcgagagctacctcgaatggaaagcccgtgagcgcgaggtgaaggatgcgctgggaggtgatcatgtctga

SEQ ID NO: 325389 - DNA, 312 bp, Pseudomonas aeruginosa
atgcaactcaaaaatatcaaaacgtcaagccaggcgcaacagctagcgaccactgaggaggttggatttctcctgacccccagcgggctctgtgcgctccaggtctgcgagggggttcccatcgtagaggtaatgcaacgttacgaggagtcgctcaacgctctctgcgttttgctcaggcgcatggccagggacgtcgttcaccctatgaacgactccgaggcggaagctatcgcgctgctcaccgaggtggtggcggctatgcacagtagctgcgtgcgcggccttgatgctacgggaggtgctgcatga

SEQ ID NO: 325390 - DNA, 198 bp, Pseudomonas aeruginosa
atgaactggttgaaagaagccttcaggcgctggaaggcacggcattgggacaaggagtacttcccagaagaccggggcggaataacgccgcttagggccttctgggagaaaaggcgcgcatcaatcatgacgttcgccctctggctgattgccctgatcgctggggcgttgatcctgaacatcgttggccttggctga

SEQ ID NO: 325391 - DNA, 393 bp, Pseudomonas aeruginosa
atgattcgtcagttcttcgtttggttcggtggcctggtcaccatggcgttgatctattgggcggcggtcattcttcatggcatcggcggctaccacgtcgagctgacgccgatcatcgcgacggtgggagccgccggcgggatcgcgctcatctgtcatgagtttggctacagcgctgggcgcaacaaggcgatgggtgaccgcctctacccagatgcagacgtggcttatgtgcactttccccaaggcatggacagctaccgggctcgcctggagttcctgaatcgagccatcaagcggctgcacgagattgagtcagccaaggccaacgatgttcaggatcaacgccccagcgatcagggcaatcagccagagggcgaacgtcatgattga

SEQ ID NO: 325392 - DNA, 1095 bp, Pseudomonas aeruginosa
atggagttcgaagagaaactggccagcctggccgccaagattcgccagcagaaatctgccatccagactgaagaggcaacaaagactgcatttgtcatgcccttcatacagtcagtcttgggatacgatgttttcaaccctttggaggttgttccggagttcacttcggatataggaactaagaagggagagaaggtcgactatgcaattctcaaggagggagagatccagatactcatagagagcaagaaggtcggcgaacccttaaatattaatcatgccagccaactatttcgttacttccacgttacaaatgctagaatatccattctgacaaatggccaggtctacaagttcttcactgacctggatgcacctaacaagatggatgagaagccattccttgagctagaccttctggatatagacgaccatgctattccggagctccagaaacttacgaaatcagcatttgacgttgagtcaatcatcaacgctgctggcgaactaaagtacgttgggcaaatcaagcgcgcactagcctctcagttcagccagccagatgaggactttgttcgactgttcgcctctcgagtgtacgaagggatcattactcagaaggtgcgcgatcagttcacccagcttactagaaaggcagcctcgcaattcttaagcgatcaaataaatgagcgcctcaaatccgcaattaccggaaactcacaacccgtcctcgtggctcagccgcaagcagaacagtcgacaccatcttctcacggtgaagaagaggaaaaggaccgggtggtgacaacggccgaagagatcgaaggctacactatagtcaaagccattgttcgatccgtggttgacgtaaagcgcatcgctgcccgcgacactcagagctacttcggtatcctattggatgacaacaaccgtaagcccatcgctcgtcttcacttcaacagatcacaaaagtacatcggaactttcgattccgaaaaaaacgaaacccgtcaccctattgagtccttggatgacattttcgctcacgctgaagcgctaaaggcgaccgccatctcctatgacacccagtcataa

SEQ ID NO: 325393 - DNA, 384 bp, Pseudomonas aeruginosa
atgaccaccgccagcatcaccgcacacggtttcaccggcttcctcggcaagggcctgtccctgcgtgagcttcagtgcgtcttgggcatcgctgcgggtcgcaccagcaaggagctagcccgcgacctgggcatgcagccgggcacggtgggtaagcgcgttctggcagcgaccaccaaactcggcgtcacccgccgtgccgccctggtggctgaagccatgcgccgcgggcttatctcgcccgccgtgatcgccctcgccttcctcgtcgccggtcagccactgctcaacgatgaccacatgttgcgcagccgccgtggcggcgaaaggaagatcgaaactcgtctgactgctcgccgcgatggcgtggcctgggtggcgtga

SEQ ID NO: 325394 - DNA, 234 bp, Pseudomonas aeruginosa
atggcctgggacagaaacgatcctctcaacatcctggcgctgcagctcgacggtgaactgcgcgcagcggccgacttctgccatggctacaacgggccggcacagcgcgctttcgcccggcacatccagggcctgggcaagacgctcgacgagcttaccgtggcagacctgaaggcggcggccgcatttgcggacgcagaactgaacgacctgcaacagagagggctgatctga

SEQ ID NO: 325395 - DNA, 255 bp, Pseudomonas aeruginosa
atggacaacaaacctctcatcaagcccgggaagctcttcctgatctgtatcgcgctgctggcctatgcagggttgtccgtcgccctggtgggcggcattgggccggccctggtcagcagtcgcgacgatgttctggtcttcgcgggattcgccatccccggcgtctggttgatcgcctcggtctgcctcggcatccacctcgccaacacccgccgcgaagaagcggccaccaccagcaaggagaaagaccaatga

SEQ ID NO: 325396 - DNA, 837 bp, Pseudomonas aeruginosa
atgaagcggattcccgctgctgcaatgctgtgcctgctcgccgtcctggcgggctgttcgaaggtgcctgccggcaacgtcggcgtgatcgtcaacctctacggctccgagaagggcgtggagacgcgcgaggtcggaactgggcgctactgggtaggcgtgaacgaggaactctacctgttccccaccttcacgcagaccgaaacctggggcggcaaggaagcgatcagcttccagaccgttgagggcatgaaggttggcggcgccgtcggcattacctactcggtatcccccgacaaggtgacgacgctgttccagaagtaccgggcgggaatcgacgaaatcacgaacaagttcttgcggaacatggtgcgcgatgccttcaacgatgttgcctcgaagcttccagtcgagagcgtctatggcgccggtaaggcggacctgctgctggccgtcgagaagcgcgtgcgcgaccaggtggcgcccatcggcatcaacatcgagcgcatctactacgcatccgacctggtcctcccgcggcaggttacgcagagcctgaacgcgaagatccaggccacccagatggccgagcagcgccgtaacgaggtcgcccaagccaaggcagaagccgacaaggaacgcgctcgggcccaaggggaggcggacgcgaagctgaccctggccaccgccgacgcgaaggcgatcgagatccgcgcccaggcgctgcgctcgaaccccgacgtcgtgaccctcaatgccgtcgagaagtgggacggaaagctgcccacctacatggccagcggctccccgcttcccttcatcggcatcagcaagtag

SEQ ID NO: 325397 - DNA, 501 bp, Pseudomonas aeruginosa
gtgccctcgtccccggcggtggcggtgccccagtccccggcggtggcggtgccccagtccccggcggtggcggtgccctcgtccccggcggtggcggtgccccagtccccggcggtggcggtgccccagtccccggcggtggcggtgccctcgtccccggcggtggcggtgccccagtccccggcggtggcggtgccccagtccccggcggtggcggtgccctcgtccccggcggtggcggtgccccagtccccggcggtggcggtgccccagtccccggcggtggcggtgccctcgtccccggcggtggcggtgccccagtccccggcggtggcggtgccccagtccccggcggtggcggtgccctcgtccccggcggtggcggtgccccagtccccggcggtggcggtgccccagtccccggcggtggcggtgccctcgtccccggcggtggcggtgccccagtccccggcggtggcggtgccatatgcgcctacctga

SEQ ID NO: 325398 - DNA, 603 bp, Pseudomonas aeruginosa
atgaaactgctgatcgtcgaagacgaaccgcgcatcggccagtacctgcgccaggggctcgccgaggcaggcttcgccgtcgacctgagcgacgatggcaacgagggcgagcaactggccctgggcggcgactacgacctgctgatcctcgacgtcatgctgcccggccgtgacggctggcagatcctgcgcagcgtgcgcgacgccgggatgaccataccggtgctgttcctgaccgcccgcgatgccgtagaggaccgcgtgcgcggcctcgaacaaggcgccgacgattacctggtgaagccgttcgccttcgtcgaactgctcgcccgggtgcgcaccctgctgcgccggggcagccagcagttgcaggagaccgccaaggagttcgccctgctcgaactgctgctgcggcgcagcggcgaggtgctgcccaagtcgctgatcgcctcgcaggtctgggacatgaacttcgacagcgataccaacgtcatcgaggtggccatccgccgcctgcgcgccaaggtcgacgacgactacccgcagcgcctgatccataccgtgcgcggcatgggctacgttctcgaagagcgcgacgaatga

SEQ ID NO: 325399 - DNA, 1317 bp, Pseudomonas aeruginosa
atgaatacttattttgatattccgcatcggttagtgggaaaggctctgtatgaatcatattatgatcattttggccaaatggatatattgtcagatggaggtttgtacctaatatataggcgggcaacagagcatgtaggtggtagtgatgggcgtgttgttttcagtaaactggaaggtggtatttggagtgcgcctacaatagttgcccaggcgggaggacaggattttcgagatgtagctggtgggacgatgcctagcggaaggatcgtcgcggcctcgacggtttatgaaacaggagaggtgaaggtctatgtatctgatgattcaggtgtgacatgggtacataaattcacattggctagaggtggggcggattataattttgctcatggaaaaagttttcaagtaggggcgcgctatgtgattcctctttacgcggcgacgggagtcaattatgaactgaaatggctagagtcttctgatggcggagaaacgtggggcgaaggaagcacgatctacagcgggaacacaccatacaatgagacttcttaccttcctgtgggagatggcgtaattctggctgtagccagagtaggatctggtgccggaggagcgttacgtcagtttataagtctggacgacggcggcacatggactgatcagggtaatgtgactgcacaaaatggtgactctaccgatattctcgtagccccttctctctcctatgtttattctgagggaggtacaccacatgtagttctcttgtacacgaacagaacgactcatttttgttattacagaacaatcctgctggcgaaagccgtagcaggctcctccggctggacggagcgtgttcctgtgtatagtgcgccagccgtctccggttatactagtcaagtcgttttgggaggtcggagaatactgggtaatctattcagggagacatcttctacgacgtcgggagcttatcagtttgaagtgtatctgggaggagtcccggattttgagtcagactggttttctgtttcttcaaatagtttgtataccctgagtcatggactccagaggtcgccgcgtcgggtggtcgttgagtttgcaaggtcatcgagtccatcaacatggaacattgtcatgcccagttatttcaatgatggagggcataaaggcagtggggctcaggttgaagtgggtagcttgaatattcggcttggaactggagcggcagtatggggcacgggatatttcggaggaatcgacaatagtgccacgactcgattcgctaccgggtattatcgggtcagagcatggatttag

SEQ ID NO: 325400 - DNA, 1080 bp, Pseudomonas aeruginosa
gtgatccccgtcgcccctcttcccctgatcgtcccgcttatctacctgtcgtcgttcgtcgccggcatctggctgctggtctggctatcgctcctggccttcagcccgcgcgcgcgccagcgcttgcgccgccgctggccgagccgcggcctgctgatgctgctcctgctgatcccgttgggactgcgcgcctggctggagatcggtctctggcagtacgagcgcgaacgtgcacgcgaggaagccgcgcacagcgccgtgctcgagcgccccacccgcctcggaggcatcgagatgcctgccggcacccggctgaagctggaactcaagcaccagccagaaagcttccgcgaagccgaattccccaccccggtgacgatccgcggcgtcgccacccgccacctgcaacgctggctgcagagcgagcaggacgacccgcaggacccatggaaaaccaccggcgtccatcccacttcgctgcgcctgcgtggcgagggcgtcgccgagatcgaaggttggcgttgcgacgccagccaggaaatcgccttcgccagcgagcgcgacgggcgtcccgccgccttcgaaggctgtagcctggcgaccggcaaccgcgccgacgagatcgacttccccgccggtgcgcgattgttcgccagcgacggcatggtctacaccgacggctaccgcgacgccgagcgctggcgggtaatgccggaaaccgggcaacgggtgtcggtgcgcggcatcgcgctgagcggcggcgccctggccttcgaccgcgaccgccgcctgtacggcctcggcggtacggccctcgccgaggccttgcaactgggcgcctggcactacccggcgggcaccgaggtcagcctttcgccccgcgctgcctggcgtgcgcaacatccgcacgcctggctgttcagtcctacccgcgaagccgcttcgcatgcctccggcgagcgcctggaacacggcgcctcgctgttacagacgctggacggcgaggaactcgagcgcctcgacaaccacgcggcaggagtcatcgacttcatcgaactggagatcggcgacgaccgctga

SEQ ID NO: 325401 - DNA, 972 bp, Pseudomonas aeruginosa
atgcagcatgtccgtcttggcaatagcggcctgaaagtctcccggctctgcctggggtgcatgacctatggcgatccggcgtggcgtccgtgggtgctggacgaggaacgggcgcgtccgttcattcgcgaggcgctggaagccgggatcgacttcttcgacagtgccgatatctattccaccggcgagagcgagcggatcctcgggcgcgcgctcagggacttcgcgcagcgcgaggacctggtaatcgccaccaaggcgttctttcccatgagcgacaggcccaacgcctgcggcttgtcgcgtaagcacctgcttgccagcgtggatgcctcgctgcggcggttgggtacggactacctggatctcttcgtgatccatcgcttcgatccggacaccccgatcgcggaaacctgcgaaaccctcgacagcctggtgcgtgtcggcaaggtccgttacctcggcgcctcgtcgatgccggcctggcgcttcatgaagatgctcgccttccagcgccaccacggcctggcgcaattcatctcgatgcagagccagtacaacctgatcgttcgcgaggacgaggaggacctcatgccgctgtgccgggaagaggggatcgcgttgacgccctggtcgccgctggcgcgtgggctgctggccggagcgcgaagcgccggcacgctgcggacccggacggacgaacaggccccgcgctggtacggcggcagggaggaagtcgagtcgaccctcggcgcgttggagaaactcgccgcagcccgcgggcttccaccggcgcaactcgccctggcctggctgcttggccggaacggtgtcgccgcgccgatcgtcggcctgtccaggccgcatcacctcgaggatgccctcgcggcgctgacgctggacctcgccgaagaggagtgcgccacgctggaggcgccgctcacggtgcgcgcccggaccccgcgctggtag

SEQ ID NO: 325402 - DNA, 759 bp, Pseudomonas aeruginosa
  misc_feature (28)..(37): n is a, c, g, or t
ttgcccggcgccagttcgccggtgacgnnnnnnnnnngtgacgctgctcaccaggtgatgcacgttgggatagctttccagggcaaacagctccggtacccgtacgctgccaggttggcaactgcgtccgatgtcgttgcgcagcaggtcgacgatcatcaggttttccgcgcggtccttggggctggccagcagcgacgccgccagcgccatgtcctcctcgggcgtcttgccgcgcgggcgggtgcccttgatcggccgggtttccaccttgcccttgccgagcttgaggaagcgctccggcgacaggctgaggatcgcgccgtcggccagtcgcaggtagccggagaacggcgtcgggcaggcctcgcgcagggcgcgataggccggccacggcgagccgctgcaagcggcctggaagcgctggctatagttcacctggtagcagtcgcctgcctggatgtagtcctggatgcggcggatcgcctgccgatagtcggatgcgctgatgctccgtcggaattttcccagaagcttgaagttgccggccgtgccttgcgtttcctcgctgaacagggcgatcaggcgctggcgttcgcgctcgtccaatcgcgggtggaataccagttggctggtgccggcctggtggtcgctgatcagcgcccaggcatacaggccgacggaggccagcggcaggcccaggtcatcgcgggcgtgttcgccgatgcgctcgatgcgccgacccaggtcgtaggataa

SEQ ID NO: 325403 - DNA, 2571 bp, Pseudomonas aeruginosa
atgttttccgcacctgccggcttcggcaagacctgcgcgctcgccgccctggccagggagcgcactgtagcagaccaggcggtggcctggctgtcgctggccgaagaagacgacgaccccgcccgtttctgccggcagctgatcgaggcgttgggcgaagccgtgccgcagcttggcgacgacgcccagacctacctgcagaacaccatgcgggtcccggtggtggcggtgatcgaaagcctgctcggcgatctcgatcgctatgcgcggccgttgctgctggtgctggacgacctgcacctggttagcaacccggacatcttcaccggcctcaaccgcctggtgcagtacgcaccgcccgggctggtcctggccctgggcacgcgttcgcagccggcgctgagcctggctacctggcgggccaagggactgttgctggaaatcggcctcgaggagctgcgcctcggcttcgaggaaacccgcgaatacctcgaacgcagcggtctctatctggacgagccctgcctgaaggcgctctatggccagaccgaaggctgggtggtgggcgtgcatctcgtcagcctgtggctgcgccagcaaccgcaggtgcaggaaatggccctgctcgacggcgacaagcaggcggtcagcgcctatctgctggcggcggtcttcgaacgcttgcctggcgacctgcaggaagcgctgctggcccttggcgttgccagccaattgagcggcgacctggccaacgccctgaccgggcgccaggacggccaggcgctgctggagcgcctggagtccatgcaattgttcctcctgccgctggatcgcgaacgccagtggtatcgcttccacctgctgttcgccgacttcctccgcaaccgcctgcgcgactccgatccggaccgtttcaagcaactgcatttcaacgccagcctgtggttcaccaaccaccacatgccgacgttcgccatcgagcatgcctgtgcggcggaagacccggagatgatcgccgcgctggtcgacggatgcggactggagctgatcaaccgcggccagctcagcctgatctaccgttggcgcaagcatgtgccggacgaaatcgccgagcgctatccgatcctggtccttaccgatgtctggtcgcgggccagcgacctcagcctgggcgaggccaaccggatcatcgacgaactgctggcgcgctggggggagagccgcggcgacgggccgatgggcgaccagtacctctccgcgctggcggtgaaggcggtggtggcgttgcagaaggacgatctggaactgtgcatcgccctggctcgccgggtcgaggtccagctcgggcagaacgctgccttcctcgaagtggcggtgttgatcaccgccgcgctggcccaggtggtccgtggccagggcgaccaggcgcggcgcctgctgggattggcgcagcagcgcaatcatttcctcgaagggcgctacctggacatgcaactggccaacgtcgaggtgatcctcgcacttgagcagggccaggtgaagcaggcgcaactgctcatcgagcggctccgccagcgtgcccggccgctgttcgagaagtccaggagcgcgctggcgctgccgaccatcaccgaggccctgaccgcctactacaggatcgagctggacgggctggaagagcgcctgggctgggcgctcgggcatgtggatgtgatcaatccgatcgatttctatgcccaggggcagatctgcctggcgcgcacccagcgcctgctgggacggccgaaggaggcgctggccagcctggcggcgatgcaggccctggcctcgcgcaatcagtcgtggcgcttcttcgcccaggccatggccgaagagatcaacctgatcctccaggacagcggccccgaccgcctgaagcgcgccgagcagcggttgaagagcgtggactggaacaagatggcggcacactaccgcaacatggccttcaacccggtcaactggtcgctgggcgtgagccgcgtgcgcctgttgcaggggcgaggacatttcagcgaggcgctgcacgccgtgccaaccgggctgcaaggtgccgcgcaacgttggcacggcctgcagcgcctgcgcctggatatcctggcggcgctcagctatcagcgcctgggctaccaggaacgggccaacagcctgctcggcgaatgcctgatcaatgccgaacgggaaggggtgcgcagcctcttcatcgaggaaggcgacggcattcgccagttgctccagcaactcgaatccaccgagcgccagccggcgctacagaccttcattcgcggcctgctcggcatctggcccgggcagggcgtgcgcaagccccaggatgcgctcgaggaaggcctgacggagcgcgagcgcgaagtggtctgcctggccgcacagggcctatccaacgaagaaatcggccagcgcctgtcgctggccctggggaccgtcaaatggcatctgcacaacatctacgaaaagctcaaggtgcgcaatcgcacccaggcgatccggcgagcccgcgagctgagcctgctctga

SEQ ID NO: 325404 - DNA, 1026 bp, Pseudomonas aeruginosa
atgagaatcagggggtacacatgcgcggcggcgctgatgctgtctatcagcggtttgtccgttgccgaggaagcctcggtcgaccaggcccgtgacgcgctggccaagaagaatgacgatgccgacagcgccaaggcgctggaggaagtcttccaggccgccgagaagagctacaccttgctgaagaagggcgagcggaccctgacctacggtttcgactacgcgctggtgcgcgaccagcggctgaccctggtgccgctgaccaagaccagcggcggcacgcagatctacggcctcgccggccggcagagccagtcccagcacaccttcaccaactccttcaccttcgactacgggatctgggacaacctcaccttcagtttccgcctgccgctggtagccaagtacgacaccgagatggatacccacgcctacagcctcggcgacgtttccgcgaccttgcgctggcagccctgggcggcggtgcgcgggcggccggtcaccacgctgtataccaccatcggcctgccgaccggcgacagtccctacaagaccaacctggacaaggacatctccaccggcaacggctactacagcctgggcttcggcgcgaacatgtcctatgtgatcgacccggtggtcctctacggctcgctcggctacacctggaacctgccggtggacgacgtgcaccagaccctggccgacaactcccagctggagaaggtctcgcccggcaacacgatcaacttcaacatgggcatggcctacgcgctgtcctacgacgtctcgctggcgacttcgtaccagatggcctacacgctgaagaaccgctaccacaccactgccggtacgttcgagtcgtccgaacagaccagtagcatcatgaacttctcgctcggcttgcggacgtcaccggactacatcgtcaacgtcaacgccggtttcggcctcacggaagactcgccggatgtactgctggggttatccgtacccctcgatatcaaagggctgaaggcccagtaa

SEQ ID NO: 325405 - DNA, 1599 bp, Pseudomonas aeruginosa
atgaagatgcgcattgcgccgctctggctggcgctggcaggggtgtgcctggcctggattccgccggccggcgcgcagatggccaacgacctgaccatcggcaacccgaaagccatggccctcggcaacgccgtgaccgccgacgagaccggcatcgattcggtgcactacaacccggcggcgctgaccaagatgaagggccgccaggcgaccgtgaagctgctcaccggggtaatggacatccgcgccggcttcaaggcgccgccgaactacggcgaaggcaccttcggcctgcgcgacgacccggtcgccaacagccacagccggaccctgaccccgaccatgtacctgcccggcctcggcggcatgaccgacgtgccgttgctggtggcgccgctggccgggatctcgatcaacccgccgggttccaagttcaccttcgccaccaacgtctacaccccgcaagcgctgggctacagccgcgattccgatagcgatccggcgcgctaccagggacgcgaggtgtcgttgcagcggctcacctacttctcgccgaccctggcctaccaggtcaacgacgagctgtcggtcggcctgtcggtgggtttttcccaccaggcagtagcgttgaacgaggatttccgggcgccgaaccagttgctcgggctgttgcagcagaccaaggagatcggttgcctgccgggaatgcaggagatcctcgaggtgttcttcaacgtctgcggcggcaacatcggtccgttccagaacctggccaatatcgacctggacatgcagcagtcgctgtcgcccagcttcaacctcggcgtgctctgggagcccaccgactggttcgcctggggcgcgacctaccagagcgagtcgcggatgaggctcaagggcaagtaccgggtcgactacggccaaggctggcagggtttctggaccggggtgcacaagtcgctcggtggtgcgatcctcggccagatgttcccctacgggaacgtcgatgaagagcatggcaacgccacgatgaacatggtctacccggatgccttctccaccggcgtgaagctgcgcccgttcaagaagtggcaattcaacttcgacctgaaatggaacggctacagcgactggaacgagttcaagatcgagttcgaccgcgagcttgacctgctgcgcatcgccaagtacctcgactcgaaggacgccaccagccacagcatcaccctcgaccgcggctaccgcgatacctggagctgggccatgggcgtgcagtacgacgtcaacgaccgtttgcagctacgcgccggctacgaataccggccttcggcgatccccaagggccaggcggacatcctggtgccgatcggcgatgccaatctctacggcctggggctgggctaccagtgggacaaggacacggtgatcgatgtcggtttcaactacttcgtaaccaagcagagcgtcaaggccgataccagctgcaacctgaactgcaccgggctcgacaacctggtgtacaacccctacgcgggactggacgtggacaccacggtgaaggcctatattttcgccatgacctaccgtacgaccttctga

SEQ ID NO: 325406 - DNA, 735 bp, Pseudomonas aeruginosa
atgcccctacgcaccacaacgcccctgctcgcgctgctggcgttcgccctgctggccgccccgcagctccatgcgcaggacgcaaggccgtcgttgaacgtcggctactacgaattccccccctacatctataccgcccgggatggccacgccgccggttccggcgcccgcctggtccgcctgctgctggagcgggccggctatcgtccggcgttccgtgccctgcccagcgcgcgcctgtacctggggctgcaggacggcagcgtggcgctgtgggccggcgcggccaagccggagctggccgccgacaccctccaggcgcggcgcgtgctcggccacgtcagcctgaacctgtactacccggcgcaccagccggcaccgcgggttccccaggacctggccggacgccggctgatcctgatcagcggctacagctactggaaaccggtcaccaacttcatccaggaccccaacctgcacctgcgcctgtaccgcaccggcacccaccacgctgccttgcgcatgctcgaactcgggcgcggcgactacctgctcgactaccaggcgccggtggaagcggccagccgccaggcgttggcgagccaggaactgtaccgcctgccgctgcggatgatcgtctcgcgccacattcccggcgccgaagcgctgcgcgaccgcctggaccaggcctacgaccagttgcggagcgacggcgccgacctgtccctgctgtga

SEQ ID NO: 325407 - DNA, 897 bp, Pseudomonas aeruginosa
atgagtcccgattccccccacgcccgcctgctgcgcctggccaccctggcctcgctcggtgtcgccgtcaccctggtcatcggcaaggccattgcctggtggctgagcggttcggtgagcctgctcgccggcctcaccgactccctgctggacagtgccgcctcgctgctcaacctgctggcagtgcactattcgctgcgcccggccgacgacgaccaccgctacggccacggcaaggccgaggccctggccggcctggcccaggcgatgttcatcggtgccagcgcggtgctggtggctatccaggcggtcgagcaattgcgcgacccgcagcccctcggcgcggccacctggggcatcgcggtgatgctgctgtcgctgctgctcacggcccttctcctggccttccagacccacgtcatccgccgcaccggttccaccgcgatacgcgccgactcgctgcactaccgctcggacctgctgctcaacgccagcatcctcgtggcactgctcctggcccgctacggctggccacagagcgacggcctgttcggcctgggcatcgccctgtacatcctctggagcgccctgcagatcgctcgcgagtcggtgtcgatcctgatggaccgggaactgcctaccgacatcagcgagcgcatgcgcgaactcgcctgcagcgtgccgggagtgctcggcgcgcacgacgtgcgcacgcggatttccggcaaccactggttcgtccagttgcacctcgagctgcccggcgagctgagcctgtcggtggcccacgccctgaccgaccgcgcagtgctggcgatcaagcgcgaatacccgaaggccgaggtgctgatccatgccgacccgcaggaagtggtcggcaaggaaaccgtcagttga

SEQ ID NO: 325408 - DNA, 426 bp, Pseudomonas aeruginosa
  misc_feature (361)..(370): n is a, c, g, or t
atggctgagctgcaacgcgcgagtgtgacgggaggtgggctgtacgagaggctgctgcagcgtctcgccctggctctggatgaagcggatacggccgagcgcctgcgtgacgagcatcccacggagcttgagttgcgtggtttgagcgaagcggagatggggctgatacgcgcctatctcgaccaggacctgcactggttgcgcggctggcatgcggccgccgaggagctggcgctgctcgagcgccagcccggcaggacaccccggccgccccggccgcaaccgccggcgccgcgtcggcacgtctcgttgaaacagcggcaactgctctgtgcgctctgcggtgcgccggtgcagtggnnnnnnnnnntgttgccgtgcggccattgcggctcgcaactgttccgttcgggcaacgaccgctag

SEQ ID NO: 325409 - DNA, 1005 bp, Pseudomonas aeruginosa
atgttgaaacgcttcagtcgtgtgctcgcggcttccgccctgctcgccggctcccttgccgggatggcgcacgccgaccagccggtgatcaatttcgggatcatctccaccgagtcgtcgcagaacctcaagagcatctgggagcccttcctcaaggacatgagccagcagaccggctaccaggtgagggccttcttcgcccccgactacgccgggatcatccagggcatgcgtttcgacaaggtcgacatcgcctggtacggcaacaaggccgccatggaagcggtggatcgcgcccacggcgagatcttcgcccagaccgtcgccgccagcggcgcgccgggctactggagcctgctgatcgccaacaaggacagcaagatcgacagcgtcgaggacatgttggcgaacgccaagagcctgaccttcggcaacggcgatccgaactccacgtccggctacctggtgcccggctactacgtgttcgccaagaacaacgtcgacccggtcaaggccttcaagcgcaccctcaactccagccatgaggtcaacgccctggcggtggccaacaagcaggtcgacgtcgccaccttcaataccgagggcatggagcgcctggaactgacccagccggagaaggccaggcagctcaaggtgatctggaagtcgccgctgatcccgggcgacccgctggtgtggcgcaacaacctgagcgacgagcagaagaacaagctgcgcgacttcttcttcaagtacggcgccaacgccgagcagaagaaggtcctcgccgacctgcaatggtcgaagttccagccctccgacgacgaccagttgctgccgatccgccagctcgagctgttcaagcagcgcaccgacgtggcgaacaacgccaacctcggcgccgaggagaaggccgccaagctgaaggccctcgacgaggagctggccaagctggagaaacgcatggccgagcgcgagcagaagaccgccgccaacgccggctga

SEQ ID NO: 325410 - DNA, 1554 bp, Pseudomonas aeruginosa
atgtggacgcgcctgctgccgttcctcgcctggctaccggggctacgccggggcacgctcaggcgcgaggcctgggtcggcctgaatggcgcgatcctggcactgccgcaatcgatggcctatgcgctgatcgccggcctgccagcggagtacggcctgtacgcggcgatgctgccagtggcgatcgcctgcctgtggggctcgtcgcgctacctggtgagcggtcccaccgcggcgatctcggtgctgctgttcagttcggtggcccccctggcgccgctgggcagcccgcaatacgtccaggccgtgctgctgctgacctttctcgccggcgccttccagtggctgctcggcgtcctgcgcgtcgggtcgctggtcaatttcgtctcgcattcggtgatgctcggcttcacccttggcgcggcgctgctgatcgtcctcggccaactgccctatcttctcggcctggccgcgagcggggagggcgcagcgccgggaaacggctggcggctgctggcgcggttcgccgagttcgatggcccatcgctgctggtgggcggcttcagcttcgcgctcagcctgctggtcaggcgcctccgaccgcgctggccggccctgctgcttggcttgctgggcggtgccacgctggtctgggcgctacccgggaccttcgcctcggtagcccatgtgcaggccttatcgagtgcactgccgggttggaatccgctggtcttcgattcccgatcgatcctcgacctgctacctgcggcggtggcctgcggcatgctcgggctggtcaccagcctgtcgatcgcccgcgccctggccgcgcgccagggagacgcgttcgatgccaaccaggaggtccgcgcccagggtctgtcgaacctgctcgggccttggctgtcggcgagcctgtcggcgggttccttcacccgctccgggctcaatctggaagccggtgcgcgctccccgctggcgggtgcgttttcggcgctctgggtggccctgctggccgtgctcggtgcgcgcctgatcgagcatgtaccgttgccggcgatggccgcaggcatcctgctgatcgcctggggcctgatcgaccgcccggcgctccgcgcgctctaccgcagcggccgcgccgaatgcctggtggccggcctaaccgccctggccacgctgctgttgccgctgcagaacgccatctacgcgggagtgctggcgtcgctgttcttctacctgcggcgcacctcgacaccacgcgtactgcgccagcgcaacgacgaggaagaggtgctgcgcatcgaaggctcgatcttcttcggcgcctgcgactacctgcaacgcctcatgcgccaatgcgacaggccacggctggtgctggacgcccgccaggtgaacttcatcgacttcgccggcgcagtgctgttgcagcaggaagcccgccgcctgcacgccgagggacgccgcctggtattgcgccacgctcgcccgcaggtccgcgaagcgctgggccggcaggccgacgaaggctgccgcctgcactacgaaggctga

SEQ ID NO: 325411 - DNA, 1287 bp, Pseudomonas aeruginosa
atgcacagactgctctctgaccgcgctcggggctggcgtcgcgcactgtgcggggtcgccttcgggctgctggcgtggagcgcccatggcgtccccgccaaggcgccgcaggatctgcggatcgacggcgaggtgctgccggggaaaagcgtcgacctgctcgagcaggccttgtcgcgggtcaagttcaacaccgacccgcagcagttgcgccgtggcctggtggaaaaccgcctgctggcacgcgcggtggaagaccagctcaccgcgcagagccgcgccgatctcgacgccagcgtggagatcgaggccggcaacctgctcgaacaggtatacggcaggcgctaccgcgaggacctcgggccatacctgcgccagccccgggccctgagcgcggagcgtttgcgcgaggtgctggcgccgaggagccgcggcctggtggaaaacagcctgctgctggacgagacgcagcgccgcgaggcggccggggtcgagctgatcggctggcagtttcccggccagccggcacaggtcctcgacctgctatcgctgtacgaaggcgacaacgtccagggccaggtcgaattgcaacagggcaacctcgcctacctggcgcgccaggtccagacccgcatccgccgcgactacctctggtaccgcctggcccgggacggcttcggcccggcagagcggcagggcgtgaggaccctggtgcgggacaagctggtgcgccatcgctatctgcaccagatcggcctctacagtgatttccaccatgagtccgatgcgctgcgggaactcgccggcaaggtcagcgacaaggacgccgaggcctactatcggcgcaacctggagcgttaccgcaacgtcgcgcaggtgcaggcggcgcatatccgcctggccgaccaggcgagcgcggacaaggtctacgccgagttgcgcaacggcctggccttcgacgaggcggtacgccgctattccctggccgacgacagggaccgcgacccgcccggcgacctaggcctgatacggccccaggacggccggctcgacctgctgcgcaagactgcgctgatccagaaggccgatacggtttcccagccgatgcgcatcgacggcgcgttcgagatcgtccgggtgcgtagccgcgaggatcgccagttgcccctcgacgaccgcagcgtgcgcttcgaggtgaaccaggcggtggcgcgcgagcaactggcagcacagttcgagacgcgcctgcgcaacctgctggccggcgccagggtggaaggcctgtga

SEQ ID NO: 325412 - DNA, 909 bp, Pseudomonas aeruginosa
  misc_feature (184)..(193): n is a, c, g, or t
gtgaccgaccgtatcgccgctgtcaaaacctacctgctcgacctgcaagaccgcatctgcgccgccctcgaggcggaggacggcaaggcccgcttcgccgaggacgcctgggagcgtccggccggtggcggcggacggacgcgggtaatcggcgacggcgcattgatcgagaagggcggggggnnnnnnnnnngcgatagcctgccgccctcggccagcgcccatcggccggaactggccgggcgcggtttccaggcgctcggcgtgtcgctggtgatccatccggaaaacccccacgtgccgacttcccatgccaacgtgcgtttcttctgcgccgagaaggaaggcgaggagccggtctggtggttcggcggcggcttcgacctgaccccctactacgcccacgaggaagactgcgtgcattggcaccgggtcgctcgcgacgcctgcgcgccgttcggcgcggacgtctatccgcgctacaaggaatggtgcgaccgctacttccatctcaagcaccgcaacgagccgcgcggcatcggcggcctgttcttcgacgacctcaaccagtgggacttcgacacctgcttcgccttcatccgcgctatcggcgacgcctatatcgacgcctacctgccgatcgtccagcgccgcaagcacacgccgttcgatgaacggcagcgagagttccaggcctatcgtcgcggtcgctacgtggagttcaacctggtcttcgatcgtggcaccctgttcggcctgcagtccggcggccgtaccgaatcgatcctgatgtcgttgccgccgcaggtgcgctggggctatgactggaaacccgagccgggcagcgaggaagcgcgcctgaccgagtatttcctcgccgaccgcgattggctcgccggccagccctga

SEQ ID NO: 325413 - DNA, 624 bp, Pseudomonas aeruginosa
atgaaaaaatcacttgttatgtcggctgtgcttttggtggctagcaatttcgcgtgtgctgatgagggctcaaatgatggaagtgagatatgtcgggcgcagggtggagttgaaataacaagtctgggggaagtctcaaagggtgtggatgttgaagatgttgtagtttgttcgattcttccaagtaatatgaagtcgagtcaaagagcgcctacactccctcctctgcaaaggatgatcatttcggcaatgccttcaccaggaacggtcactgtttctgccagcggagataggaaatttacaacatcttgccgggcaaatctttatgctccacgttatgccaatttctatccagacggtgttagcaggggaacatcagatctacgatgtgttggttacaatacacccgggaattcatctcaagggtgtaatgtgtcatgggacggcccgaccgacattcaattgggtgttgagccatatggcggatctgttgttgtaaactacagttgcactgcattcaaaacaacgattccagtgataatgagctacagttatcgtgatgggcgggcagtgtatggcgaggtccagaatgtgtcaggaataataaatgtggttttgaactaa

SEQ ID NO: 325414 - DNA, 219 bp, Pseudomonas aeruginosa
atggaacgcttgctcgagagcatttacatcaatgcccggccggcgatggagttgaggcttagcctcaccagctccggccgcaagagaatggtaaagattgtggatggggaggaggtcgaggttctgccaggtgaagtgcagggcatcctggaggcccaaaagagggatgttggaatcctcgccgacttcttagccaagagtctcgtggcgcgacgctag

SEQ ID NO: 325415 - DNA, 840 bp, Pseudomonas aeruginosa
atggtggccaagtttgccgatcacttgccgctgtaccggcaggaaaaaatctttggccgcgccgggctgccaattgcccgctcgaccctggcgcagtgggtcggacaaactggcgtgcggcttcagccactggtcgatgcactgcgtgaagccgtgctgaaccagggcgtgatccacgctgatgaaacaccggtgcaaatgcttgcgccaggcgagaagaaaacccaccgggcctatgtctgggcgtacagcacgacgccgttttcagggctcaaagcggtggtttacgacttcagcccaagccgtgctggcgaacatgcgcgcaacttcctgggtgactggaacggcaagctggtctgcgacgacttcgctggctacaaagccggtttcgaacaaggcatcactgaaatcggctgcatggcccacgcccggcgcaagttctttgatttgcacgtggcgaacaaaagtcagctggctgaacaggccctgcactcgatcagcggcttgtacgaggtcgaacgtcaggcgcgggacatgagtgatgaagagcgctggcgaatacgacaagaattggcggtgccgatcctcaaaaaactgcatgactggatgttggctcagcgagacctggtgcccaatggatcagccacggccaaagccctcgattacagcctgaaacgctgggtagcgctgacgcgctacctggacgatggggctgtgcccatcgataacaatcaggtcgagaaccaaatacggccatgggcgctcgggcgttcgaactggctgtttgccgggtcgctgcgcagtggtaaacgggcggctgcaatcatgagcctgatctag

SEQ ID NO: 325416 - DNA, 546 bp, Pseudomonas aeruginosa
gtggcgcgcgaatgcctgagcctgtcgagcgcaccgaaccaggtcttgtcgatggatttcgtcttcgacgcgctcagcactgggcgacggatcaaatgcctgacggtggtcgatgacttcaccaaggtgtcggtcgacatcttggtggagtacggtatcagcggttttcgtgtcacgcgggcgctggacgagatggcgcggtttcgtggctacccgcaggcgatccgcaccgaccagggccccgagttcaccggcaaggcgcttgatcagtgggcctgtcagcgtgacatcaagttgaagctgattcagcctggccagcccacgcagagcgccttcatcgagtcattcaacggcaagttccggggcgaatgcctcaatgagcactgctcgctggtcgaagccagaatccgtatcgcggcttggcgggattacaacgagcaccgaccacacagcgccattggcaatctctccccggcagagcttgctgcgaagtggcgaaccaaccagcagcagctgaagcgggaaaagttgatatcaaccccatag

SEQ ID NO: 325417 - DNA, 2064 bp, Pseudomonas aeruginosa
atgcatatccaatcgttgggggctactgcctcctcgctgaatcaggagcctgtcgaaaccccgtcgcaggcagcgcataagtccgccagcttgcgtcaggaaccttcagggcaaggtctcggggttgccctaaagagcacgccgggaatactttccgggaagttgccggaaagcgttagcgacgtgcgtttcagcagtccccaagggcaaggggagtcccgtactctgactgactcggcagggccgcggcagatcactctgcgccagtttgagaacggagtcaccgagctacagctcagtcggccaccattgaccagtctggtcctaagcggcggtggtgccaaaggtgcggcatacccgggagcaatgctggcgctagaagagaaaggcatgctcgatggcatccgcagcatgtccggttcgtccgctggcggcatcaccgccgcccttttggcctcaggtatgagcccggcggcgttcaagaccctttccgacaagatggatcttatttcgctgctcgacagctcgaacaagaagctgaagctgttccaacacattagcagcgagatcggcgcatcgctgaaaaagggcttgggcaacaagatcggcggcttctctgagttgctgctcaatgtactcccacgcatagattcgcgggctgagcccctagaacgcctattgcgcgacgagacacgcaaggccgtgctcggacagatcgctacgcatccagaggttgcacgccagccgaccgttgccgccatcgccagcagattgcagtccggctccggagtcacctttggcgatctagatcggttgagtgcttacattccccagattaagacgctgaacatcacaggtacggccatgttcgaggggcgtccgcaattagtggtgttcaatgccagccacacaccggatctggaggtcgcccaggcggcacatatctccggttccttcccaggagtgttccagaaggtcagcttgagtgatcagccgtaccaggccggcgtagagtggacagaattccaggatggcggggtgatgattaacgtgccggtccctgagatgatcgacaagaattttgacagcgggccactgcggcgcaacgacaacctgatccttgagttcgagggcgaagctggggaggtagcgcccgaccgaggtactaggggcggcgcgctcaagggctgggtcgtcggggtgcctgccctgcaggcgcgcgaaatgctgcagctcgagggcctggaggaattgcgcgagcaaaccgttgtggtgccgttgaagagcgagcgcggtgatttcagtggcatgctcggtggcaccttgaacttcaccatgccggacgagatcaaggcgcatcttcaggagcgcctccaggagcgagtcggtgaacatctggagaaacgtcttcaggcttcagagcgtcataccttcgcttctctcgacgaggcgctgctggcacttgatgacagtatgctcaccagtgttgctcaacagaacccggagatcacagacggggcggtggcttttcgccagaaggcgcgggatgcgttcaccgagctgactgtcgctatcgttagcgccaatggcttggcgggtaggctcaagttggacgaggctatgcgctccgctcttcagcgactcgatgcgctggcagatactccggaacgcctagcatggttggcagctgagttgaaccatgctgataacgttgatcatcagcagttactcgatgccatgcgcgggcagacggtgcagtcgccggtgctcgccgctgcgttagcagaggcgcagcgccgcaaagtggcggttattgccgagaacattcgtaaggaagttatcttcccctctctgtatcgccctggccagccggattccaacgtagctctgttacgtcgggcggaggagcagctacggcatgccaccagtccggcggaaatcaatcaagcgctgaacgatatcgtcgacaactactcggcacgaggcttcctgcgtttcggcaaacccttgagttcgactaccgttgagatggctaaggcttggcggaataaggagttcacatga

SEQ ID NO: 325418 - DNA, 471 bp, Pseudomonas aeruginosa
atgcaacacagccaagtgtcccccaacgcgcgccagcaactggccgagaccgtggtcctgaacaaggcccgcctgggcctgtcctggcaggatctggccgacggcaccggtctcgccctgaccttcgtcaccgccgccctgctcggccagcatgccctgccagaggcggcggcgcgcaaggtcgccgcccaactcggcctggacgacgacgcggtgctcctgctgcaaagcatcccgctgcgcggcagcaacgccggcggcggcctgctcgacccgatcaccggcaagaactacgagatgctgcaagtctacggcagcaccctgaaggcactggtccacgaacagttcggcgacggcatcatcagcgcgatcaacttcaagctggacatcaagaaggtcgaggacccggaaggcggctcgcgggcggtgatcaccctcgacggcaagtacctgccgaccaaaccgttctga

SEQ ID NO: 325419 - DNA, 888 bp, Pseudomonas aeruginosa
atgctgcttcgccacctgcgctacctgctcgctgtcgccgagcatcgcaacttcacccgcgccgccgaggcgctgcacgtttcgcagccgaccctgtcgcagcaggtgcggcaactggaagagcaactgcgcgtgcaattgctcgaccgctccggcaggagcgtgcgtcccaccgatgccggcgagttgtacctgcttcatgcgcggcgtgccttgcgcgagctggaagcggcgcaacgggcgatccacgaggtgcgcgacctcagtcgcggccgcctgcgcctgggcatgacgccgaccttcacctgctatctggtgggcgccctggtggatccgttcaatcagcgctatccaggcatcgagttgagcctcgaggagttgccccaggacgccctggaggcggcgctgatcgacgatcgcctggaccttggcgtggccttcagcgaaccgggttcgctggagatcgacagccagccgctctacctggagcgcctgggcctggtgctgggggcggaacacccggcggcggacgcaccgctggccgccgcagcgctggcggagttgccgttggcgttgttgcgcgacgacttcgccacgcgccggcacatcgacgcttacctgcgccagcaaggggtgacggcgcgggtggcgctggaggcgaactcgatcagcgccatcgtcgacgtggttcgccgcggacggctggccagcatcctgccagaggcggtggcgcgccagcaggccgggttgcgctgcgtggcgctgcggccggcgttgccgacccgccaggtagcgctgttctggcgccagggcagccatcccggcgccgcgcgcctggccttccaggccctggcgctggaactcggcgccgagctgggcgacgcctga

SEQ ID NO: 325420 - DNA, 1725 bp, Pseudomonas aeruginosa
atgatcattctcgggatcaccaacaacgacctggccggcgcctgcctggtgcgcgacggcgggatcgtcgccgccgccagcgaggagcgcttcacccgccagaaggaccacaaggcctggccgagccgctccatcgactatgtgctcggcgaggccggcatcgacctggccgacatcgaccgcatcgcctacggctggaacgccgggttcgacgccgggcggcacctcgacctctacctggaccgggtcctcgaggaaacccgcgagcgtcccgagggcctgccgcacctgcgcaagcggatcgccgacgagatggccaacgacaaggccaagcgcggcgaattcgatgccttcgtccgcgccaacggcctgcgcggcaaggtcgagtacatcgaccatcacgaatgccacgccctcggcgcattcgtctgctcgccgttcgacgaggcgctgaccctcacctgcgacggccgcggcgacttccagtcgctcaccgtcacccactaccgcgccgacggcggcgagacggtcctgcaacgcgagaccagcgtcgacagcctgggctacttctacgggcgcatcacccgcctgctcggcttcaagccgaaccgccacgaaggcaagatcaccggcctggcggcgttcggcgacgcggaaaagctgctgccgctgatgaacgacatgatccgcctggagaacggccgcctgcgcgcccgctgcggcgaactgtacctgccctcctacgacggctacagcgatccgctgctgcaacgctgcgcggcggaacgcccggcggatgtcgccgccgccgcgcaacggcactccgaagacctgctggtggccatcgcccggcagcacgtggcgcgcaccggttgcgccaacctgtgcctggccggcggggtgttcggcaacgtcaagctgaaccagcgcctgcgcgagatccccggggtccgcgatgtctacgtgctgccctgcatgggcgacggcggcctggccctggccgcggcggtggcggtggcctatcgcgagaacggtacgcgcttcccggcgccgagcatggccctcgggccggacgcgcgcagcgccgcgcagaatgccgagctgatcgccagccagtacccgcagctggcctacagccggccagccaacctgatcgagacgctggtcgaagcgctgcgggaaaaccaggtgctgggcatgttcaagggccgcatggagttcggtccgcgcgccttgtgcaaccgcagcatcgtctaccatcccggcgatgccagcgccaacgactggctcaatcagcgcatggaacgcaccgagttcatgccattcgccccggtcaccgcggtcgagcacgccgagggctgctacatcggctggcgcgaagaccaggtggcggccgactacatgaccatgacctacgactgccatgcggatttccgcgagcgctgcccggcggtggtgcatgtcgacggcaccgcccggccgcagatcatccggccgcaggccgatccgttcatgcacgccctgctgcatgcctggcatgcccgcagcggccagccggcgctgatcaacacctccttcaaccgccacgaggaaccgatcgtctgcgccccgcaggacgccctcggcgcgctggaggacggcatggtcgacctggtggtgctgggcgagtccctgctggtctggcgcaagggcgagaacgccttcgccagggcgcgcttcgagtga

SEQ ID NO: 325421 - DNA, 1101 bp, Pseudomonas aeruginosa
  misc_feature (1053)..(1062): n is a, c, g, or t
atgcttgcttcagcgattgccagcggtaccgcagtctcccaggtctccaagcatctcctaatgttcctggccgcccttttcctcgccctcggtgcatgcggctgggcgatcctgcacatcgccaggcagcaggacgacatcgccatcgagcagagccatttctacgtggaaaaggcgctgcagaatcgccgggaaaattccgagcagttctccaccacctattcgttctggaccgacgcctacgtctatctgggaaaccgggtcgacgtggactgggcctttaccaagaacaacctcggctcggtgctctacaccaccaacggctacgacggcgtcttcgtcatcgacgaccgtggcactcgctacgccatgctcgagggcgagctgtccgagcgctcgctggccgactcgctgggcgccgatgccggagacatcctcagcgccgcccgccgcgccgcggtggacgaggcggcgatcagccgctacgtcgacttcgacggcgcaccggcgatcctggtcgcctcggcgatcaagcccaccagcgatcatgcgcccatcgacctggacaaggcctcggtgatggtcttcgtcgaccggctgaccccggcgaagctggccaagctcggcggcgactacggcatcgccaacctgcacctgttggtcggcggcgcggcgggcgacaaggaaagcctggccctggaggacactccccatcgcctggcctgggtgtcgtcgcgtccgggtagcgccatgctgcgggagaccgcgttgccgctgctggggatcttcgtgctcgccgccgggctgctgttctggctgagccgcagcgccgtgctcaacgcccgcgcggtagatcgccagcagaaggtcctgaaacgcagcaaccaggccctgctggccagcgaggaacgtttcaagtcgatagccgaggcggcctcggactggatctgggaagtcgacgggcatttcgtcttcacctatctctccgtgcgcttccgcgacgtcaccggctaccagccggaggccaggcgatggggagtgtcctccagggcnnnnnnnnnnggcctggatcgggcggcggctggacgagttgctggatag

SEQ ID NO: 325422 - DNA, 624 bp, Pseudomonas aeruginosa
gtggatacggataccgcgctcgatatcggcaacgataccgagcatctgctacaggacgtgcagggcaccctggccgacctcgccggcatggcccagcaactgagccagcagaagcaggaagcgctcaagcagcaggagtcgctggagtcgctccagacgcaattgcacgagaaggagcggcaattgcaggaaaaggaaaagcagctccgccagtggcacaagcgcctgcaggacgaccgccaggcgctggagcgggaaactgagcagagcaaccgtctcctcgccgagcgcagcgcggccctgcaacaactcgcggaaagcgtcgaagcccgcgagcgcagcagcgcgcggcgagccgaagtactgcagatcgaacaggaacgcctcgaagagttgcgcagccagcagaacctgcgccaggccgaactggaaaagcgcgaagccagcgtccagcagcgcagcctggaactcggcgagcgcttcaagaagctggaaagcgcccgcgagaagctggcgcagatcgtcaagggtttcaacgagaccgtgcagttcaataccgctctgcacgccatcagtcataccgggttgaaacgccaggaagagagcacagccgaactggaataa

SEQ ID NO: 325423 - DNA, 477 bp, Pseudomonas aeruginosa
atgagtgatttgccaagcccgaagaaacacaagacctcgaactggtcggcgatctgggtgctgccgctggtggccctggctatcggggcctggctgggctggcgcgcctacgaccaggcaggggtgctgatccaggtgcgcttcgagagcagcgatggcatccaggcgaagaagaccgaggtgctgtacaagggcatcgcggtcggcaaggtcgtcgcgctggatgtcagcgaagatatcaagggcgtggtggccaccatcgaaatggacaaggaggcgcgccagtacctgagcaagggtacccgcttctggctggtcaagccgcgggtttccctggctggcgtcaccggcctggaaaccctggtctctggcgtctacatcgcggtcgatccggtgaagggcgagaaggaagaacgcaacttcaccgcgctgaagcagccgcccccctttccgacaggctgcccggcctgcacctga

SEQ ID NO: 325424 - DNA, 198 bp, Pseudomonas aeruginosa
atgttgaacaggatcgaggtgatcgagccaccgaacaacgcgccccagtacatgcaggaaagcaggatgatcgccgacaccggcgacatgctgaaggtcagcggcagcagcagcgccaccccgttcggcgcaccgaggcccggcagcacgccgaccaggatgccgagcagcacgccgatcaccatcaggccgaggtga

SEQ ID NO: 325425 - DNA, 198 bp, Pseudomonas aeruginosa
atgccgaacaggccgatcaccgccacctcgaaactcagcccggaaagcagccagggctggtcgaaggtcaggcgcaggtcgccggacacggtatccatgcccacggcggccatggcgaagccgatggtcatcgccaccagggtcttcaatggcgggttgcggctcatgccgatgaaggtgcagaacgccagcaggtag

SEQ ID NO: 325426 - DNA, 585 bp, Pseudomonas aeruginosa
atgaaacccagctacgacgacacccgccagcatctgctcgataccggataccggatcatggcggtcaaaggcttctccggcgtcggcctcaacgaaatcctgcagaccgcgggcgttcccaagggctcgttctaccattacttcaaatccaaggaacagttcggccaggccctgctggaggactacttccgcgtctacctggcggacatggaccaacgcttctccgcgccagggctgaatgcccgcgaacgactgatgagttactggcagaagtggctggacaacgcctgcccgccctgcgacgagcagcgctgcctggtggtcaagctcagcgccgaggtcgcggacctttcggaaagcatgcgcatcaccctgcgcgacggctccgacgggatcatcgaacgcctggtcggctgcctcgggcagggccgcgacgacggctccctcgcgccctgcgatgcccggcacatggccagcgcgctgtaccagttgtggctcggcgcgagcctgctgagcaagctgcaccgcagcccgggaccgctggaaacagccatgcagaccacccgcagcctgctggaaatctga

SEQ ID NO: 325427 - DNA, 339 bp, Pseudomonas aeruginosa
gtggcgtccggtggcgcggcgcaggcgatcgctgcagtagccgatgcacatccgcccctggcagtcgcccatgccggcgcgggtgcgcatcttcagcccggcgatgtcctgcacgccctgttcgagcgcgcgctcgaacagggcgtgcaggacatcgccgggctgaagatgcgcacccgcgccggcatgggcgactgccaggggcggatgtgcatcggctactgcagcgatcgcctgcgccgcgccaccggacgccacgacgtcggctggctgcgaccgcgtttcccgatcgatccgatcccgttttccgcattccagaacctcggtacggaagcctga

SEQ ID NO: 325428 - DNA, 1254 bp, Pseudomonas aeruginosa
atgaacagaacctatgacatcgtgattgccggcggcggcgtgatcggcgcgtcctgcgcctaccaactgtccaggcgcggcaacctgcgcatcgccgtggtcgacgacaagcgaccgggcaacgccacccgcgcctcggccggcggcctctgggccatcggcgaatcggtggggctgggctgcggggtgatcttcttccgcatgatgtcctcccgcaaccggcgcgaggcccagggcgcggcggtggcggtggacgcgagcacgccgcacatcctgccgccggcgttcttcgacctcgccctgcaatccaacgcgctgtacccggaactgcaccgagaactgatcgaacgccacgggatggacttcaagttcgagcgcaccggcctgaaatacgtgatccaggacgacgaggatcgccagtacgccgagcacatcgtggcgcagatcccgcatctggccgagcaggtacgctggctggaccgcgaggaactgcgtcgtgccgagccggcggtcagccacgcggcccacggcgcgctggaattcctctgcgaccaccaggtcagcccattccgcctggccgacgcctacctggaggcggcgcgccagaacggcgtcgagctgttgctgggaaccaacgtcaccggcgtgctgcgccagggccggcggatcagcggagtgcgcacggacaatgccggggtactgcattgccgcaccctgatcaacgccgccggcgcctgggccgccgaactcagcgagctggccaccggccggcgcatcccggtgaaaccggtgaagggccagatcgtcctcaccgagcgtatgccgcgactgctgaacggttgcctgaccaccagcgactgctacatggcgcagaaggacaacggcgagatcctgatcggcagcaccaccgaggacaagggcttcgacgtcagcaacaccttcccggaaatcgccggcctggtgcagggcgcggtgcgttgcgtgccggagctgcaacaggtcaacctcaagcgcacctgggccggcctgcgcccgggctcgccggacgaactgccgattctcggtccggtggcggaggtggagggctacctgaacgcctgcgggcatttccgcaccggtatcctcacctcggcggtcaccggggtgctgctcgaccggctggtccacgaagagacgctgccgctggacatcgcgccgttcctcgccgcgcgcttccagccggagcctgccgccgtggcggtcgcggcctgctag

SEQ ID NO: 325429 - DNA, 345 bp, Pseudomonas aeruginosa
atgaaccaggcgatccgcgtggtagcgctgttgcaggcgcgcgagggcagggcggcggaggtcgagcggctgctgctggcctgcgtgcagccgtcgcgggccgaggacggctgtctgtcctacgtcctgcaccggagcctcgacgaggccgggcgcttcgtcttcgtcgaacgctgggccgaccgcgacgccatcgagcggcaccgacggatgccgcactacagggcgatggccgatgccgtcgccgatctcctggcggaccgccaggtgttccttctcgaggaactgccagcggccagcctgtctccggtagatccggaacctacaagaccccacgaggagtga

SEQ ID NO: 325430 - DNA, 876 bp, Pseudomonas aeruginosa
atgaaagtcggatttctgggcctgggcggcatgggcgccgccatggccacccgcctggtgcaggcggggctcgaagtgacgctgtggaaccgttccgcggcggcctgcgagccgctggtggcgctgggcgcgaccagggcggaggaggtcggcgagctgttcggcctcgacgtggtcatcagcatgctggcggacgaccaggcgattcgcgccgtgctgctcgacagcggtgcgctcgaacgggcgaggccgggtctcatccacctgagcatgtcgaccctgtcgctcgattgcgtcgaggcgctcgaccaggcacaccagcgccagggcatcgcgttcgtcgccgcgccggtgttcggccgcaccgacgtggccgaggccggcaagctgaacatcgtcgtcggcggtccggaggaagccatcgagcaagtcaaggcactgctggaaattatgggacagaagacatggtttttcggaaaagacccgcgcagcgcaatggcggtgaagatctctggtaacttcatgatcgccagcgccatcgaaagcatgggcgaaagcgtcgccctggtgaagcgcctgggcgtcgagcccggccggttcatggaactcatgtcctcgacgcttttcgatgcgcctgtctatcgcaactacggcccgcagatcgtcgagcagcgtttcaccccggccaggttccgcctggtcctcgggttgaaggacgtcgacctggcgctgtccgccggcaagcgccacaacgtgccgctgccgctggccagcctgttgcacgacgtgttgctcgaagccatcgcccatggcgacggggaatcggactggacggcgctggcgaaggtagcgttgtcacgatcgggacaaatctga

SEQ ID NO: 325431 - DNA, 1104 bp, Pseudomonas aeruginosa
gtgggccatgaagcgttcccagcggtcctgcttgacctcgtccggcaccggctccaggcccagctcgttggccggagcgccttcgacgggggagtactggaagcagccgacgcggtcgagctgggcttccgtcagccagtcgagcaggtactggaagtcttcttcggtttcgcccgggaagccgacgatgaaggtcgagcggatggtcagttccgggcagatctcgcgccactgcttgatccgggccagggtcttgtcctcgaaggccgggcgcttcatggccttgagcaccttcgggctggcgtgctggaaggggatgtcgaggtacggcaggagcttgccggcggccatcagcgggatcacgtcgtcgacgttggggtacgggtagacgtagtgcaggcgaacccatacgcccatgctgctcagcgcctcgcagagttccttcatgcgggtcttgaccggctggccgttccagaagtcggtcttgtacttcaggtcgacgccgtaggcgctggtgtcctgggaaatcaccaggagttccttgaccccggccttgaccaggcgctcggcctcgctcagcacgtcgccgaccggccggctgaccagcttgccgcgcatggacgggatgatgcagaagctgcaactgtggttgcagccttcggaaatcttcaggtaggcgtagtggcgcggggtcagcttgacgccttgcggcgggaccaggtcgaccagcgggttgtgttcggtcttcggcggcaccacttcgtgcaccgcggtgactacctgctcgtactgttgtgggccggtgaccgccaggacgctggggtgcacgtcgcggatcgtgtgctcttccacgcccatgcagccggtgacgatgaccttgccgttctcggcgatggcttcgccgatcacttccagggactcggccttggcgctgtcgatgaaaccgcaggtgttgaccaccacgacgtcggcgtcttcgtaggtcgggacgacctcatagccttccatgcgcagctgggtgaggatgcgctcggagtcgaccagcgccttggggcatccaagactgacgaagccgactttgggagtgggggtggacatggctaa

SEQ ID NO: 325432 - DNA, 2229 bp, Pseudomonas aeruginosa
atgtacccccaattccgtcgcggccatctcgccgctgccgtccttttcgcttcatcgagcctgctgggcgggcaggccctggccgaggacgagcgcctggaagaactggacgaacgcgccgagtcggtggtccagctgggtgacgaggtggtgctgggcaccgccgaacaggagctcaagcaggcaccgggggtatccatcatcaccgccgaggacatcaggaagcgcccgccggtgaacgatctctccgagatcatccgcaccatgcccggggtcaacctcaccggcaacagttccagcggccagcgcggcaacaaccggcagatcgacatccgcggcatggggccggagaacaccctgatcctggtcgatggcaagccggtcagctcgcgcaactcggtgcgctacggctggcgtggcgaacgcgacacccgcggcgacagcaactgggtgccgccggaggaggtcgagcgcatcgaggtcctccgtgggcccgcggcggcacgctacggttccggcgcggcgggcggggtagtcaacatcatcaccaagcgcccgaccgatcgtttgcgtggctccatgacggtgttcaccaacattccggaaagctccaaggatggcgccacgcgccgcgccaacttcagcctcagcgggccgctgaccgaagccttgagcttccgcgcgtacggcagcgcgaacaagaccgattcggacgataccgacatcaacctcggacataccgtcaacccgagccgtaccgtggccggacgcgaaggggtacgcaatcgcgatctcagcgggatgctgtcgtggcaggtgacccccgaccaggtcgtcgatttcgaagcgggcttcagccgacagggcaacatctatgccggcgatacccagaacaacaacggcaccgccaatacccagggactcgccgacgacggtgcggagaccaaccgcatgtatcgcgagaactacgccatcacccacaacgggacctggtcgttcggtacttccaggttcgtcgcccagtacgactccacccgcaacaaccgtctggaggaggggctggccggttccgtcgaggggcagatcggcgccgaccgttcgttcagcaccagcaagctggagaactatcgcctcagcggcgaactcaaccttccgttgcatgcgttgttcgagcaggtgctgacggtgggcgcggagtggaacaaggaaaccctcaacgacccgtcctcgctcaagcagggcttcgtgggaagcgatagcttgccggggacccccgcggccggctcgcgaagcccgaaaagcaaggcggagatccgggcgctgtacgtggaggacaatatcgaactgcgccccggcaccatgctcacccccgggctgcgcctggacgatcacagcgacttcggcctgaactggagcccgagcctgaacgcttcccagacgctcggcgaatacttcacggtcaaggccggtatcgcacgggccttcaaggcgcccaacctgtaccagagcaacccgaactacctgctctatacccgtggcaacggctgcccgatccagaccagcagcggcggctgctacctggtcggcaacgagaacctggacgccgagaccagcgtcaacaaggaactgggcatcgagttccggcgcgatggctgggtcgccgggctcacctatttccgcaacgactacaagaacaagatcgtcgcgccgctggatgtcatgggacagaccgggaccggtaacaacatcctgcaatggagcaacgcgaagaaagcagtggtcgagggcctggaaggcaacctgctggtccccctgcacgaggaccttagctggagcaccaacctgacctatatgctgcaatccaaggacaaggacaccggcaacccgctttcggtgatccccgagtacaccctgaactcgaccctggactggcaggccagcgagcgtctttccacccaactgaccagcaccatctacggccgccaggagccgccgaagcatggcaccagccgcaacacgccggtggtctcgcgaaaagaggtgggtacctatggcatctggggcgtcagcgccggctacaccttcagcgagaacctgagcgtacggggcggggtaagcaacctcttcgacaagcgcctgtaccgccagggcaactccttcgacgccggtgcggcaacctacaacgagccgggtcgcgcctactacgtttcgatgaccacctcgttctga

SEQ ID NO: 325433 - DNA, 645 bp, Pseudomonas aeruginosa
gtggatttcgaccggctggcggagaaggccaacgtgcgtaccgccgaggatatgttcgccgctctcggcgccggcgacctgcgcttggcgcacctggtcaactatgcccagcaactggtcgagccggaccgcgacagcgagcaactcgaactgatcccgcgcaagccgagcaagatcggccacggcaagcgcggcgacgtgcagatccagggcgtcggcaacctcctgacgcagatggccggctgctgccagccgctgccgggagatcccatcgtcggctacatcacgctgggccgtggggtcaccatccaccgccaggattgcgccaccgcgctgcaactggcgggacgcgaaccggagcggatgatccaggtcagttgggggccggagccggttcgcacctatccggtggatatcgcgatccgtgcctatgatcgttccggcctgttgcgcgacgtgtcccaggtgctgctcaatgagcggatcaacgttctggcggtgaatacccgttcgaacaaggaagacaacaccgcgaccatgcaactgaccatcgagattcccggtctggacgctcttggacgcctgctggcgcgcgtttcgcaactgcccaacatcatcgaggcgcggcgcaaccgtacgccttga

SEQ ID NO: 325434 - DNA, 594 bp, Pseudomonas aeruginosa
atgtaccgactcgacgacctgctccacctcatggcgcgcctgcgcgatcccgaattcggctgcccctgggatctccagcagagctacgcgaccatcgtcccgcacaccctggaagaagcctacgaagtagcggacgccatagagcagggggatttcccgcaattgcgcgaggaactgggcgacctgctgttccaggtggtttattacagccagttggctcgcgaagaggatcgcttcgctttcgacgaggtggtggacggcatcacccgcaagctgatccgtcgacatccccacgtattcctcgatggcgatctctatggcaagcccgatgcggcgaagctcgccgaagcagcggtcaagcagcgctgggaagaactgaaggccgaggagcgtgccgccaaggccaaggagccgcagcagttgtcgctgctggatgacgttcctgtcgccctgccggcgttgtcacgggcggcgaagctgcagaagcgcgcggcgcaggtcggtttcgactggccggaagcgctgcctgtggtggacaaggttcgcgaggagctggacgaagtcctcgaggcaatgccatcggcgcccaggtga

SEQ ID NO: 325435 - DNA, 999 bp, Pseudomonas aeruginosa
atgcaagcgtacgagtcgggtgacgagcgcggcttgatctatggctacgtcctcaacgggcgcggcggcggacgccgtgtcggacgcaaccagatagcggtgctcgacctgctgccggaggagagcctttggctgcactgggaccgcggcgtaccggaagcgcaggcctggctgcgggattccgcggggctcagcgagttcgcctgcgatctgctgctggaggaggcgactcgcccccgtttgctcgatctcggggccgaaagcctgctggtgttcctccgtggagtgaacctgaatccgggcgcggagccggaagacatggtttcgctgcgggtattcgccgacgcgcgccgggtgatctcgctgcgcctgcggccgctgaaggcggtggccgatctgctcgaggacctggaggcggggaaagggccgaagacggcatccgaggtcgtgtactacctcgcgcactacctgaccgatcgcgtcgacacgctgatcagcgggatagccgaccagctcgatgctgtcgaggaactggtcgaggcggacgagcgcgccagtcccgaccagcaccagttgcgtaccctgcgccgccggtcggcggggttgcggcgctacctggcgccgcagcgggatatctactcgcaactggcgcgctacaagctgtcctggttcgtcgaggacgacgccgattactggaacgagctgaacaaccggctgacgcggaatctcgaagagctcgagttgatacgggagcgcatcagcgtcctgcaggaagccgagtcgcggcgaatcaccgaacggatgaaccgcaccatgtatctccttggtataatcaccggctttttcctgccgatgagcttcgtcaccggcctgctgggaatcaatgtcggcggcattccgggggcggatgcaccgcatgggttctggctggcctgcctgctgatcggcggggtcgccaccttccagtggtgggtatttcgtcggctgcgctggctctga

SEQ ID NO: 325436 - DNA, 579 bp, Pseudomonas aeruginosa
atgctgcgtatcctgctgatcgacgacacgccgaagaaagtcggacgcctcagggccgccctgctcgagagcggtttcgaagtggtggacgagtcggggctgaccatcgacctgccggcgcgcgtcgaagcgctgcgtcccgacgtgatcctgatcgacacggagtctcccggccgcgacgtgatggagcaggtctgcctggtcagccgcgaccagccgcgcccgatcgtgatgttcaccgacgagcacgatccgggagtgatgcgccgcgccatccagtccggggtcagcgcctacatcgtcgaaggcatccaggccagccgcctgcaaccgatcctcgacgtggccatggcgcgcttcgagagcgaccaggcgctgcgcgctcaactgcaggcgcgcgaggcgcagctggccgagcgcaagcgcatcgagctggccaagggcctgctgatgaagatgaagcattgcggcgaggaggaagcctacacgctgatgcgacgccaggccatgagccgccagcagaagctgatccaggtcgccgagcagatcatcgccatgcacgacatgctcggcggctga

SEQ ID NO: 325437 - DNA, 2448 bp, Pseudomonas aeruginosa
gtgcttgaagcctaccgcaaacacgtagaagagcgtgccgcccagggtgtcgtgccccaaccgctgaacgccgaacagaccgcaggcctggtcgagctgctgaagaacccgccggccggcgaagaagaattcctccttgacctgatcaccaaccgcgtaccgccgggcgtcgacgaagccgcctacgtcaaggccggattcctttccgccatcgtcaagggcgaagccacctccccccttatcgacaagcaacgtgccgccgagctgctgggcaccatgcagggcggctacaacatcgccaccctggtcgaactgctggacgacgccgaactggccaacaccgccgccgaacagctgaagcacaccctgctgatgttcgacgccttccacgacgtcgccgagcgcgccaagaagggcaatgccgcggccaagtccgtgctgcaatcctgggccgatggcgagtggttcaaggccaagccggaagtcccggaaaagctgactctcaccgtattcaaggtccccggcgaaaccaacaccgacgacctctccccggcccccgacgcctggtcgcgcccggacatcccgctgcacgccctggccatgctgaagatggctcgcgacggcatcgagccggtccagccgggttcggtcggtccgctgaagcagatcgaagcggtcaaggccaagggcttcccggtcgcctacgtcggcgacgtggtcggcaccggttcctcgcgcaaatccgccaccaactcggtgctgtggttcttcggcgacgacattccgttcgtgccgaacaagcgtgccggcggcttctgcttcggcaccaagatcgcgccgatcttctacaacaccatggaagatgccggcgccctgccgatcgagttcgactgcaccaacctggccatgggcgacgtcatcgacgtatacccctatgaaggcaaggtcgttcgccacgacagcggcgaagtggtcaccaccttcgagctgaagaccccggtcctgctcgacgaagtccgcgccggcggccgtatcccgctgatcgtcggccgtggcctgaccgagaaggcccgcgccgagctgggcctgggcgcctccgacctgttccgcaagccggaagcaccggccgatagcggcaagggcttcaccctggcgcagaaaatggtcggccgcgcctgcggtctgccggaaggccagggcgtgcgcccgggcacctactgcgaaccgaagatgaccaccgtcggttcccaggacaccaccggcccgatgacccgcgacgaactgaaggacctcgcctgcctcggcttctccgccgacctggtgatgcagtccttctgccacaccgcgggcttcccgatcggcatctcgttcccggccggctccggcctggtggccttcgccgccgccaccggcgtgatgccgctggacatgccggagtcggtgctggtgcgcttcaagggcaagctgcaaccgggcatcaccctgcgtgacctggtccatgcgatcccttactacgcgatccagcagggcctgctgaccgtcgagaagaaaggcaagaagaacatcttctccggccgcatcctcgagatcgaaggcctcaacgacctgaccgtggaacaggccttcgagctgtccgacgcctcggccgagcgttccgccgccggctgcaccatcaagctgccggaacaggcgatcgccgagtacctgaagtccaacatcaccctgctgcgctggatgatcggcgaaggctacggcgacccgcgcaccctggagcgtcgcgcccaggcgatggaagcctggctggccaagccggagctgctggaagccgacaaggacgccgagtacgccgcggtgatcgagatcgacctggccgacgtcaaggagccggtgctctgcgcgccgaacgatccggacgacgcgcgtctgctgtcgagcgtacagggccgcaagatcgatgaagtgttcatcggctcctgcatgaccaacatcggtcacttccgcgcagccggcaagctgctggacaaggtcaagggcggcatcccgacccgtctgtggctggctccgccgaccaagatggacgcccaccagttgaccgaggaaggctactacggcatctacggcaaggctggcgcgcgcatggaaatgccgggctgctcgctgtgcatgggcaaccaggctcgcgtccagaccggttccaccgtggtctccacctcgacccgtaacttcccgaaccgtctgggcgatgccaccgatgtgttcctggcatcggccgaactggcggcggtctcctcgatcctcggcaaactgccgaccgtggaggagtacatggcctacgcgaaggacatcgacagcatggctgccgacgtctaccgctacctgagcttcgaccagatcgccgagttccgcgaagcggctgcgaacgccaagatcccggtcgttcaggcctga

SEQ ID NO: 325438 - DNA, 522 bp, Pseudomonas aeruginosa
atgttgcccgagatcgaccaattcctcgcctgttccactcccgccgcctgggttgaggcggccctggagcgccaggacgtcatgctgctggaccacaaggcctgcgagatgaaggccgcggcgacggcgatgcaactgatcggcaagtactccggccgcctggacctggtgaacaagatgagccgcctggcgcgcgaggagctgcgccacttcgagcaggtgctggcgatcctgaagaaacgcggcatcccggtggtcaatgtcagcgcctcccgctacgcctcggcgctgcgcgacctggtgccgcacctggacgcggagctggcgaaattctacggcggtttgctgaagtccgagtcgcggcatttccaggactacctgaagctggcctaccagtacggcgacgaggccgacgtggagcggacgatcgaggtggtgcgggccaaggaggccgagctgatcagcagtccggacaacgaattccgcttccacagcggccacccggtggacctggtggcctga

SEQ ID NO: 325439 - DNA, 1581 bp, Pseudomonas aeruginosa
  misc_feature (1496)..(1505): n is a, c, g, or t
atgagcaagccagagaccaccgccgccccgaacttcctgcgccagatcgttcaagccgacctggatgccggcaagcacgcgaagatcgtcacccgtttccccccggagcccaacggttacctgcacatcggccacgccaagtcgatctgcctgaacttcggcctggcccaggaattcgctggcgattgccatctgcgcttcgatgacaccaacccggccaaggaagaccaggagtacatcgatgccatcgaggccgacatcaagtggctgggcttccagtggtccggcgaggtctgctatgcctccaactatttcgaccagctgcatgcctgggccatcgagctgatcaaggccggcaaggcgttcgtctgcgacctcggtcccgaggaaatgcgcgaataccgcggcaccctcaccgagccgggccgcaacagcccttaccgtgaccgttcggtggaggagaacctcgacctgttcgcccgcatgaaggccggtgagttccccgacggcgcccgttcgctgcgggcgaagatcgacatgggttcgccgaacatgaacctgcgcgacccgatcctgtaccgcatccgccatgcgcatcaccaccagaccggcgacaagtggtgcatctacccgagctacgacttcacccacggtcagtcggacgccatcgagggcatcacccattcgatctgcaccctggaattcgaagaccatcgtccgctctacgagtggttcctggccaacctgccggtgcctgcgcaaccgcgccagtacgaattctcccggctcaacctgaactacaccgtgaccagcaagcgcaagctcaagcaactggtcgacgaaggccatgtcagcggctgggacgatccgcgcatgtcgaccctgtccggctatcgccgccgcggctacaccccggagtcgatccgcaacttctgcgagatgatcggggtgaaccgcgccagcggcgtggtcgacatcggcatgctcgagttcagcatccgcgaccacctggacgccaccgcgccgcgtgccatgtgcgtgctgaaaccgctcaaggtggtgatcaccaactaccccgaagggcaggtggagaacctcgagttgccgcgtcatccgaaggaagacatgggggtgcgcgtactgccgttcggtcgcgagctgttcatcgatgccggtgacttcgaggaagtcccgccggccggctacaagcgcctgatccccggtggcgaggtgcgtctgcgtggcagctacgtgatccgtgccgacgaagcgatcaaggatgccgacggcaatatcgtcgaactgcgctgcagctacgatccggacaccctgggcaagaacccggaaggccgcaaggtcaagggcgtgatccactgggtgccggccgagggcagcgtcgagtgcgaagtgcgcctgtacgatcggctgttccgctcggccaatccggagaaggcggaagagggcggcagcttcctcgacaacatcaacgccgactnnnnnnnnnngtgctcaacggcaacctctacctcaagggcggcagcttcctcgacaacatcaacgccgactccctgcaggtactga

SEQ ID NO: 325440 - DNA, 2610 bp, Pseudomonas aeruginosa
gtggcgttctggtacgccgagcggccgccgctggccgagctttcccagttcgactgggtggtgctcgaagcggcgcacctcaagccggccgatgtcgggtatctgaaagagcagggcagcacgcccttcgcctatctgtcggtcggcgagttcgacggcgacgccgccgccatcgccgatagcggcctggcccggggcaagagcgcggtccgcaaccaagcctggaacagccaggtaatggacctcgccgcgccgagttggcgggcgcacctgctcaagcgcgccgcggagctgcgcaaacagggctacgccggcctgttcctcgataccctggacagcttccagctacaggccgaggagcgccgcgagggccagcgccgggcgctggccagtttcctcgcccagctgcatcgccaggagccgggcctcaagctgtttttcaatcgcggtttcgaagtgctgccggagttgcccggcgtcgcgtcggcggtggccgtggagtcgatccatgccggttgggacgccgctgccgggcaataccgcgaggtgccccaggacgatcgcgattggctgaagggtcacctggatgccctgcgcgcccagggcatgcccatcgtcgccatcgactacctgccgccggagcggcgcgacgaggcgcgcgcgctcgctgcgcgcctgcgtagcgaaggctacgtgccgttcgtcagcaccccggcgctggactacctgggggtgagcgacgtcgaggtgcaaccgcggcgcatcgcgctgctctacgatccgcgcgagggcgacctgaccctgagccccggccacgtctacctcggcggcctgctcgaatacctcggttatcgggtcgactacctgcccaccgaccagccgctgcccgaacgtccgctgagcggtctctacgccggggtggtgacctggatgaccagtggaccgccgctggccagcgacgccttcgacaactgggtcgctgcgcgtctcgacgaaaaggtgccggtggcgttcctcgccggcctgcctaccgagaacgacggtctgttgcagcgcctggggattcgccgactgtcgcagaaactcaaggtcaagccgagcaccgagacccacgaccaggcgctgctgggcgccttcgaggcgccgctggtgatccggatccgcgacctgccggcgctcaccgtactcgacccggcgcgggtggccccggcgctcaagctcaagggcgacggcaaggagtacgtgccggtggcgaccgccgactggggcggcttcgccctggcgccctatgtgctggaggagggtagcgagcaccggcgctggatcctcgatccgttcgccttcctgcgcaaggccttgcgtcttgtgccgctgccgagtcccgacgcgaccaccgagaatggccggcgcatcgccaccgtgcacatcgatggcgacggcttcgtctcccgtgccgaggtgcccggcagtccctatgccggccagcaggtgctggaggacttcatcaagccctatccgttcctcacctcggtctcggtgatcgaaggcgaggtcgggccgaagggcatgtacccgcacctggccagggagctggagccgatcgcccggcgcatcttcgccgacgaccagtatggctacaagatggccatcccgggctacgacaaggtcgacttcgtacgcgaggtgatcggggcccgcgactacatcgagcagcgcctgaccaccccgcggaagccggtgaagatgatcttctggtccggcgacgcgctgcccgacaccgccaccatcaagctcgcctacgacgccgggctgatgaacgtcaacggcggcaataccgcgctgacccgggcctttccctcgctgaccggactctacccgctgatccggcccacccgcggcggcgtgcagtactacgcgccgatcatcaacgagaacgtctacaccaatctctggcaggggccgtactacggcttccgcggcgtcatcgataccttcgccctgaccgacagcccgcgccgcctgcgcggcctgcacctgtactaccacttctattcggggaccaagcaggcctcgatccgcaccatgcaccagatctacgcggcgatgcaggcggagcatccgttgtcgctgtggatgagcgactacatcccgcgcctggaaggcctgcatcgcgccagcctggccaagcgtgccgatggcagctggcagttgcgcggcttcgccgccttgcgcacggtgcgcctggacccggcgctgggttggccggacctcgctcgctccacgggagtcgcgggcgtgcgcgacctgccccaggggcgctatgtacacctgagtgcggcgaatgcgcgcctggtcctgcgcgacagccgcgatccgcggccggcgctggaggaggccaacctgccgctgaagcactggcgctaccgcgacgatggccgcgtcgagttcgccttcgccgggcacctgccattgcgcctggtggtgcgcgcggcgggcgattgccggctgagcgcggccggcaaggccttcccgggaaaggccggcaacggcctgtggacgttcgagttgccgatggagcaggtgcgcgatggccaactcgtctgccgctga
